United States Patent Application Publication US 2020/0377945 A1 - sequence listing, part 52

SEQ ID NO: 11525 - DNA, 83610 bp, Unknown
  gut microbiota DNA sequence
aagctgggggacgattttgacaaggctgctgtccttgccctgctcacgcagaacgcccacagagccgccgaacagaccacagccatacccgaatacccccacacccaaaaggaacgcttgcgagaggaaaaaaccgcaaaaaccgccccggcagacaacaccttgcagcgcatggttgaccgggaagccaagcgagctgagggcaagggcgtgggctatgaccgttgggcttccctgcacaacctcaaacagatggcggctacccacaacttcctcatggagaacgaactgcttgaccttgacaagctggacgcagccgtggagagcagccggaaagctctttccgaagcaagggaaagtctgcggggcattgagcagagcatttccgacaagaaaagtctgcgaaaggttgtcaacgattaccgccgcacccgccccaccattgacgctcataaaaagctgtccggcagaaaagcggagaactaccgccagtcccacgaagcggaatttatcatctatgaagctgccctgcgccagctaaaggtgcttgcaccgggaaagaagctgcccgccacttccaagctgaatacggagattgaagccctcatttccgagaaaaacgcagcttacaacacctaccgcaccgcaaaagccgagtatgagcagcttgccaccgccaaacggaacgcagagcagatactacacggcacaccgagccgacagaaaaagcatgaacaggagcgttaaaaaccgccccgaaatgataccgaaaccatacaaaaggcaggggggtatgccataccctatccgcaatacccctgacctttccaacggggcttacagggcagatttttcccgaaaatggcaccgggaacatacagattttgcccctgtcccctcatacccgaccaaaccgaagaaaggagcgttttttcatgccgagaatgagcaagaagcggcggctggaatgggcgttcttcctcaatgagcgaaaccgcattactttcaatgccctttgccggggctgtacccatgactgcaagcagagttttagggctatcgtggtactctgcccccggtattattcaaagagatggaaagcccgccccacagataaggagaaccaagattatgtcagataaccgcaaatattattacctcaaactgaaagaaagctattttgacgatgacgctatcgtgctgctggaaagtatgcaggacggtatgctgtattccaatatcctcttgaagctgtacttaaaatcgctgaaatacggcggcactttgcagcttgacgaaaatatcccctacaccgcccaaatgatagccaccattacccgccagcaggtcggcacagtcgagagggctttgcaaatctttatgaaactggggcttgttgaaccgctggacaacggggctttgtatatgagcaatatcgagcttttcatcggtcagtcctctaccgagggggagcgtaagcgcagggcaagaatgaagatttcagagcaaaaacggcttagtggacaagtgtccgaagcaaaagcggacatttgtccaccagagatagagataaagaaagagatagatatagagatagaaaaagagagagagttaaaaccgggacgagccgcccccgcagcttacggcagatataaaaatgtgattttgacagatacagagctttctgaactgaaagcagaactgcccgacaaatgggagtattacattgaccggctatccggctatatcgcttctaccgggaggaaatacaagaaccatgccgccactatccgcagatgggcggctgacgataccgctaaagctgccccgaaaaagggcatacccgattacagctacaaggagggagaaagtctatgaaaccagcttttgaagatatgagtttacagataccagcagccaccgccgagccggaggactacacaggtgaggacggtctactctactgcggcaagtgccggacaccgaaagaagcctattttccggctgataaggttgccctgttcgggcgtgaccgacacccggcagagtgtgactgccagcgggcgcagcgcatggagcgtgaagccgccgaacagcagagaaagcaccgggacaaggtagaagaactgaaacgcctgggctttaccgacccggctatgcgggaatggacttttgccaatgacaacggcagaaacccgcagatgaaaaccgcccgtttctatgtggagcattgggaggacatgaaagccgggaacatcggctatctgctctggggcagcgtcggcacaggcaaaagctaccttgccgggtgcattgcaaacgccctcatggagcaggaaatctccgtaaaaatgacgaacttcgccgctgtcctcaatgaccttgccgccacctttgagggcaggaacgaatatatttccaagctctgccgctatccgctgcttattcttgatgattttggaatggagcgtggaacagagtacggcttagagcaggtctacaatgtgattgacagtcgttaccgaagcgaaaagccgctgatcgtcacgaccaatctaagccttgacgagctgaacaatcccccggacacagcccacaagcggatttatgaccgggtaacagagatgtgtacccctgtctgctgctccggcgtgaatttccgcagggaaaaggcacaggagaaaatggaacggctgaaaaagctgatgaacgattgaaaggagtttgcctatgaccgataaaaaagagcatatcaaacacagcatgaaaagcaccgcacccgccgactgcgtgacggaaatccgcatagggaactctgttcttgtggtgtccggctttttcaagcagagtgccacggaaaccgcagccgacaaaatggctaaggtgctggaagcggaagctgctacacaaaaatcggcaatatgacgggcggtaaagaagcatttttcacattttgccgctatacacgccgccccgccatgtggtacaatcgaagtacggaatagtggggctggctgtcagaaacggaggaaaccatgttaagacagacaacccaaaaccttattaccgccctttatccgagattatcccatgaagatgaattgcagggggagagcaactctatatccaaccaaaagcgcattttagaaacctacgccaagcagaacggctttaccaatctctgctggtacacggacgatggttatagtggtgcgaacttccaaagacccgggtttcaagccatgcttgcagacattgaagccggaaaagtcggcacagtcatagtcaaggatatgtcacgtttagggcgaaattatctccaagtgggaatgtacacagaaatgcttttcccacagaaaggcgtccgctttatcgctatcaatgacggagtggacagcgcaatgggcgacaacgattttaccccgctgcgtaatcttttcaacgaatggatggtgagagatacgagcaaaaaaatcaaggcagttaagaaagcaaaaggtctaagcggaaagcctgttaccagcaagcccgtgtacggctacctcatggacgatgacgagaatttcatcattgacgaggaagccgccccggtagtcaagcagatttaccagctttgccttgccggaaacgggcctaccaagatagcccgtatgctgaccgagcagcaaatccccacgccggggacgctggaataccagcgcacaggcagcacacgccgctaccaccccggctatgaatgtaagtgggcgaccaatactgttgttcatcttctggaaaaccgggagtacacaggctgtcttgtgaacttcaagacggaaaaaccgtcctacaagatgaagcacagcatagacaatcccattgagaaacaggcgattttcgagaaccaccatgagccaatcatcgacttgcagacatgggaacgggtgcaggagttacgcaagcagcgcaaacgccccaaccgctacgatgatgtgggcttgttctccggcttgctgttctgcgccgactgcggtcatgtgatgtaccagcagcggtatcagaccgacaagagaaagcaggattgctacatctgcggcagctataagaagcgcaccgccgactgtacggcgcacttcattcgcaccgaccttttgacggcgggtgtgctggacaatctgcggaaagtgaccgcctatgcacagaagcacgaagcccggttcgtgaagctgcttatccagcagaatgaaatgggcggcaagcggaagctggcggcggcagccaagcagcttgaacaggtgcagagccgcattgcagaactttcccgctacatcaagcgtctgtatgaggacaatgtaaacgggaaaatcagtgatgagcgtttcatggaaatgtccgcagactacgaagccgagcagcgggaactgaaagacagagccgccgctttgcagggcgagctggacaaggcacaggaagccacggtaaacgctgaaaagtttatgagcgttgtccgcaagtacctttctatcgaagaactgacacacactcttttgcgtgaaatggtggagaaaatcgttgtttatgaatgtgagtatgacgagaacgaagtacgccgccagcgcattgatatttattacagctttgtaggcaagattgacttgcccgaagaataaagcccgacctatccgacaccctgcgcaagtgtcggataggaacggcaaaattttttacacttctattacttctttatcacacataagcaaagagttgcggaatgtattggaaagctacggatatgaaatgaatgcaccgagaagcggaagcagtcattatacgttcagaaaacagggctgtatgccagttacaataccgaagcatgaaccaatcaagaaagtttatgtggaaatggtgcggcagattgtagaaagcgaggcgaagaatgatgaagacgctgaatgattacatggcaatgtcttatcgtatggaaattgtagaagataaagatgaaggtggatttgtggtttcttatccggatttgcctggctgcattacctgtggtgaaactgtagaaagtgcggtggcgaatgcgctggatgcgaaaaaggcgtggcttgaagctgcattggaagatggcgtggagattcatgaaccagacagtctggaagattattccggtcagtttaagctgagaattcctcggagcctgcacagatcactggcagaacattcgcaaagagaaggaattagcatgaaccagtattgtgtatatcttctttccagaaatgatgcagtcttttcaaaataacgattgtgaaacacttatgccatgcttgctttgaagtggcaacaaattggcaacaaaaaatcagcgtgccaaaataatatatgtaacagaatggcagaaaaacgaaacaaatatgtttaaatccatcttcggatttgccgagtttgaataagagaagatttttttgaccaatggttaattaaccagaaattgccaaggctttcaacagcagagcgcgagacggcgcaagacgtccagtggacgtctgctctgcgccgaccggagcggagcgtagacctcgaacgacctggtccggcaggactcgatttaacaaaaaaggacatccatcggatgtcctttttgttaaaagagagcgcgagacgggactcgaacccgcggccccgaccttggcaaggtcgtgctccaccaactgagccactcgcgcatagcttgttgtgtcggttatgtctgccggacacatttgatatcatacagcgtgaatgaaaatttgtcaacgcctttttttatattttttgaaaaacttgaacaatttgtgattttaaagcgtttttgagagtaaagcagtcatgggaaagagtacaccacatataatgtaataatcagtatgcggaggcttaagatgagtgcaaagacaaaggtcgtggttcttcatatgaaagaactgatttatacactgattttcgcaggacttggaattctgctgatttttttactgctgttcatgttcctgcccggaaaagaggacggagagtcggtagagacaatgaggtatgtggcgggagtgtacacgtcatcgatccagtttggagagcatgcggtggatatgcaggtgattgtggatgaaaaccggattcagtccgtctccatggtcaatctcgatgagacggtggagacaatgtatccgctgatggagccggcattggaaaacattgcggatcaggtggtggaaaaacagaccacggaaggaattacatacaatgcggattaccagtatacgtcagtggtattgttgaacgcgattgagaatgcactggcgaaggcggaactctccggcgcagagacgggagagtagaagagcgtaaaatggcaggatggcagaaaaatacccgggtgcggaaaagtcgccccgggttcttttgcgttattcttctgtgcttaaggaattcatgtaatcggtgatggcatcgacattggcgtaaatggtctcaaccggcttcttgctctcatagatgcggtaaccggacacaccagcccagcctgcgagcgcgatgacaaccagccagccgcagacaacagcgagcagatgcaggcgcttctcctttgccatagtcttcttgcggttctttttctcttctttatagcggtctactttagcctgactcataatctgtctcctttatgtgttcgatctttattttctgcaaaataaagtaaaattccaagaaataatataacccatttgcgggaaaaatgcaacagaaatgcaccttgtcatttcacggaaaattgagtacaattaagaattagcagaatagaatggaagaaaaacgggaggaacggaatgagtctcgcagataagatttttgtggatatgtgtaaggatatactggaaaatggaaccagcacggagggggaaaaagtaagaccgcactgggaggatgggacgagcgcctatacgatcaagaaatttggcgtggtgaaccgttatgatctctcaaaagagttccctgcgatcacgctccgcaagacggcgatcaagacctgcaccgaggagatgctctggatctggcagcgcaagtccaataacattcacgatttaaacagcacggtctgggatgagtgggcggatgcggacggctccatcggaaaagcatacggttaccagctcggcgtgaagcaccggtacaaggaaggcatgatggatcaggttgaccgcgtgatctacgatctgaagaataatccgttcagccggcgcatcatgacaaacatctatgtacatgcgaatctgcatgagatgaatctgtatccgtgcgcatacagtatgacgttcaatgtgacgcatcagccgggagatgagaagctgacactcaacgcgatcctaaaccagcgctcgcaggatgtgcttgccgccaacaactggaacgtctgccagtatgcggtgctgatgcatatgctggcgcaggtatgcgatatgaaggtcggggaactggtacatgtcatcgcggatgcacatatttatgaccggcacgtgccgattatcagggaactgatcgagagagagcagcatccggcaccgaagtttaccctcaatccggatgtcaaagatttttaccagttcacgacaaaggatatcacaatcgaggattacgtgacgggaccgcagatcaaaaatatcccgatcgcggtgtaagcacaaatagaaaggcgtaaaaaatgaatttaatagcagcagtggatcaaaattgggcaatcggcaataaaaatgagttactggtgagaattccggcggatcagaagtttttccgcgagacgacgaccggcaaggtggtggtcatgggaagaaaaacgttggagagttttccgaacgggcttccgcttaagaaccgcaccaatatcgtgctgacacacgatcatacctataaggttccgggtgcggttgtcgttcatgacatggatgagcttcatgaagaattaaaaaaatatgacagtgaggatatctatgtgatcggcggagagacgatctacagacagcttctggatgagtgcgacgtggcgcacatcacaaaaattgactatgcgtatgatgcagatgcgtattttccgaatctggatgagagaccggagtggaagatcacggcggacagcgaggagcagacgtactttgatctggagtattatttttaccggtacgagagggtaaaataggcgggatggcgtagagatggagaattttatttacagtgtggatgcaacatttccgatctttttagtcatggtgatcggttatatcctaaaacagatcgggatgttaaatgacaatttcgtcacggtggcaaaccggttcaactttaaggtgacactgccgtttatgctgttccgcgatatttccggcgtggatatccgggcggtcttcgacatccggtatgtgctgttctgcgcgctcgtgagcacggcgtgcttctggatcatctggggcggtgtgaagctgtttttgaaggatcagagcatgcggggagcttttgtgcaggcgtcgttccgcagcagcgcagcggtgatgggactggcgttcatccagaacatgtacggaagctcggcgatgggaccgctgatgatcgtgagcgcagtgccgctctacaatattttttctgtgattgtgctgacgtttgaaggggcacattccggggaggtggatccgaagcagaaggttaaggatgcctgcatcaacattgcaaagaatccgatcattctgggaatcttggccggacttatcgtgggacttcttggcattgattttccggtgattgtggataagacggtgaacagtgtggcacagatggcgacgcctctggcgcttatcacgatcggagcaggttttgagggaagaaaagcactggcgaagatccgcccgacgattgcggcatccatgatcaagctggtcatccagccgctcatttttctgccggtcgctgcgtggatgggatttcgcggggagcagatgatcgcaattctgattatgctggcatctccgacgacgccgagctgctacattatggcgaagaacatggacaacgatggcgtactcaccgcgagcgtgatcgtgatgacgacgcttctggcggcatttaccctgaccggatggatctttattttgaagacagtaggattgatagggtaaaggttcttgatgtattttaatattcttgatttatctttggataggattgcatttgtgaaaaagatggactatagttttttacaataatcctttctgcagaaaacggacggcagagagaaggcaaggaggacggcatggatattacaggcagaaagttatttgtgaaagctttgcaggaagaaggcgttaccaccctgtttggttatccgggcggaacggtgacggatctttttgacgaactatataagcaggatggtatcgaagtcgtcttaccgcggcatgagcaggggctgatccatgaggcggaaggatatgcgcggtcgacgggaaaagtgggagtatgtctggtcacgagcggaccgggagccaccaatatcatgacggggcttgcggatgcgcactacgacagtattcctctggtctgttttactggacaggtgccgttatccctcattggaaacgatgcatttcaggaggtggatattgtcggcatgacgcggagcatcaccaagtacggcgtgacggtgcggaaaagagaggacctggggcgcatcatcaagatggcgttctacattgcctccacgggaaagccaggaccggtgctcatcgatataccgaaggacatccagacggcgccaggacctgcagagtatccttccagcgtgcagatccgtggttacaaaccgaatgagagcgtgcatgtgggacagctgaaaaaggcgtataaactgctgcgtgcggcaaagaagccgcttatactggcgggcggaggcattaacattgcacatgccaacgacaagctgcttcagtttgcggaaaaaatgcagattccagttgtgacgacgatcatgggaaaaggagcgatcccgaccgggcatccgctctatgtggggaacagcggtatgcatggaaaatatgccgcaaatatggcagtcagcaaatgcgacgttctgttttccatcggcaccagattcaatgaccgcatcaccggcgatttaaacgaatttgcaccgaaggcgaagattgtacatatcgacgtggatacggcggcgatctcccgaaatgtggtcgtggacgtcccgattgtttccgatgcaaacctggcgttagagaagctgctcgagtgggcggagtccaaagacactgcagcatggcaggcacagattgccgggtgggatgagaaaaatccgctcgagatgcgcagggaccacggcatgacgccgcagatgatttttgagcatgtgaaccggacgttcggagaggcggtctatgtgacggatgtgggacagcaccagatgtgggcgacacagtatctggaactggattcctggcatcagctgattacctcgggaggtcttggcacgatgggattcgggcttccggcggcaatcggtgcaaagatcggcaatccggacaaggaagtggtctgcttttctggggatggcggtctgcagatgaacattcaggagatggcgacggcggttgtgcaggaggcgccggtcatcatctgcgtgtttaacaattactatctgggaatggtgcggcagatgcagcagttattctacggcaagcgttatgaggcaacctgcctgcgcagaagaaaaggatgcccggcgaactgcaagggaccgaacgcatcctgcccgccgtacacgccggattttattgcacttgcaaaaagctacggggcacacggaatccgcgtggagcgcgaggaggatattcaggcggcgttagatgaggcgcgcacatacaaggatgcgccgactatcatcgaatttatgatcgccaccgatgagatcgtgcttccgatggtgaagagcgggaatccgatgagtgaaatgatcttgaaataggaatggagacttactatgaagaatcgctggattgcattatatgtggaaaatcaggtcggtgttctggctaaggtgtccggtctgttttccggcaaatcgtataacttacagagtctgaccgtcggcacgacggaggacgagaccgtttcccgcatgacgatctgcgtgacgagtgacgacattacctttgagcagatcaaaaagcagctaaaccgtatggtagaggtcatcaaggtcattgatctcaccgatgtgccgatccatatgaaagagattctgtttgcgaaggtgctcgacatcaatgcagcggaaaagcttgaggtattccagattgcgcaggtgttccatgtggaggtgtcggatgtcggaaacgacagcgtgctgctggagtgcaagttgacagagcggcgcaacaacgaactgattgccctgctccgctcaaaattcaagagaatcgaagtggtaagaggcggtgctgtggcgattgagtcgatcagtacctcctgccgctagcatcagaggggaattgttgcaatcagcagggagtgtccttttagcgataagcaatattcgagaagtacatcttacagatttcagatggaaatgcatatggaatattctttgtgaaaaaatgagagcatttcttcctgacggatatttgcatcggattccgtgtctcttccacgtttggacaatccaacggggacatgtccgacacaccaaagacaatgggcggactttttagccgccctaactgtactccctcatagacaatataaaaccgcgcgaaccgaaactcgttgccatctgctattaaaaacaaggcagatggcaattcaaacatcggcttcgcgcggttatgttttattgcgggagtacaggtaagggcggcacaaaagtcctacaaattgtcttcggagtgcggacatggcccgtggagtgttccaaacttggaaagacacggattatcgcggatgcaaatatccggctggttagaaatgccgcatttttgaacagaattttcatatgcattccatctgaaattgaaagatgtaatctttttatatattacctgtcgctcaaaggacactccctgctgattgcaaaagttccgttctgtgctggcgcggcatttaaacgcgttttttcaggaaggcaataaatttttcaaaatgcatcggcgttccctggatctcctgcaccttcagacggttcgcttcggagaatccgactaaaatattgtggttcgcctcggcgaggtaatccatgataccgtcgatgtccgacttgatgttcttcgggcactggatgtagagatgccggttcgcactgatatgcagcgtgtaggagatgctgaagtggtaccagaaaaacttgtggagcgtcgagtatttgtagatccagatgatctcatcgatcggtacaatggcattgccgtacaccgaggtctcgatgaagaaatgttctgtgataaacatatcctccgttgcaagctgcggcagcgtcgcaagttcatcctctgcctgctccaaaagctttttcggattgccgaacagcgcgagatcctggcacgcgggcgagagaattggaaagcagatatagaggatgaaaaatacaatgcagatcagggcatagccgccggtcgcaaaaaatacgacgtagagcagcgtgtttccgagcagattgtaatcaggctcactcagtacatactgggagactttgttgtgaatgccgttttcggtccagttcagatccgaagcgagatgatttaacagctcatcaaaattctcggaaccgtgaagaatcttggcacggacggacacctgcggaatctccggaagtccctgttcactggtattcggggagagcagcacgatgatgcactcgtcattccgcatcgtgtaatagtagtaaccgctgatgtgccccagaaaggactgggtgtaaccggtgaacttcagatcggataaggtggcggatatgtattcttcatgccgtctgtaggtgctctcgagggtatccggggcatcgagcgtgtccggaaaaagcggcgctgacagcgagagaacgaaccacagtaccagaagaaaaatcagatacaggatcggtgtcagcagtctgcgcttgtagaatgactttatatttttggtaatatagtgttcaaactgatcgggcataggtgtaagatcctttgctgtattttgctgtgtttccagaaacatcggaaaaaacggcattttatggaataagtatacggtttaccggaaaaataatcaagaagatttgtgcgggggaatctgtcggcaaaccttgatttcacattggaaacttggtagtattacatagaaatgttccgcatgctggcggaagagaaagtgagaacgatatgggtgcatacgagagctttgcgagagtgtatgatctgtttatggataatgttccctatgaggaatgggggtcctatcttacggggctgctccgggaatacggcatctgcagcggaacggttgcggaactgggttgcggcaccggaaaaatgaccaggctgctggcggcggcagggtacgatatgatcggcgtggacaattccgaggagatgcttgagatcgcacgcgaggcagagtatgaggcggatgcgtggagtgcggcagaagcatgggacgaagctgacgaaaccgatgagccggaagaatatgcagaactgggcgagccggatgaaccggacgagctgcccaatgggggaattctctatctgctcgaggatatgcgtgaactggaactgtacggaagcgtgtgcgcggtggtgtcggtctgcgattccatgaattatattttggaggaagcggatctgcgcgaggtgttttcgcgtgtgcacgagtatctggaggaggatggcatctttatttttgacctgaatacggtatacaagtaccgggatcttctgggagagacgacgattgcggaaaaccgcgaggagggcagcttcatctgggagaattattttgatgaggagagtgccgtaaatgaatacgatctgacgctttatatccgcgaggacggtgaaacctaccgccggtttgaggaagtgcattatcagcgggcctatgatttaaagacgattggcagactgcttgcggatgcgggaatggagcttacggcagcctacgacgcgttcacaaaggaaccggtcagggacgactcggagcggatctatgtggtggcgcgcccgcgcaggtagaaggctttgagaagatacaggaacaacgaatccgaactgagtagaaaaagatacagtatatgaaaacggagcagaaagaaaagataccgtgcatgaaaacggagcaggaaaagaagatgtagcaaatccgaaatacagcaacaatagaaaaggagaacgaaatgagtcaggatagagattatattgtaagagctaccgcagcggagggaagtatccgcgcatttgcgatcacatcgcgccatctggtggaggaggcgagagtggatcatgacaccagcccggtgattacggcagcgctcggcagacttctctccggtgcggcgatgatgggaacgatgatgaagggggagaaggatcttctgacgatacagatccagtgcggcggcccggcgaagggctttacggtgaccgcggatgcaaacggacatgtcaagggattcccgaatgttccggatgtggaactgccgttaaatgcacagggaaagctggacgtcggcggtgcgctggggcttggcgtgatgagcgtcatcaaggacatgggattaaaggagccgtacgtgggacagatcgcgctgcagaccggtgagattgcggaggatctgacgtactattttgccacctccgagcaggtgccgtccgcggtaggactcggtgttctcgtgaatccggaccggtcggtcagacaggcgggaggatttatcatccagctgatgccgtttacaccggacgacgtggtggatcgtctcgagaagaagatcacggagattgcctccgtcacggagatgctggaagatgggaagacaccggaggagatcttggagctgattctcggcgagttcgggcttgagatcaacgatacggtggatgccgcattccagtgcgactgctccaaggagcgcgtctcccgtgcgattgcgacactgagcagaaaggatctggacgacatcgtaagcgacggagagtcgattgaggtaaaatgccagttctgtaacaaagcgtaccattttgacatcgacgagttaaaggaaatgagaaaatgagagatggatttgtaaaagttgccgccgtcacaccgaagatccgtgtggcggacacaacatacaacgccggcgtgatcgtggaaggaatccgggaagcggcggtggcaggcgcgaaggtgatcgtgctgccggagcttgtcatcacgggatatacctgcagtgatctgtttttgcaggaatatcttttagagcaggcgaagcgggcgctcggaacgatcgcggaggagacagcagaggtggacgccatcctttttgtcggtctaccgcttgcgtacaacggaaaactttataatgtggcagcggtgctctgccgcggggaagtgctcgggtttgtgcccaaaacctatcttccgaactacaatgaattttacgaggcaagacattttgccagaggaatggcagatccggtcgaggtcgatttcgagggagagtgtgtgccgatgggcacgcggcttttatttgtctgtacgtccctgccagaattaaagatcggcgcggagctttgcgaggatttgtggacgccggagccgccgagtatccgtcatgccagaaatggtgcgacgctgcttgtgaatctgtccgcatcagatgagaccaccggaaaggacatctaccggcgggagctggtaaacggacagtcggcgagacttctgtgcggctatatctatgcgagtgcgggagacggggagtccacgcaggacgtcgtctactccggacacaatgtgattgccgagaacggtcatattctaaaggaatcggagcggttcggaagcggtgtgatctgcacggagatcgatgtcaagcggatcgaggcggagcgccgccggatgacgacgtttgagatggcggaggacggctatgtggaggtgcgtttttctcttgaaacggaggagacggctctgacccgcttcatcgacccgatgccgtttgtgccgggaaatgaggcggaccgtatcagacgctgtgatgagatccttgccattcaggcagcgggattaaaaaagcgtctggagcatacgcactgtaagacggcggttgtgggcatttcgggcggtctggattccacgctggcactgcttgtcaccgtgcgtgcgttcgatctgctcggcatcccgcacgaccggatcaaggcagtcacgatgccgggcttcgggacgacggaccggacctatgacaacgcggtgtccctgatccggtgcctcggcgcggattttacggaagtcgacatcaaggaagcggtgaatgtgcatttccgtgatatcgggcaggatccggccgttcatgatgtgacctatgagaacggccaggcaagagagcggacgcagattctgatggacattgccaacaaggagggcggcatggtcatcggaaccggcgatctctcggagcttgcactcggctgggcgacatataacggcgaccatatgtccatgtatgcggtcaatgcctccgttccgaagacgctggtgcgccacctggtgcgctactacgcggatacctgcggggatgagaagcttggcgcggtattgacggatgtgctggacacgccggtatctccggagcttctgccgccggaggacggaaagatctcgcagaagacggaagatcttgtgggaccgtacgagcttcatgatttttacctgtaccacatgctgcgtcttggatttgcaccgaaaaaggtgtaccgtctcgcaaaagtggcgtttgacggcgtctacgacgatgagacgatcttaaaatggctgaaaaccttttaccggcgcttttttgcacagcaattcaagcgttcctgtctgccggacggaccgaaagtcggtagtgtggcggtctctccgcgcggggatctgcggatgccgtcggacgcgtgtgcggctgtctggctgcagcagttggaggagatcggatgatcatgcagtatcgcaaggataaaaacggaaatgagatttcggtgctcggctacgggtgtatgcgttttaccaaggagggcgggcatgccgatatcgataaggcggaaaaggaggtcatggcggcgatagatgccggtgtgaactatctcgataccgcatatgtctatgccggaaatgaggcggcggtcggggagatcctcgcgcgcaatcattgcagggaacgcatctacctggcaaccaagctgccgcactacctgatcaagtcggtggagggcgcccagaagatgttcgaggaggagctgcgccgcttacagacagattatattgattactatctgatgcatatgctgacggatcttcccacctgggaaaagttaaaaaagcttggcatggaggactggatccgggagaaaaaggcgtccggagagatccgcaacatcggattttcctatcacggcagatcggatatgttcatgcagctgatcgacgcctatgactgggatttctgccagatccagtataattatatggacgaacattcgcaggcgggcgtggatgggctgcgctacgcgcacgcgagggggattccggtgattattatggagccgctgcgcggcggcagactggtcaatctgctgccggagtcggcgaaggagctgttcgcacaggatgaggagcaccgcaccccggcagaattggcactcaagtggctgtacgaccagccggaggtgacctgcgtgctctccggcatgaattccatggagatggtcgaacagaatgtgcgcacagcttcggaatacggcgtcgggtgcatgacggagtcagatcgcgcgctggtggaagcggtgcggcaggagatcacaaagcacgtcaaggtgggatgcaccggctgcggttactgtatgccgtgcccacgcggggtggatatccccgggacattccgctgctacaatgcgatgtactccgaaggaaaaaagtccggccgcagggattatctgcagtgtacggcattccgcaagaatccggcgagcgcctcacagtgtgtgggatgcggcaaatgcgagcagcactgtccgcagcatatcgagatccgaggggagttaaaagcggcggcgggagaactcgagacggtgaagtacaagttcatgaagacggcaatcggcgtgctgaagctctggtagaaacacataacaggaagaaagcgggtttagaatacgatggaacaaatggaagcattaaaacagtcgatccgggaaaaagggaagatggttgttgcattttccggcggtgtggattcgacattcttattaaaagtggcacatgacgtgctgggagatggggcggtcgcagtgacggctcgctcctgttcctttccggagagagaattaagagaggcaaaagcattctgtgagaaggagcacataaaacatatcgtggtggagtcggaggaattgcagattgatggattttcccataatccgaccaaccgctgctacctctgcaagaaggagcttttcacaaagatctgggatattgcaaaggagtacgacatcccctacgtggcggaggcgtccaatctggacgacaacggcgattaccgcccgggactgatggcggttgccgagctttctgtgcttagtccgctgcgcgaggtggggatgaacaagagcatgatccgcgaactctcccacgggctggggcttccgacatggaataagcagtcgtttgcatgtctttcttcccgctttgtctacggggaggagatcaccgaggagcgccttggcatggtggaccgcgcggagcagcttctgctggatgccggatttcatcaggtgcgtgtgcggattcacgagagcggaacgaacacgattgcccgtatcgagatcggcacagaggattttgcaaagatgttcgccggtgatttttatcaggaggtcaacgcgaagtgtaaagagatcggctttacctatgtgacgctggatctcggcggataccggatgggaagcatgaacgacggcatccggaaagcataatattaaaactgcatagaatatagaaatagagtaacagaacaaaacagaaggattctctgacacagaatgcttctgtttcttttttagaacaaaaagaaattatttaatttcctacttgacatatatataaagtaggagtatatttcttatatcatataaaacagctaggaataataagaaataagataggatgtgaaaatgtgaactgggaagtcatctcgcaatacctgccgctgtatcagaaagccatgtggctgacacttcggatcggctggatgggaattgcattttcaatcatcatcggactcttctgtgcactgattgtacattataagataccggtggcgagacagattgtaaaaatatatatcgaattgttccgcaatacaccgcttctggtgcagctcttttttatctatttcggactgccgaaggtgggactttccatctccgcggatgtctgcggcgtggcgggtctggcacttttgggaggaagctatatggcggaggcgttccgcagcggactcgaggcgatcgagccgatccagatggagagcgcgttaagccttggcatgacgaaaaagcaggcagtgctctatgtcatcctgccgcaggcggtatccattagcgtaccggcatttgtggcgaatgtgattttcctgttaaaagagacgagtgtgttttcagcaatcagtctgatggatctgatgtttacggcaaaagatctgatcgggctttactataagacagcggagtgtctgttcttactggtggtattttatctgattatcttacttccggtatccatccttggaacgttgttagagaggaggctgcgctatgccggatttgggaattagtgtcctgcttaagggcaagaacatgataagacttctgggcggtctgtgggtcgcccttaggatcagcttgatctccgtggtcatcagtattccgctcggtattctgctcggcatcgtcatgacatggaagaatccggtgacaaaagcagtgacaagagtgtatctggagattgtccgcatcatgccgcagatggtactgctgtttctcgtgtttttcggaacgacgcggatgtttggctggaatttatcggcggagtttgcatcggtaatcgtatttacattctggggaaccgcagagatgggagatctggtgcgcggcgcgttaatcagtatcccgaagcaccagtatgagagtggtgcagcgcttggaatgacgagaagtcagatttatttttacattattatcccgcagaccctgcggcgtctgatcccgctgtcgatcaacctggtcacccgtatgatcaagacgacaagccttgtgatgatgatcggtgtggtggaggtgttaaaggtgacacagcagatcatcgaggcaaaccgtatggcatcgccgaatgcggcgttcggactgtacggaaccgtgtttatactgtattttctggcatgctggccgatcagtatgctggcgggacatctggaaaagaaatggagtaactgatatgaaggcagaagcagaagaattgttaaaaattgaacatatcaaaaaatcctacgagggaaacgagatcttaaaggatctaagcctgaccatccacaaaggagaggttgtggttatcatcggaccatccggatgcggtaagagcacactgcttcgatgtatcaacgccttagagccgattcaggagggaagcattacgctccgaggcgagaccatcgacggaaaggcgaagaatatcgccgggatccgtcagaaggtcgggatggtatttcagagctacgagctttttccacacaagacgatcctggaaaatgtgatcctggcaccgcttaaggtgcagaagagaacaaaagaggacgccgtttccgaggcaaaacagcttctggaaaaagtagggcttctcgacaagtgtgacagttttccgagacagctttccggcggtcagaagcagcgtgttgcgatcgtgcgtgcactgatgatgcaccccgagattatgctgttcgatgaggtgaccgcagcgcttgatccggagatggtgcgcgaggtactggatacgatgttagagcttgctaaggcaggaagcactatggtgatcgtcacacacgagatgtcctttgcaagggcggttgcagaccgtgtggtctttattgaccagggagagattgtggaagaaggaaagccggatgaattttttacccatccgacgacagagcgtgcgaaaaagtttctgcacacatttgaatttgaggcagtccgcgactagagagcggcacaaaaggttgattctgaagcttcgatggaagtttggaatagaaagagaggacaatattatgaaaaaagaaagattaacgaagagactggcactgtttacagcactgacattaactggagcaatgctggcaggctgtggcaatacagatgcagcggagagcagcagtgatgcgcagacaggagttaccgcagatacacaggtagccgcaggcgatgcatccgcagatgtggtataccgcaccttagacgagatcaaggagagcggcacaatcaacatcggtgtattttccgacaagaatccatttggctatgtggatgagaacggagagtatcagggatatgatgtctactttgcaaaccgtctggcagaggatctcggcgtggatgtgaacttcgtttccaccgaggctgcaagccgtattgagtatttacagaccggaaaagtagatgtcattctggctaactttaccgtgacaccggagcgcgcggaggaagttgatttcgcactgccgtacatgaacgtatccctcggtgtgatttctccggattctgcagtggttgagagtctggatgatctgacagcggatgatccggtgatcgtgatttccggtacaacagcagagacctacctgaccgagaactatccggatctgaccttacagaaatatgattcctatgcggcagcaaagactgcgcttgagaacggaaacggtgttgcatgggcaaacgataacacagaggttattgcattcgcacttcagaacccgggctataccgtaggtattccggagcttggaagcacggatacgattgcaccggcagtaagcaagggcaacacgaccgtattagactggatcaatgaggagatcaaggcacttggcgaggagaattttttccacgcagattacgaggcaacactggctgacacttacggcagtgactacgaggatacgcttgtggtagagggcggcgagaccaagtaagaactgaccatgtaacggaaggttcaaagcacagggaactgtatgaatcgtacaatgcactgtttgcggaacactggaaggagcaggcagggcaggatgtgacggtgatccagtcgcacggaggttccggcaagcaggcacttgaggtggcaaacggcctggaggcggatgtggtgacgctggcactggagggggatgtgcaggtggttgcggatgcgggaatgattgaggatggttttgaggatgaatttgatcaggaaagttccccgtacacatcgacgattgtttttctggtgcgcaaggacaatccgaagaacattgcggactgggatgatctgctccgggaggacgtgggcgtcatcaccccgaacccgaagacgtccggcggagcgcgctggaattatctggcggcatggtactattttgaaagtcagggacagagcggggaagagatcacagagaatatgaagacactctatcacaatgtgctggtgctggattcgggtgcgcgcggtgcgacgaccacgtttgcggagaacttctaccgcccgtcggatccggatgttttttccgattatatcagtacatcgggggagcgcgtcatcacggaactgccggcagacggaaaatggatcgtggatgacattgcactcacggatattgcgcactttggtggatggagtgaggcgtcggcgaagcatttcgcggacggcggagtgtttgaagcaattcatgaacagtgattaggaaatttacagggaacgcccggcagagcaatctgccgggcgttaaatttttgcgctggattcccggatgataagttctgtatccagaatcagagatttgggaaacatatcaggatggttgatggaatcaagaagaagttcgcatgccgaatagcccagctgaaaactcggctggtttacagtggtaatcgtcggacaggtcatgatggagatgtccaggttatcaaatccgacgacaataatatcctccggaatacgaagatcaaagcgtttagcggcacgaatgacagcggcggcaaaaacgtctgagataacgaaaaaagcatttggacgaatttcattattcaacagacggcagactgcggagtatgccatctggtaatttacttcaggcaggctgacaatccagtccggacgaacggaaatatcttttttgcggagcgtatcaagaaaaccttcctgacgcttcacagcatatttaaaggacatgggaccgtttatcattgcgattttattacaattacaggaaacaatatattctgcagcgcttgttgcggcactatagtcgtctatgctgacataagggtaatccgcgtgctcgttatattcgctgcattgaactaacggtacgacagagtggatcatatccagctgttccttggagacatgattcaataaaatgactccggcggcatgtacctgttttaacagattgataaaagagtaaatagaactccggtcaagcggggagtcgttgatcagcagacgataaccgtgtgccttggcggatacaagggcgccgtcgatgactttcaggtagaaaacgttatcgagttccggaacattcaaaataataagaggctgttcggtagccgcagctatagtacccttttcgagaagacatcccagtgcggacatggcattttcgacttgctggatggtttcggattttacaagttctctatgacgcaacactcgggaaacagtggcaggggagacccctgctttttttgcgatgtctgcgaccgtaattttatcttttttcatatctctgtgagcctcctgtgtatcaatataataatgatacaccagttttgtttattttgtaaatataaaatgaaacaaaatgtgaaaagttttcagctatataagaaatactttggcgattattgacaaaataaacgaaaataaagaaacaaagcgctgaaaatgcttgaaatgacgatagaatgattgaattgctgaaaaaaatatgttacttttgtttcaagagaatgaaagaatgaaagaaaatatgaaaggagataacatgaaggttggaataatcgggtgtggaaaaattgcacaggttagacatattccggaatacctggaaaatccggatgtagaaattgttggatattatgactggaatgctgaccgggcagcagaactggcagcgcaatttggcggcaaggcatatagcacggaggatgaacttctggcagacaaggagatggatgctgtcagtgtctgtgtggcaaataacgcacatgcaaaagttacgatcaaggcgttgaatgctggaaagcatgtcctttgtgagaaaccgatggcagtaacgctggaggaatgcatggacatggtaaaagctgcggatgaaaacgggaaatatctgatgatagggcagaaccagagatttgcaaaagcacatgtaaaggcgaaagagttaatctctgagggagtaatcggagacgtaattacttttaagacgacattcggacatggcggtccggagacatggggaattgacggtgcgaagaacacatggttttttgacaaatcgcgttccgttatgggagcaatggcagaccttggggttcataagacggatctgatacagtttctgcttgattcgagagtcattgaaacaacagcgcatataacaacgcttgacaagaaggacgcgcagggaaatctgatcggtgtggatgacaatgcaatctgcatctataagatggagaacggagtggttggaaccatgacggcaagctggacttattacggggaagaggataattcaacaattctttacggaacagaaggaattatgaaaatatatgatgatccggtttactctattaaagtcatcacacgcggcggtgagaaaattctatacgacatagacaaaattcaaaccaacgataatcagacgaagtccggaatcattgattcttttgtggaagcagtggtaaataatcatgaacctgaagtgagcggaagggatgtgctgaatgcaatgaaagcaatattcgcaagcctggaatctgcaaaagagaaaaaaacaatcatgattcaataggaggatacacggatgaaacttggatttgtaagttcgatactggatggatggtcttttgaagaaatgatcgatacggctgcggcacagggatttgaatgtgtcgagatcgcatgctggcctagtgcagggaagacagagagaaggtatgcgggggtgtgccatattgatacagagacgcttgatgatcagaaggcggagtacatcttaaactactgtaaagagcgaaaaatagagatatcttctcttgctttttatccgaacacgatggatccggacgaacaaaaacgcgaagagaatattcgacatctgaagagcgtgatcgatgccagcgcgaagctgaacgtcaatatggttacgacttttatcgggcgggatcagacaaaaagcgtggaagagaatttaaagctggtagagaaaatctggccgcctattctggagtatgcgaaagaacgaaaggtgaagatcgccattgaaaactgtccgatgctctttggcgaggaccagtggcctgggggacagaatcttatgacatcaccggagaactgggataagatttttgagatccttgacagcgaatatctgggaatcaattttgacccgtcgcattttgtatggcagatgatggactacatccatcccatctatgaatataaggataagatttttcatgtacattttaaggatataaagttatatccggagaaactggcaaaggtaggggttatggcttatccactgaagtttatgtcgcctaagctcccaggattgggggatgtaaattggggaaagtttgtgagtgcgcttacggacattggctatgacggatacgtatgtattgaggtagaagacaaagcgtttgagagctccagagaagagattttaaagagtcttttaaaatcaaaagagtatatcagacagtttccaatgtaattggacggtaagtaccgtttcaataaataaaagaaagaaggaaaaaactatgagaaagagaattttggcattggcaatgacaacagcaatggtattgggaggaacagcatgcggaggatcggatgctgcgacggaaagcgcgtcgacatcacaggcagctacagaaaaacagaacaccggagaaagcgaaaacggggatagcacgcatatctatgttttgacagcaccggaggaccatggctggacaggttctgttgcaacatttgcaaaggagaaaatcgaggaagtaaatgcagcaggaacatacacaagcgagctgattacttcagcggatgcttcagagcagattagaaatattgaggatatcctctcaaaaggtgagaaaaatatcgcgattgttattcagccaattgatgacacagtgcagtcggcgatccagcagatcgtggatgcagaaataccatatgtagcatttgaccggatcattgatggtgttgcatcgagcgctgtatcgaatgtaaaaggcgacaatgaaggaatcggtgtcgccgcggcagcatatttcgtatcctgcggaatgcagccgggggatgaggtatatgtatatgagggcgatacctcttcggtaacaacactccgtgaccagggatttaaagaatatctgcttggaaatgcagagttcgaggacgctacgattgaggattccttaaagtggacagaagagcaggtggaaagtgcaatcacatattcaggagcaatgaactggagcagatcagataccaagaccgcatttgagtcattgatgagtgatgctggaaacgctgatacaaagtggttctatgcggaagatgatgagcttgcaatgggtattatcgaggcgctcaacggcggtggaatcgatgagacaaccaaagaggcatttcttgcaaatcagccggtaatcagtggttgtggcggactggatgaattttacggaatgcttcgcggcgaaaattatacagaacttacagcccagtttggaggtctggtatctgttacatatagtccgtcgatgattcagacagcaattcaggatatggtagattatcttgatggaaaaacggtaccgcaggatcatgtgattgaatgtgaaaatgtgacatctgagaatgtgacagagtacgaaggattctaatttggtaaaccaatgcatgttgtctgcccgatatggtggacaacatgcatgataaaagatgatcatttcggtagaatggagttatttatgagtttattagagatgaacggaatatgcaaatcctttaatggcatacaggtgctgaaagaagtttctctgcgggtggaagcgggagaggttcatgcacttttgggagagaatggagctggaaaatctacgcttatgaatattctcacaggtgtacatgacaaagacgccggaacagttgtgtttgacggaaaagaaatgaaaaatatatccgtaaaatcttcggaaaacgcagggattgcgtttgtacatcaggagttgaacctgtttaatgatttaaaggtttatgaaaatatttttctttgcagagaatataccaataaattcgggaaagtcgatacaaagagaatgataaaagagtcgagggaacttttcgaggaactgggtgtggaaattgatccggaaatagaggtgtccgggcttacgacaagccagaagcagcttctggagatatcgaaggcattgttttttaaggcaaagttgctgattcttgatgagccgacgacagctttgaacaacagtgagatcgaacatcttttccatattatagagcgactgaaggaaagcgggacagcgtttatctttatatctcataaaatgccggaaattttcagaatttcagacagctatacgattttccgtaacggggaatttattgattccggaaaaatcagcgaggcggatacagataccatcatacagaagatggtgggagaaaattattcttccggcgagatttatgaaccgagacaaaaaggcgaagctgttttaaaacttgagaatctgagcggagaaggattttgtgacgtcagttttgaagttaaaaagggagagattatcgggctgacgggactgcagggagcgggcagcagtgaacttcttcagtgcatgttcggtgcaacacctgcatatggcggaaatatgtatgtaaatggaaattgtgtgcctcatcattcgattcaggcggcaatgaagaacaaggttgcaatgcttccggcaaacaggaaagaaaattcggttgttcctgatatgtcgattttggagaatatgtacctggcggaacatgttctttccaaaaagaaaccttgtatttctaaaaaacaggaagagaaaaaatatcagaattttaaagatatattaaatataaaagcagccgatagtgcggattttattacgtcgctaagcggtggcaaccagcagaaggtatttctggcaagatggcttgacacagatgcggatatcctgcttctggataatcctacacagggaattgacatcggagcaaaagcggaaatctaccggttgattctgaagcttgcttccgaaggaaaaaccatactgcttaacacacttgagataccggaaataaaaaaagttgcagaccgctgtatcgtattttataacgggaaaattgcaggaagtcttgcgcatagccagatagatgaaacaacagtgatgagttatgcaacaaatgctgtacagttagaggaggttttataatgaaggagaaatcaaaacgaacgaaattcctgagtgaatacagctacattgctgtttatgttatcattttaatcgtatatgtgattaccaatcacggtttgacgatgagtggatttatgaatatattccggcattctgcagtcattggaatcattggattcggcatgggactgatctgtttgaccggagatatcgacctttctgtaggttccatgcttgcgcttgtaagcggtttttcggtagtgatatttaacatgacagataacatcctattgacgttcctttttgcggtagggtttggcgcagtgtgcggtctgatcaacggtatgctggtcggatatggaaaaattccggcatttattgcaacacttgcgacaatgcttatttaccgctcatttgcacagtattattgccagcatatcgataagaaccttatcggcggcggaagttctgtttaccgcatggcgaatgcgaatacgctgtatcaggcaatgtataatatgggaaacggaaaagtgcttacggttccaatcgtgggaatcctcctcattgcagtgacaattatttttgtgtatctgacaacggaaacaaaatacggaaaacagatctatgcggttggaagcaatgcgaaggcagcgcgcatgacaggaattgacgttgataaggtaaaggtttctgtttttgtaattgcaggagcgcttgtcggactggcatcgtttgtatggattgcgatgaatgcgtcggcagacccggcaacaaccggaagcagctatgagatgtatgcgattgcggcagtggttctcggcggaatcagcatgtcaggcggcagaggaaaaatgcttggtattctctttggtgcgatgtcctacacagtcattgataaaattatagtggcgttaaagatggattctctcatcaatgacgcaatcaaaggcattatccttattgtggtaattatgattcagattgtaagtccgagaattaaggaaaaaattcagaaaagataaaaagggcttccagaaggatggaagtttttcaaaagcagacatggtgttccgataagcaatcggtatcatgtctgtttttgcgtgtatatacaatataaaatataaaattactatttggttgtaagatcggaaaaagtgcgtgggattgccaaatacgaattgtgaaacggaaagttctgtggcaaaatgattttgtgatattatatgatgcaggcgatttccacaaatatgatggactgacaggtctgtttgtgaaattagtgaatgcggataacgaattattaaaggatgcctacatgaaaaaatggtatcgattatctgtgggagggcggtgaaaaattcatcggtcttgagaaaaataataaagatcgaagcgctgttttcggattttaagaaggatggatacagcatccggcagacattgacattttagaagagagacgggaaaaaggaggcaatcatgtttcaaccaatcagaagaaagacaaaagaaatcagcacagaggcggcaaaatattatccggatgaggcgatgatcgaggaggagatggagcgcgtgggaaaagcggtgagcgtatacgagattacgatcgagcatctcagcggaaaggaaatacaggagagataacacggatgcacgacgcacggcgtctgcggaatggaggaagcatggatcagtggatggagcttgcgatgcgcgtgcagagcattgcgcaggcgggacttacctacggtggaaccgaatatgacaaggagcgctacgaggagctgcggaacatagcggcagagatgctgtgtgtggggacggaagtgccggtggatacggtaaaacggtttttctgcaatgaaacaggataccagacgcccaagattgacacccgggcggctgtctttgtcgatggaaaaatactgatggtgcatgaaaaaaacgggacatggtcgctgccgggcggctggtgcgacgtggatcagtcggtggcgtccaacacggtaaaagagacccatgaggaagcaggtcttctcgtgaagccggagaaagtgatcgcggtttacgactggagaaagcataaccgctacaatctgccctacggcgtgataaaaatatttgtgcagtgcagcgtcaccggcggaagcttccaggaaaacattgagacgacggagaccgcgtattttgcaaaggacgcccttccgtctccgcttgcggaagaaaaagtgacggcggaacagatcgggatgtgctttgcggcatatgagagcagcggctggaagaccgtgctggattagtcacattgaaatacagctggaattgttgcaataagtacagacctcatttgggtaataagtaatattatcagaagaccagagaacaaaaaagttccagaataaacagacggcggcaaattctttgaagcaaaattcaccgccgcatggttatctggaacttttaagtatctatttctgataatattacttattcacccaaacaagatctatgcttatcgcggcaattcctctgtatcatatgtcactttaccactttattactaaaaattacaaaaacatactttacagtgtggataagtaggagtaaagtatatttcatataaaatagataggaaaagtaagaaaataggaggagtgtcgcatgagagggaaaaaacagaaaacagaacgtgtgattccgggagtcggactgtcctttggaatcaccataacgatgctgggactgattgtcgtgattccgctctgttcactgattatcttctcggcgcagatgtcttttcctgagtttgtggcgacgatcacgaaccggcgtgtggtatccagctatctggttagtttttagaccgcatttttcgcggcgctggtggacgccgtcatgggcgtgattttggcctgggtgctggtgcggtacgaattttcggggaagcggatcatgaacggaatcatagaacttccgtttgcgcttccgaccgcggtggcgggcattgcgctgacgcatctgacaacaaccaacggattggtgggcgcctttttttacaataagtttggaattgagatcgcctacacaaaactgggaattactgtggcgctgattttcatcgggattccgtttgtggtgcggtcggtacagccggtgcttgagaagatcgatctccagtatgaggaggcggcacacatgctcggagccaatacgagacagaccgtgttccgggtgattttacccgagattgccccggtgcttctggcgggatttacgatgtcctttgcgagagggctcggcgaatacggaagcgtggtgttcattgcgggcaacacgccgtatgagacggagatcgcgccgttaatgattatgtcgaagctgcaggaatttgattacgcgggggcaacgtccatcgcactggtgatgctgtttactgcatttgtgattctgtttttcaacgcagccatccagagccgcgtagcgaaaatcacaagcggaatcgcatagcacgcgaagaggtagttcacaaatgatgagggcgtgacgcagcgagcgatccgccacatcaagaaacggatgccggagcttctcgtgatcgcggatgtgtgtctgtgcgagtacacgtcccacggacactgtggccttgtgtgtgagggtgagattttaaatgatgagacactgccgcttttggcaaaaatgtcggtaagtctcgtaaaggcaggcgcggacgtgattgctccatccgatatgatggacggaagagtggcggcgatccgtgaggctctggatgagaacgactgcaaaaataccatgctgatggcgtacagcgcaaagtttgcatccggtttttacggaccgttccgcgaggcggcacattccgtgccgagctttggcgaccgcagaacttaccagatggatccggcaaaccgcagggaagccatccgggaatgtctgtccgatattgaggagggcgcagacatcattatggtaaagcctgcgcttgcgtatctggatgtcgtaagagaggtcatggaccgtacggattacccgctggcggcgtacaatgtgagcggggagtatgcgatggtaaaggcggcagcggcaaacggctggattgatgagcggcggatcgtgatggagatcatgaccggcatcaaacgcgcgggtgcgaaaatcatcatcacctatcacgcgctggatgtggcaaagtggctggacgaggagagaaagtagtggaagagaatggcagcagtgccggaaatgaggagaaatatgcagtatacagaatcagaacgattatttgaggcatcaaaaaaatgtattccgggcggcgtcaacagtccggtgcgcgcctatcaggcggttcaccggacgccggtctttgtggagcgggcgagcggttcccacatctatgatgtggacggcaacgcgtatattgactatgtgtgttcttggggaccgtgcattctgggacatgcctatctgcgcgtaataaaagccgtgcaggcggcgtgcgagaacgggctgacatacggggcgccgacaggaaaggaactaaagcttgcagagctgatccgttcctgtatcccgtcgatggaagtgtccagactggtaagttccggaacggaggcgacgatgagcgccatccgtgtggcgagaggatttacgggacgggataaggtcgtgaagttcagaggatgctatcacggacattcggacggacttctggtaaaagccggatcgggagcgctcacacagtctgtaccggacagcaagggcgtgccggcggattatacgaaaaatacgctggtggcggagtacaaccagccggattcggtgcagaagctctttgagacgcagggaaaagagatcgctgcgatcatcgtggagccggtggctgccaatatgggagtcgttttgccggagccgggatttctggaatttctgcgaaaaatcacagaagattacggggcactgctgatttttgatgaggtaatcaccggttttcgtcttggaatcggcggggcgcagggatattttcatgtgacgccggatctgacgacgctcggcaagatcatcggcggcgggatgccggtcggcgcatacggcggcagaaaagagatcatggatatggttgcgccggtcggaccggtataccaggcgggaacgctttccggcaacccgatcgcaacgacggcaggcatagagacgcttaccatcttaaaagagacgccggaaatctacacacagatcgaagcaagtgcgaggacgcttgcggagggcatgcgaggacattttggcgaaagcgtctgcgtgaatcagatcggatcgctgatgagcattttctttactgcccagaaagtaaaggattatgagactgcaacgtcctccgatatttccagatatgcggattactttaattatatgctggatcatcagatatatctggcaccgtcgcagttcgaggcaatgtttgtctctgcggcacatacggcggaggatatcgcacagacctgtgaagtcctacggggatacggaaggtaatttaaggaatcgtatgcggtgaagagaaaactggattttttcggagaaactgcaggaaagatgcataaagagaggatgttacaccgtcggggcggctgtgcaacgtcctctttttgtatataatgaagtacaatatctcccgcaggtatttttgctgttgacaaataaaaaaaatgatactagtataattcatatcatatgggtatgatatgaaataaaaaaaggaaatggtacgagaatatggaaaagaaacttatttacatggataacgcagctaccacaccggtcaaaccggaagtgcttgatgcaatgcttccgtactttacagagaagttcggtaatccatccagcatatacagcatttcttctgagaataagaaagcaatcacggatgccagagaggtcattgcaaagaccatcaacaccacgccggagaatatctattttaccgcaggcggttccgagtctgacaactgggcattaaaggcaacggcagatgcctatgcgtccaaaggaaagcacatcatcacgacgaagatcgagcaccatgcgattcttcacacctgtgagtatctggagacgaaaggcttcgagatcacttacctggatgtggatgagaacggtctggtaaagctggacgagcttaccgcagccatccgtccggacaccatcttaatctccgtgatgttcgcgaacaacgagatcggaaccatcgagccgattgctgagatcggtaagatcgcacatgagcatggcgtactgttccacacagatgcagtacaggcatacacacaggtgccgatcgatgtcgaggcaatgaatatcgatatgatgagcaccagcggtcacaagatcaacggaccgaagggaatcggtttcttatatatcagaaaaggtgtgaagatcaaatcctttatccacggcggagcacaggagcgccacagaagagcaggtaccgagaacgtaaccggtatcatcggtcttgcaaaggcagcagagatcgctacggccaacatgaaggagcgcactgcggaggagatcaaagtcagagatcatttgatcgagcgcatcgagaaggagattccgtatgcaaagttaaacggagaccgtgtgaagcgtctgccgaacaacgtgaacttcagcttccagttcgtagagggagagtccatgctgattcttctggattccaagggaatctgcgcatccagcggttctgcatgtacatccggttccctggatccgtcccatgtacttctggcaatcggactgccgcatgagattgcacacggttctctgcgtctgaccatcagcgaccagatcacgatggaggatgcggactacgtcgttgacaacttaaaagagattgtgaaccacttaagagagatgtctccgctgtacgaggatttcatcaagaaaaacaaataatataaaaaagaaagcaggtatatgttatgtatagtgaaaaggttatggatcattttcagcacccgagaaatgtaggagagattgaggacgcaagcggtgtcggcaccgtcggaaatgcaaagtgcggcgatatcatgcgtatgtatctcgatattgatgagaaccaggttatccgtgactgcaagttcaagacattcggctgcggcgctgctgtggcaaccagcagtatggcaacggagcttgtaaagggcaagaccatttacgaggcgctgcagatcacgaacaaggcagttatggaggcgcttgacggacttcctcctgtaaaggtacactgttctcttctcgcagaggaggcaattcatgcggcactctgggattacgcagagaagcataacatcaagatcgaaggtcttgagaagccgaagaacgatatcagcgaaggtctggaagaggaagattactaagaatgaatcggcaggatgaagcggactatacggcattaaaagaatatttatgcgacatgatcttagaggaacagctaaagctcggctatgagcgtgagacgatccggttttattcaccgtcgtcgtcaatcggacatgtgttaaagctgtctgaccgctccaagccggcggttcttgcggcgttggagggatttggcgcatatgcggcggataccctcggtgaagtggcagtatctggggcgagcggcgggagaatctgttttctcattccggcagcaggtgcagagtatgtacatgcgcacggtgtggcgcatccgttcttaaaggatctgattgactgcttcggcagacatgatgtgacgagagagcaggtgtgggagctgttccggcactattctaagagtgctcgtatcattgagatcaaaagcgatgaatttgatgacgtgtgctactttgaggacggcaatccggattcttatctgtactgcgtcaagttcgacgagggacatgcgttttatcaccgcttcttaaaagaggattttgaagagctgttcggtgaagccagcaggatgaaaggggcccgatagcatgaaaattacgacaaagggacgctatgcgatccacatactgtacgatctggcggtcaacggcacggagcatccggtgtcggtcaaggagatggcaacgagacaggagatttccgtcaaatatacagagcagatcatttccattctgaacaaggcgggctatgtttccagcagccggggatttcagggcggctaccgtctgacgaagccgttggacgaatatgtgatcggtgatattctgcgtctgacggagggatcgctcgcgccggtcgagtgtcttgcgaacgccgagaatccctgccccaaacagcagaaatgcgcgacgatcatgctctgggaaaaagtcgataaggcgatccgggacgtggtcgatcatgtgacattgcaggatcttctggactggcagaagcaggaaaggtgttagtgtgaacgaatatgaaaatttctacaaaaggcagatatgcgctgcgcctgatgctggatctggcgatgaacggtgagaacaacgttgtgcgcattaaagatattgcggaaagacagcagatctcagacaaatatcttgagcagatcatatccgtattgaacaaggcaggttatgtgcggagcaccagaggaccgcagggcggttattcgctgcggaaagcaccggaggaatacacggttggcgatattttgcgtctgacggagggatcgctcgcgccggttgcctgcgtggaggaggaaggaagttgcgaacgcgaagtggattgcgttaccgtggaggtgtggaagcggctgaaccaggcgatcagcgatgtcgtggatcatatcacactggcggatctggttgcgctacaggaagagaagcgcgagaagagcggtcttgactttggaaaagatatctgagttatcatatgatacataaaataagaagaacccctgttatggtgtttgcagccaccgtagcagggggtcttcgcttaagaagggggttttctcggtttattcaccaaaacccatgccgataaatatcgacgttgatatcatatcatattctggggaaaaatccagtgtaaaattgtgaaattttgctcatatatgcgcggtttgcaaataaattgcgtggtttttgcgaaccgcgattcccttgacgttttccggttttatcccttataatattgcagataagtgatgcgtgtggctgccggagggcagaagtgatgcgcaccgggcaggaggaaatgaatgtcgattgaccagagtaaaatcagaaatttttgtatcatagcacatatcgatcacggtaaatctacacttgccgatcgtattatagaaaaaacaggaaccttgaccagcagggaaatgcaggcgcaggtgttagataacatggatctggagagagagcgcggaattacgatcaagtcgcaggcggtccgcattatctacaaggcgaacgacggcgaggaatatatttttaatctgatcgataccccgggacatgtcgattttaactacgaggtatcgagaagccttgcggcatgcgacggtgcgattctggtcgtggatgcggcgcagggcgtggaggcacagacccttgcgaatgtgtatcttgcgttagaccatgatctggatgtaatgccggtcatcaacaaggtcgacctgccgagcgcgcagccggacgaggtcgtaaaggagatcgaggacgtcatcggaatcgaggcggaggatgcgccgcgcatttccgcaaagacaggactcaatgtcgatcaggtgttagagcagatcgtacagaagattccggcgccggccggcgatccaaaagcgccgcttcaggcgctgatctttgacgcactctatgattcctacaagggtgtcatcgtgttctgccggatcaaggagggcacggtgcgggtcggcgatccgatccttatgatggcgaccggggcgcagtccgaagttaccgaggtcggttactttggagcagggcagttcattccgtgtgacgaactgtctgccggcatggtcggctacatctgtgcgagcatcaaaaatgtgcgggatacccgcgtgggtgatacggtgacgaacgccgcacatccgtgtgaggagccgcttccgggttataaaaaagtcaatccgatggtatactgcggcatgtatccggcggacagtgccaaatatccggatctgcgcgatgcgttggaaaagctgcagatcaacgatgcgtcgctgcagtatgaaccggagacgtcgctggcgctgggcttcggattccgctgcggtttcttaggactgcttcatctggagatcgtgcaggagcgtctggagagagagtttcatctggatctcgtgacgacggcaccgggcgttatctataaggtgcacaagacgaacggagaggtgatcgatctgacgaacccgtctaatctgccggatccgtccgagatcgagtatatggaggaaccggtcgtttcggcggagatcatggtgacgagcgagtatgtcggcgcgattatgacgctttgccaggaacggcgcggtgtatacaacggtatggagtatctggaggagacccgtgcgctcatcaagtacgatctgccgctcaatgagatcatctacgatttctttgacgccttaaagtcccgctcgagaggatacgcttcgttcgactatgagctgaagggctatgagcgttccgagcttgtgaagctggatattctgattaacaaggagcaggtggacgcgctctcgttcatcgtctttaaggacagtgcttacgacaggggcagaaagatgtgcgagaagttaaaggaagagattccgagacatctgtttgagattccgatccaggcggcagtcggcggcaaggtgattgcccgtgagacagtcaaggcgctgcgcaaggatgtgcttgcaaagtgctacggcggcgatatttcgcgtaagaaaaagcttttagagaagcagaaggaaggcaagaagcgcatgcgtcaggtcggaaatgtagagattccgcaggaggcattcatgagcgtcttgaagctggatgaagattaaaggaacagatcggaaaatgcagcgtcagtgatggcagtgtcaggaatatttttgggaaaggagcggtatgtggagtgagtcagaaaacaatggaattgtacattcatattccgttttgcgtcaaaaaatgccagtattgtgatttcctttcctttgcggcggacgaggcaacgcaggcagcctacgtggaggcgctgctccgggagattgcgtattacggaccgcattgcagcgactacctggtatcgacggtatatatcggcggcggcacgccatcgtggctcacagaggagtggatggcacagattatgtcggcggttcgccggtcgtttcgtctggcgtcggatgcggaaatatccattgagtgcaatccgggaaccgtcaccgatcacaagtttgccggctaccggaatgcgggaatcaaccggatcagcatcggcctgcagtcggctgtggatgaggaattaaagattctcgggcggattcacacgtttgaccagttcctgaagacttacgagctggcgcgcaaaaacggattcgacaatgtcaatgtggatattatgagttctcttccgggacagacggcagagagttttgcccgcaccctgcagcagcttctgtggctgaaaccggagcatatttccgcctattccctgatcattgagaaggggacgccattttacgatctgtataagtttgacgcggtcaagcagcaggcgggaatgcagacggtggcgctgccgacggaggatgaagtgtaccggatgaccaagctgaccgagcaggtgcttgcggaagcgggatatgtgcactatgaggtttctaattttgcaaaaccgggttatgcgtgccggcacaatatcggctactgggagcgggagaattatctgggactggggcttggcgcgtcgtctctgatggagaatatccgctacagcaacacgcgggaattgtatgtgtatctggaagaaaccagacatattcgtgagggtatctgggagaatgagataacggatagccaggggagcggcgcatccggcagggtggaacagcttccggccacgaatctgcatgcttcggcagagcgcattacacgaaaagggcagatggaagagtttatgtttttaggactccgcatgatggagggaatttccagggaacgttttgcacagacgtttggaacacagattgaggcagtgtatcaggaggtgctgctgcatcttacggaggaaggactgctcgaaaaacgcgcggggaggatttatttgacggaacgcgggcaggatgtgagcaattacgctctggcacagtttttactttagaacgatgaatccggacggattcatattaagaaattcttcataaagattcattcgcgttttcacggaaagaggactaaaatagaatcgtaggaatccaaggagtgaagtgatgtgaatgtaacaaagagacagaaaagacgaattcggaatctggtatgtatacagtacagtattgtgaaaatgctgctcgtgatcgcagggtttgaactgttgggacgggggctgtccctgatgcagggaacgcagtctgcaacgcaggagattgagggagaggtaatctggtcggaggagacgaaaacagaggagaatcccctgatcgtgtgcgtggatgccggacatggcggaaaagacaacggctccgattataaggggcgttatgagaaggatgataatttaaagctggcacaggctgtgtcagcttatttggctgataaaaatgtaaaagtggttatgacgaggtcggatgacacgtttttgcgcctgtcagagcggtgcgggattgccaatcagagcggtgcggattatatgctgtcgctgcaccgcaatgacggcgagggtaacggcgtagagacctggatctcggcgagtggttcggaggagacggatgccctcgcaaaccacattatggaagtgctggatacggcgggaatccagagaaaccgcggcgtgaaaaagggaacccagactggagaatcctccaattattatatcaatgtacattcggacatgccgtcctgcatcgtcgagatgggatttatcaacgatgcatccgataaccagcttttcgatgaaaagctggatgcgtacgctgccgccatcggtgacgcagtgcttgcaacggcggagacataccgtgccaacaaggttacggatggaaacggtcagggcgcaggcgaagcgggaagcggcaccggagacggtcaaggtacggatggaacgggagacggcgccggagacgatcagggcacggatggaacgggaaatgacaccggagacggacagagggcggaccaaacaggaagcagcaccggagacggtcagagtgctgcaggtggaaatgcggcggtgcagacgattgcgcttgacgggctggataccaccgtgcagagctgggggctgggaagccacaccgatgcggacaaccgcccgaacgatgcagtcagtgcgcagcagaagtatggggattaccatgcgcttttcattggagagaatacaaagaccctctatctgacttttgatgagggatatgaatacgggtacacggaatccattctggatacgcttaaggaaaagggcgtgcatgccgtcttttttgtcacggagccttatgcaaaggcggaaccggcactggtgcagcgcatgattgacgaggggcatgtagtcggcaatcacagtgtgacgcacccgtcggctggcatcccttcgctgacagtggaacagcagcaggaagaggtcatgggaaatcatcagtatatcaaagatacctttggatatgagatgaatctgttccgctatcctgcgggaaagttcagtgagcagtcgctcgccgttgtaaataactgcggatacgagagcgtgttctggagttttgcctatctggattacgatgtggacaaccagccggatcaggcggaaagcctgcagaagatgaaaaataagatgcacccgggagccatctatctgctgcatgcggagtcggcaacaaatgcggcggtgctgggagatctgatcgatgcggcgcagacgcaggggtattcgtttggaacgttgtaatgcgtggcgcgtgaaaaaaaggtttacataatgacggaaaacgagctttggacgggctgtgtgactgattttcgggcgctggatgcggggaggaagaaaagttggggctgggagcctgattttcgtgcgctggacttgggaaggaagaaaagccgggtccgagagcccatttttcgcgcgctagacccgagagcgagagaaagaagtttacataacaccgaaaaacaagccatggtcgggtctggaagaaggaaaacgcaacgttagacccgaaaaagaagaaaagatcacgccgccttggggttgcagaaactgttgtctgtcccagaatttaccgaaaacatcgtgtcaacctcaggatttaccgaaaaagcctgaagttaccgaaaaagcctgaagttacaatattgttcttgatctgatcttgcggtataatgaactctgacgagttcatattgtgcgcagaaagcagcgcaaaaagataatataatagacgcgtacatgatgataggttttctttagaagggaacatgatatggaaaaattacacaagcggaatttgattattgtctggtgctcagtcgttgcacttagccttgtttctttgatgggatacggatttaccgtgcttgcaatccgtggaattgcaattctggtagttgcgggaattatttctacgatcggatgttacctttcgattgacgatgtgaaaaaagtgctgattctcgtattcccgccggcgatcggtacgctgttgtattcgtgggtatatggtggcaattcgattccgtatctggcgaattttgtacttttagcgatgacaacttcctattttatggagtcggttatcatctatttcgcagtgccgtttacggttatttcggtcgtatttatgatcttcagtcctgagaccattgcgggaagcgactattcgatggccggggtggtgacacgcgtatttttgtttatcgtgacagcgatcctgctttattttgcgacgaaacgcggtgcgggtgttgtgaagaaaacggaagagacgctttccatcgttcagaacaatgcgaaagtcgccaatacgatttccacgaatctgaacaccacgattcacaagagtatgagttcagtgcatgcgcttgcggacggcagctccagcgtgaaatcggcggcatcgcagatggggcaggtggttgaggatactgctaatgcaactgtcagcgtgatggataaaattaatgcggcaacaacggagattaaccggaaccatgaactggcagtttctctggatcagggatttcagaaggtgcagagcgcggtagaaaaaggaaacggagcgatacagacggcaaagagttccattctttccatggaggagaccgtcgattccgcgcgcaaatcgaccgattcgctgcttaccgagatgaaccggatcacatcgattctcggagagatcaattccattgcatcccagacgaatctgttgtcgttaaatgcatctattgaggcggcgcgtgcgggagaacacggaagaggatttgcggtggttgcagatgagatccgcgcgctgtcggaggagagtgccaaggcggcgaacaacattcaggagattttgacctggctgacggatacgaccgggcagatctcaaaagaaatcacggcgggcaccgatgctgcttccgcgagtgtggagttggtcggcggattgatggattattttagtaacatcaatgatgcgacggatgaagcgagccagattgtcgatgaagaatataagatcattgaacatgtgaaggaacactttggaaatatccagcaggagatcgagacgctggtggcaacctcagaggaaaattctgcaaccatccagaatatcacggacacaatcacgtcgcagaatgattccatccgcagcatttcggctgaaatcgatgagatttcatcgttatcggcagatctggaacagcattttggggaagataactaagaaaaggtcaagggagacatgcaggggcgcagtctcccttttttacatcacggagaataaggatgaaattgagatttcaaaaagacggtacttttaaaatcatgcagattacagatatgcaggaaattcccgcaatatcgaaagacacgatcgcgctgatggagcgggcggttctggaggagcagccggatcttgtcgtctacactggtgatcagatcaagggctatggtgtgacttacaagggaaaaggagaggagctggagcgggaggtagcacagacgattggaaaattattagagccggtgacaaagcgtggcattccgtttgcagtgacatttggcaatcatgactgccaggttggaatttctaatcaggatcagttctatcatatttacaaaagacttccgaactgcatcggagagcaggcagaagggattgacgggggcggaacctgtgccattcccatcgaggcatccgacggaagcgggagggatgtgtttgaactgtatctgtttgacagcggaacggatgccagggagggcggctacgaggcatttgatccgaagatcattgcgtggtaccgcaagcagcgggaagaccttcgggagaaaaacggaatgtatgtgccgtccatcgtatttcaacatatcccgatgcgcgaatattatgaggtgttaaagcgtgtcgaccgcggggaaaaaggtgcggtgcgtgcctatcggacacataagaacgaatattataagttgggagaaacctgcggtgccggggatatttttctggaaccgccgtcggtgccggatgtcaataccggagaaattgaaccgcaagattacttttaaggcggacgccaatccggcggtcagcatggcactctatgcggtcatggtactgttcacaatctttgcgaacggctggatcggatcggcgatgacgacctgggcaagggaaaacggctggacggggaatttgtgcgacatggtaatcaaggtgatcggaatgctgattccgatgctctggacctatccgtgtaaccggtttctgatccaccggaaaagaaaagattgtgaattgtttcacaaaaaatacaacgaaagatcttgaacgggaacagacttcatgatacgctgaaacagcattgcagtgagatacgttcttgctgtcttgccttaacaaaagtctctgacgccaaaagcagtgcctgcggcggaagatatggcggtcatgaaagtgtctgcatctggtctgcgcgtgcggaacagatgctgtagataggataccggcggaatattccatgccctgtagggcaggttctgccgtgtatttccagcgagtgccgtatctgagaggagatttcagatacggtttttttattttcataggaaataccgtgatacattcatgtgtgaaagtggaaccttcctatgaaataaaaaacgctccgcgaggatgcgcagttcgcggtaaggaaaatatcgctttgcgaaccgctcccgcgcggagaatcccgcaggcaggattctttcttattaggagaaaatatggagacaagaattgcacttatcggtatcattgtggagagcaccgagtccgtggagcagctcaatcatctgctgcacgaatacgggagccatatcatcggcagaatggggatcccttaccgggaaaaaaatgttcacattatcagcgttgccatcgatgcaccgcaggatgtcatcaatgcactgtcggggaagatcggacggcttgcgggaatcacggcaaagaccgtctattccaatgtataagcgtctgcggaatggagatttatatgacacacgaggaaaaaatcatagagcgcctgaagacggagcagaagctgtcggcggaggaactggactgtctgcttacaacagaagatacagaggcagttgagaggcttagggctgaggctagaacggcggcacaggcggtttacggaaaacagatctatatccgcgggctgatcgagttcaccaactactgcaaaaatgactgttattactgcggtatccgcaggggcaatgcatgtgccgagcgctaccggctcacgaaggagcagatcctctcctgctgcgcggcggggtatgagcttggatttcgcacctttgtgctgcagggcggagaagacccctattttacggatgaaaggatctgcgacctggtgtctgcgatcaagcgggcatacccggactgtgcagtgacactctcgatcggggaaaaagaaagagcgagttatcaggcatattttgacgcgggcgcagaccggtatctgctcaggcacgagacggcggatacggtgcactacggaaagctgcacccggaggaaatgtcccttaaaaaccggatgcgctgtctgcgggatctaaaggagatcggatatcagaccggctgcggctttatggtgggctcaccgtatcagaccacggagacgctgtatgaagacctggtgtttattaaggagctcggacccgccatggtgggaatcgggccgttcatcccgcagaaggacacgccgtttggcggggagactgcgggaacgctggagatgaccctgcggctgctttccatcctgcggctgatgaatccgcatgtgctgctcccggcgacgacagcgctcggcacgatccatccgcagggaagggaaatgggaattctctccggtgccaacgtggtgatgccgaatctctcgccggtttctgtgcgggaaaaatataagctttacgacaataagatctgcacgggggatgaggcggcagaatgtcgtttctgcatgcagaggcggatggagaacatcggctatgaagtggttaccgaccgcggggattaccgacctgcggtttaaaataaaaacactgaccgggaagcatgaactaaccggaaagaaaggaaaaattatgtacaagtatgacgcaaaatcattaaaagcagaggaatttatcaacgacgaggagatccgtgagacgcttgcctacgcggatgcgaacaaggacaatgtggagctgatcgacgcgatcatcgcaaaagcgcgagagcgcaagggcttgaaccacagagaggcatcggtgctgctcgcctgtcagatcccggaaaaaatcgaggaagtctatgcgctggcgcagcagatcaagaaagacttttacggcaaccgtattgtgctgtttgcaccgttatatctttccaactactgtgtaaacggctgtgtatactgcccgtatcacctgaaaaacaagcacattgccagaaagaagctgacgcaggaggagatcgtgagggaagtcacggcacttcaggatatgggacacaagcgtctggcaatcgaggccggcgaagatccggtgaacaatccgatcgaatatattctggagtgtattcagacgatctacagcatcaagcacaaaaacggagctatccgccgtgttaacgtcaacattgcggcaacgacggtcgagaactatcgcaagttaaaagaagccggcatcggaacctacatcctgtttcaggagacctaccacaaggagagctatgagaacctgcatccgaccggaccgaagcatgattacgcgtaccacacggaggcaatggaccgtgcgatggagggcggcatcgatgatgtcggactgggcgtgttgttcggactggagatgtaccgctatgaatttgccggacttctgatgcatgcggagcatctggaagccgtgcacggcgtcggaccgcacacgatcagcgtgccgcgtgtcaaacatgccgatgacattgatccgactgcttttgacaacggtatcagcgatgatatttttgcaaagatctgtgcgctcatccgcatctcggtgccgtatacgggaatgatcatctccacacgcgagagtcaggcagtgcgtgagaaagtgctcccgctcggcgtatcgcagatcagcggtgcatcgagaacgagtgtcggcggttatgccgagccggagccggaggaggagaattccgagcagtttgacgtcagcgatcagcgtaccttagatgaggtcgtgaactggctgatgaaaatgggctatattccgagcttctgcaccgcatgttaccgcgagggtagaaccggtgaccgttttatggcgctctgcaaaaatatgcagatcttaaactgctgtcatccgaacgcgctcatgaccttaaaagaatacctcgaggattatgcgggcgaggagacgaaaaagatcggtatggagctgattgaccgtgagcttgagaagattccgaatccgaaggtaaagcagaccgcctacgagcacattcatgatattgcagagggaaagagagacttccgcttctgatagccggaagcgatgctgggatcgggcagccgccggaagccggatatggatgtaatacggacaaggggaaattcgtatgcaggaaggaaaaagaaagttatggcagtgacattgaatgagacgccgggcagcagccgtctgcacataggaatatttggaaaaacaaacagcgggaaatccgcactcatcaacgcttttaccggacaggaggtatccattgtcgccaatgtggcgggaacgacgaccgacccggtctacaaggcgatggaggtacatccgctcggcccgtgcattatcatagatacggcaggatttggtgacgagagcgaactgggcaaaagccgcatggaaaagacacgtctcgcagcggaaaagacggatattgcgctgctccttgtggcggggaatggtgacgcggcgcttgatgaggaagaaatgcactggtaccgctttttgaaagagcacgggacgccggtacttttcgtcgtggggaaaacggacatccggtcggacgcacaggtggataaactggcagtcgccatccgggggaagaccggtgaggaggcatatccggtcagcgccaagacgggagagggcatggaggcattaaaagaagcactgatccgtaaactgccggagaattacggcagccgcctcatcaccgggacactggtcgaccgggaggatctggtgcttctcgtgatgccgcaggacatccaggcacccaggggaaggctgattctgccgcaggtgcagactttgcgcgaacttctcgataagaaatgcctggttatgagtgtgacgaccgatcagctgataccggcgcttgcggtattgaaaaaagcaccgaagcttatcattacggactcccaggtatttggctatgtctacgaaaacaaaccggcggagagcatgctcacgtccttttccgtgctgtttgcggcatataagggcgatctgccgtactatgtggagggggcggagcatattgacgcgctgaacgcccattccaggatactgatcgcggagtgctgtacccatgcaccgctgaaggaggacatcggaagggaaaagattccgcggatgttgagaaaacgcttcggcgagtcgcttgctgtggatattgtgagcgggactgacttcccggaagatctctccggctacgatctcatcatccagtgcggcgcgtgcatgtttaaccgcaaatatgtgatgtcgcggattgagcgcgccagagagcagggcgttccgatgaccaactacggcgtgacgatcgcgcatctgacgggaattctcgataagatttccatgccggaagcatagtaggattccttattaaaaaataaaatttaaaaataagacaccttttctaaaattagggcactgaactgacaggggctatatggcataatcagtatcagaagcccggtggaggaaacggtgtcttttttatgcaatagggaatttcaaagaaattccctattgcataaaaaaccctccgggaaggatgcgcactcgcgcgaaggagaaatatgtcgcaggcgaccgcgctcggcgcgggaatgtgcaatcgcacattcttttatcatccagatgcgattaaaaaataatacacgattttaaaaattcggtgcctgttaccagacgggataggatgttacgatcttgttgtcaacaaaaataaaacttttgggagggttttagacatgaagaaaaaattgatggcatctattcttgcagcatccatgctggtatccatggcagccggatgtggaaacacagaggagcagaccgatgcgccggcagcggaggcgtctggcacgacggctgatgcggcggcagagagcggggcggcagatacggacggcgaggaggtaacaatcaaattgttctccaacttgccggaccgcaagaatggtcagggacttgtggagcagacgatcatcgaccagtacatgagtgagaatccgaacgtcaacatcgaggtggaagcgctcgacgaggaatcttacaagacgaagttcaaagcgtatgcgatggacggcatgccggatgttgtcagcatctggggacagccgtcgttcctcaatgaggtgctggatgcaggcgttctggcagagttaaatgagagcgattactccgactacggttttgtttccggctcgctcgagggattcaagaaggacggcaagctgtacggactgccgagaaataccgacatcatggtattttattacaatgagaaaatgtttgacgacaatggctgggaagtaccgcagacctatgatgatcttttagcactttctgatcagatcaatgcggcgggcatcgttccggtagccatggacggcggcgacggctgggtactggcatgctatatgcaggatctgatggtgcggattgcacagaccccggcaggcacaatctctgatgcgattgcaaacggcgatttctctgatccactgttctcggaggcggcacagcttctggcagacaccgcttcggcaggagtattccagaccggttttgattcccaggattacggaacagcgcagaacctgtttaccaacggtcaggcagcgatgttctacatgggaagctgggagacttcgatggcgctcaatgaggacattccggaagaggtaagagataacatccgcgcatttgtcatgccggcagtggcggacggcaagggaacggctacggatcttgcggcatggaacggcggcggatatgcggtatctgcggattccaaggtaaaggacgaggcaattaaattcctcaactacatgtaccagccggatcagttatccaagctcggatgggaattcggtgtcggactttccgcacaggatcagaccgattatctgactggcgaggagaccaggctccagatgcagattatggatcttttgaacaatgcaaccaatatttccggaacaccgatcaacgactgcggttcctccaatttcaaaacaacgattgagacagagatacagagtcttgcaaacggtacggaatcaacagatgatttcttatctgcattgggaaatgcgtgtaaataactgacagggagagacggaccgttgcaaaatatgtgacggtccgttttttacctcgggatgacgccaggcggcatcatcctgcgtgggaaaggggcttttatgaagaaattatatagcaataaacggatgatcttcagtcttgtgctgccgggtctgctcgtatttatctttgcgattctggcgccgatctgtctgagtgtatactatggctttaccgactactccggaatggggcaggcaacctttatcggaatggagaattataagacgctgctgcatgacaaatcgtttggccgggcgctgctcaactcgctgcttctggcaatcggttttatctgcatccagcatccgattgcgatcgtggttgccgcggtgcttgataaattatcgggaaaggcggagggctttttccggtgtgtctactttataccgaatgttatttctgtggcagtgattgcctatctgtggaaatttatatataacccggatttcggactgttaaacaatgtgtttaaggtgttcggctatcaggggaaaatcaactggttctccgcggacaacgccatctggtcggtgctcattgtgctgatctggcacgggttcggctggggcatgctcatctactatacaggaattaagaatatcgatccggttctctatgaggcggcggcgatcgacggggcagactggaagacgaccttccttcggatcacgctcccgttgatgaagccggtgattcagatcaatgtcacgatggcaattatctccgccttaaagcagatggagacggtgtatctgctgacaaacggcggaccgggggacgcgacacagtttgcggccaactatctgtatcagcaggcgtttaaagcctttaagtacggatacgggaatgccatcggcgtggtatttatcatcatctgtattctcgtgacggtgggactcaacagaatctttgcgggcagggaaaatgattagggggtgcggcatgaagaaaaataatgtaaatcagaaaaagggtgccgcacatgcaggcatcggcaaaattgtgctgtggatcgtgttgcttctggtggcggtgatccagatctttccgctgatctggctgcttgacttttcacttgcgagcagcacagaaatgtttacgaacggacttttgatccttccggaaaagatacagtggggcaactatgtgaccgctttcgtggacggacattttctgcagtacttgaaaaacagtatcatcatcaacggactcgcggtattttttgtgctgctgatctctatcatggcggcctatgcatgccgcagaatgcgctggaagttaagcgggcttgtaaaaacgatcctgctgctcggcatgatgattccgatccatgcgacgctgcttccgaactataaaatatacaacacgctgggactcacggacaccatctgggcactgttgatcccgtatgtggcattttcactcccgcagggactgttcttaatgaccgggtttatcgattccattccgtgggagatggaggaggcggcggtcatggacggctgcggaatctaccggatcgtattccagattatcacaccgatgttaaaaccgtcgattgcgacagtggcgatcatgaccttcttaaataactggaacgaattcatcatggcgagcacgtacctcagcacgccgaagtggaagacgcttccgttttccgtgctggaattcacgggacagtattcttccaactatgcggtacagttcgccgtcatggcgctcacggcggcaccggcagtcattgtgtatattctgctcaacaagcatatcaccaagggcgttgcgatgggcgcggtaaaaggctgatacagcgatctatgcatgaaccgcacaaagaaaggcagggaagcggatgagaggaaaattgaaaaatgccggcatccggaaaaagctggtgtgttacagctatgcgatcatcacaccgatcctgatgttgatcagtatctgcctgtttgtgcgcaattatcacagaacgatggcagaagagcgggaactgtgccagaaggatgtggagaatctgtctggtaatctggatacgcttttggacgggatggtggaattcggcacctatatctgcatcaacaacgacattctggcaatcttatcgtcggatgatgcacaagccctcaaccgggattcgcagctgtgggttcatgaggcgccgatgcggacactgcaggatatgattgccttaagcggtcagatcaagacccttgcgatctatccggagaacggcgtaaatccctatctgcgctgtgcggacgccgccgcgtacatcagctccatcgaggaaatccggcagacggcgtgttaccggaacgcggttgaaaagcgcgggaaatattcttttgtgtgggtgagaaaaagcgcaagcgatttttaccaggcgaaccgcacggacaaaattgtcctgtaccgtgagatctatgaccgtgccaagcgggagcgcctcggctatcttgcgatcggcgcttcgacggaaaaatacatacagctctgcgaaaaatcgttgtccgcggatacggcgggaattgtcgtgatgaacgaaaacggggaggaactgataagaaccggcgcgctgccggcggaggtgtatgcgttcgcgtacgggaaggaaccggaagacggcggcaagggctatgaagtataccgctgtacgagtgagaaaacgggaatcaccgtgtgcgagatcgtggcgagggagggagtcgtggagcgcctggatcagattgcgctggcgccggcggcgctgctgttcggattcctgatcggcctttatccgattcttgcgatcgtctccaatattgtctcaaagccgttaaaggaattgggcgttgcgatgaaacgctttgaaaaaggggattttgagcagaaggttgcggtgacgaccggcggagaggtcggagaggtcgcggcaggctttaaccagatggtggacgcgatcaagaagctgatcgacaccaattatgtcatgacactgcaggaaaaggagagtgaactgcgggcgctgcaggcgcagatcaatccgcatttcctctacaatacgctcgacgcgctgtactggcgcgcgaccaacgaggggaatgacgagatcgcggaggacatcctctcgctctcccagctgttccgccatgtgctcggacagggaaacgcacagaccgacatcggaaatgaaaaggagctgctggaggaataccttcacatccagaagatgcggttttcggatcacctggattacgagattcacatggaggaagccatcctgtcccatatgattccgaagcttattttgcagccgtttgtggaaaacgcagtcgtgcacgggtttgagcgcgacggcggagactgcctcatccgggtagacgggaagcgcgagggggaatggatcgtgtttaccgtggaggacaacggggtcggcatgagtgaggaacagctgcaggacatctgggaagtcccggatgcaaagcgctatgccggacagcggatcgggcgttatgcgatacgcaatgtaaaagagcgcctggagcttttgtacggggatggatgtaccttaagaatcgagagtgccgtgggacgcggaacctgtgtgacgatccggataccgtgggaggataacaattaccgtgagcatgtggaagaaaagcgggaataagaaaggaagagtgctatgtgtgtgaaattactgattgcagatgacgaggatatgatccgcaacggaattgccaagtatatcaaactgcacacggatcgctatgagacgatctaccttgcgaagaacggacaggaggcgttggatattatttaccgccacaagccggacatcatgcttctggatgtccagatgccgcacaaggacggaattgaggtgatgcaggaggcataccgggcgggggtacttccctgcacgatcattttgagcgggtacgatgaattccgctacgcacagcaggccatccggctgggagccagggattatctgttaaagccgagccgttcctcggacattttaaagaagttaaacgccatcgcggatgagaaattcaaggagccggaagaaccggtgctcctgccggagggcagaaaccggattgtcgagcgcgcgaaggattatctggaagagcactattatgaggatctgtcgctcacggaggtggcggagtatgtcggcatcacggcaagctacctgtccaatctgttctccaagcaggtcggcatgaagtttgtcgattatctcaacgaggtgcggatcgaccacgcctgtacctatctgcggcagaactatctgaagaactatgagatcgcctacaaggtgggattccgggatgaaaaatatttttccaaggtattccgcagggtgatggatatgacgccctccgagtacaaagcaggaaaaaatgtggcgggataagagaagagcaaaaagtgtgcatttttggcacacttttttctatggaaaaaacggggacggctctgtataataggagaggagaaataacagggaagagatacggaggaacagtatgaaatatacgacaacggatgaactggaacatttttcttttgcggaagcttacattgccgatgtgcaggtgacgggcggatttttccatatgacactttcaaacgtgacgatattgccggagaattcctgcaaccgggatatccgcgagatgcgcgcgaacgatctggtgttaaagatcgaggagccggtgatccggtccctggtgcgggagggatataaggtctacgatgccaacggcgcgctgctgcggacctgcgaggatgaggtgatcgatcaggcggcgtggaacgaggcgatccgttcctttgcggatggcagtgtctatgcgctaaagcaggagggagagaattatatatttgagatcgacgcacccgatgaggaggagtatgtgcttgcggtgtccggcacacacaatacggcgtcctgggaccgttttctgaataagtaagtgcccggaagaaaaaggtgtcagagaggcaaacaggcgcagctgatgcggcagggatcggctattatctgcggcggcagcttttgcagttgcgaaccgcaggaagaaatgctatagttttagatagaaaaacaaaccccacataggggaaaggagataccaatgtctaggattataacgattggacgagaatttggcagcggcggacgtgagatcggaaagagattgtccgatgagctgggaattgcttattacgataatgagatcatcagtcagattgcagaccgtacgaagctggcggagggctatgtgcagcatgtgatggagaacggtccgtcgacgttgtatccgattacgatcgggagaagcttttacatgggagttgatccgatcatggagcagaataatgcgatctaccgtgagcagagccgcctgattcaggaatttgcggagaagtccgactgtgtcatcgtcggaagaagcgccgattatattttgcgcgagaagcatccgttccgcctgtttgtctatgcggagatggagcacaagatggaacgctgcaagaagcgcgcgccggagagcgaacactttacggacaaggaattaaagcgccatattttagacgtggataagcgcagggcgcgttactatcagttctttaccggacagacctggggagaccgtctcaactatgatctgtgtatcaatacttccaactatgacatcaaggagctggtacatgcaatcgcacatctggtagaagcatagaacaatcgaatgcatgggaaaaacagattccccatatactttacagatatttgtgatgcagggtatatggggaatttttatggcattattgcagcatgcggtggcggtggcgcgggaatatctgtggggatttcccatgcttgcgctcttattcggaacacatctgtatttcacatttcacctgggcttcatccagaaaaaaatcccgttgggaatccggttgtcactgaccggaacgaagaatcaggaaaaggatcaggtaacaccgtattcggcgctggcgacggcgcttgcagcgacgatcggtacgggtaacattgtgggaatttccacagccattgccatcggcggaccaggagcggtattctggtgctggctgaccggggtattcgggatagcgacctgctatgcggaatgttatctctccataagataccgggtgcgcagggcagacaatacgtttgccggcggaccgatgtatattttggatcggcgtctgaaaaaaagaaaactggcagcggcgtttgcggtgtttacgctgtttgcgtcgtttggcatcggcagcagcgtgcagtcatactccatacgcacggcgctccagcatcagattaccgtgtcgccgcatctggtcggaatggcggtcggggtgcttgcagggattattatcatcgggggaaacagccagattgcaaaggtgtgtatgtggctcgtcccgctgatgagcgctttttatgtgggcggctgtctctatattataggaagaaacagggcggtgctgccggagacgttagcgctgattctctcatccgccgtctgcccgaaggcggtggcgggcggctgcaccggcggagcgctgcttcttggcatccagacaggagtctcccggggattgttcaccaatgaagcagggcttggctcgattccgatggttgcggcgacggcggcatcctcctctgacagcccgaaggaggcggctgtgcggcaggcgttaatctccatgacaggaccgttctgggacacggtggtattatgtgcgatcacgggaattgcggcggtcggcagcatggtaagccatccgcaggaataccggggagtggcaccggaaaatatgtgttttgtggcattccgggaattgcccgtcggcggtgagtggatgctctcgatctctctgacgctgttcgcgtttgccacgatcatcggctggaatgtgtacggaacctgcgcggtgcgctacctgtggggcgaggagggggtgcgtgtctaccaggtggcgtacatgtttttcgcttatctgggagcggtgctttccatggagcttgtgtgggggatatcggatctgctgaattccctgatggctctgccgaatctgttctgcctgtggatgctgcgaggcgaaattgccacagactgtggaaaagggacagataaaacatcaaaaaagaaataaaaattgaaaaaatattattcatgccggataaagtatgatatattgaaatggtatatggagttatcgaaagaagaaaggtgaaagttatggagaaaaaagaacagaagcatttgtatgcagatactgtggaacagaataaacgtgccaatcatttccttgttatcggatatatcgtgttttatctctgtgtgctttgtgtggtaggaattgcctgcctcagaggaatccgcacagtcggatataccgttatgatcgcggtattgattattctggcaacagcgggaacactcgtgttgtaccagcggagaaaagatgatccgaagatccgctatattgcgacggtcgggctgcttgtcattacgtttgtgatgggatgggcgtttgacaattattatgtgcgttttatggctgcaattccgctggttgcatgtattctgttttacgataaaaagttcgccgccttttccgggattgctgtatcggcggtgaatcttcttgtgacggcgtcaaagacgctggcgcttcacacataccagggcgagaatgcactggatcagtggtgtgcgacgctggcaattatacttatgatggtagtggtttatctgacagtatccgtggcgtaccagttcaaccgcgatacgattggcagcctgacagaaaaggaagcagcacagcgccagatggtggacgatatcattgcggttgcagatcaggtgcgcaagggaacagagaatgcgatgaatatcgtcaatgaactgaatagttccaccgaggtagtcaacggtgccatgaaggatatttcggacagtacacagagtaccgccgagaatatccagacgcagacggagatgacacagaatattcaggactccatcggaacgacgttagagcgttcagagaagatggtacaggtggcgaagcagtccggagagctgaatgagaagagttccagaatcatggatgatctgaagaagcagtccgcagttattgcacagacaaactccgaggtggcttcctccatgagagaactccaggatcgtacaagcgctgtcaaaagtattgcagataccattttttctatttccagtcagaccaaccttctggcgctcaacgcatcgatcgagagtgcgagagcaggcgaggcgggacgaggttttgcggtggttgcggatgaaatccgtcagctggcggagaagaccaggcaggagacggagaatattgccaacattttagagcagctgtctgaaaatgcccagacggcggcggatgcggtggagcgttccgtgacggcggcgggtgcgcaggatgagatgattgcgcaggcatccgagagctttggcgccatgaaccagaatgtcaatgagcttgtgacggacatcggtgagatcgacactatgttaaacaacctctccaaggcgaacaatcagatcgtggagaacatcatgcagctctccgcaacgacggaggaagttacagcttcttctgtgcaggcggcggatctcagtgttaagaatctcggcaatgcggaaaataccaaggatctgcttcacagtgtgttagacgagtcgcacaagctggagcagtatatccactagttggacagattttgacctgtagtgaataaaatagaaaaataacagaaaaatgaggtataaaggatgtatttagtgcagtttatcagaggattttgcatggcgctggcagacagtgtgcctggcgtatccggcggaaccgtcgctttcctgttgggtttttatgaccagtttattgattctatcgacgatctgataaccggaagcagggagaaaaagaaagcagctctgttcttcctgattaagcttggaaccggctgggtctgtggaatgattctcgccatcctgattcttgcgagcgtgtttgacgctcatatctatgcgatcagttccctgtttatcggatttattatttttgccattccgattatctttagggaagaaaagaactgccttacggcgaaaaaatctgccattccgtttgtgctgattggcatttcaatcgtgaccgcgattacttactttaatccgagcagcggcggagagggtgtcagcctggagcatctgacgccggggcttgccctgtttgtattccttgccggaatgattgccatctgtgcgatggtgctgccgggaatttcgggctcgacgcttcttttaatcatgggactgtatctgcctgtggtgactgccatcaaagatattcttcatctgaattttgctgcatttccgacggtgtttattttcggatgcggcgttctcgtcggtatttttggtgtggtaaagctgatccgcaaggcgttagatcatttccgggcacagacgatctatctgatcattggtctgatgttaggatcaatctacgcggttgtcatgggaccgaccacgttggaggtgccgcagccggcaatgacgcttcatgattttaacatcctgtttttcgtgatcggcggtgcgctgattatcggacttcagaaaatgaaagatttaaaagcataggacacgaaggagtatcatgaaaaagttattgcagtatttgggaaactataaaaaagaaagtattttaggaccgctttttaagcttctggaagcttcatttgaattgattgtcccgcttgtcatggcggcaatcatcgataccggggtggcaaatgccgatcgtccatatattatgaagatgagtctggtactgtttctcctggcgctgatcggactgacctgtgccatcacggcgcagtattttgcggcgaaagcggcggttggctgtgcgacaggattaagacatgctctgtttgaacatattgagacgctgtcatttaccgagatggataccgtcggaacgtcgacgttaattacaagaatgacaagtgatgttaatcaggtgcagaacggggtgaacctcgttctgcgcctgttcttgcgttcgccgtttatcgtgtctggagcgatggtcatggcattcacgattgatgtgaaagcggcgctcgtgttcgttgtgaccattccgctgctgtcggtggttgtgtttggcatcatgctggtcagtattccgctgtacaaaaaagtacaggcggcactcgataaagtgctgggcatcacaagagagaacctgaccggaagcagagtcatccgtgcattcaacaaggagcaggatgagattgcacagttccacgaagacaatgaggcgctgacaaagatccagctctatgtcggcaagatctcggcgctcatgaatccgcttacctatattatcatcaacggagcgatcgtcgttctggtatgggtaggagcgatccgcgtggacaatggcaacattacgcagggacaggttgtggcgctggtgagctacatgtcccagatcttagtggagttaatcaagctggccaacctgattatcaacatcaacaaatccattgcctgcatgaaccgtatcgagactgtgcttgacatggaatcgtcgatcacggagcatccagcagcggagacgggaagtctcacctcggatggagcaggcagggaaggaaaagagacaatcccggcggagaatgccgtcgtattttccaaggttggtcttacttatgcgggcgcatcggaggaagcgctctccgacattgattttacggtcagacgcggagagaccatcggtattatcggaggaaccggttctggaaaatcttcggtcgtgaatctgattccgcggttttacgatgcgaccagaggagaggttctcgtcgacgggaagaatgtgcgggattatacattggaggaactcagggcgaaggtcggtgttgttctgcagaaggcggttctctttaagggaaccatccgtgagaacttaagctggggcaattcgcacgccacggacgaggagatgtatgaggcgcttgagactgcacaggcaagggagtttgtggatgccaaggaaggcggactttcctatgagatcgagcagggcggcagaaacctttctggtggacagagacagcgccttacgattgcgcgtgcgctcgtgaagaagccgcagattctcattatggacgacagcgcatccgcgcttgatttcgcgacggacgcggcgcttcggaaagccatcgcacatatggacgggcagatgacggtatttatcgtatcgcagcgtgcggcgtccatcatgcaggcggacaagatcgtagtgctggacgatggagagattgtaggacttggaacacacgaggatctgcttaaggactgcgaggtataccgcgagatttacgagtcgcagtttaagcggacagaagaacagcaggcgggagaggcgaaaagatgaaaaaagtggtaaatgaaaatcaaaaatcaacgctgcgcaaggttctgcgatacatcagacgatactggggatacctgggagcatcgatcattctcgcggcggtgacggtggcgcttaccctgtatcttccgattctgatcggtcaggcggtcgaccggatcgtgggaaagggagacgttgactttgccgggatctttgtgattctcagaaagatggcggtcatcatcggactgacggcagtggcacagtgggtgatgaatgcctgcaacaataaaattacctacaatgtgatccgggatatccggacggaggcgttcgagaagattgaaaagcttcctctgaaatatctggacgctcattcctacggagagattgtgagccgcgtgatcgcggatgtcgatcagttcgcggacggacttctgatgggatttacccagttctttaccggtatcgtgaccatctttggaacactgattttcatgctgacgatcagcgtgcggatcacggtggcggtcgtggtcatcacgccggtctccctgtttgtggcaagcttcattgcgaaaaagacattttccatgttcaagctgcagtcggagacaagaggagagcagaccgcgtttatagaggagatggtcggcaaccagaaagtggtgcaggcattttcccatgaagatgaggcactcgagaagtttgatgagatcaatgagagactgcagaagtattctctgcgggcgatcttcttttcgagcattaccaacccgtcgacgcgttttgtcaacagccttgtctacgcgacggtaggcgttgtcggagcttttacggcgatcgccggaggaatcagtgtcggacagctgtcgagtcttctgtcctacgcgaaccagtatacgaagccgttcaacgagatttcgggcgtcatcacggaacttcagaacgcgcttgcgtgtgcgggcagagtgattgaactgatcgaggaggatgccgaggtgccggatgccgaggatgcggtagacttagagcatgcaaacggtaaggtcgagctttcccacgtctatttttcctatgtgccggagcagaagctgattgaggactttaatctgtcggtgaagccgggacagcgcgtggcgatcgtgggaccgaccggatgcggcaagacgacgctgatcaatctgctgatgcgtttttatgatgtgaacagcggcacgatcaaagtcagcgatattccgctgcagcagctgacacgcaagagcctcagggacaactacggtatggtgctgcaggagacctggcttcggagcggaagcatccgggacaacattgcgatgggaaaaccggacgccacggacgaggagatcattgcggccgcaaaggcatcccatgcacacggctttatcaagcgtctgccggagggatatgacaccgtgatcgcagaggatggcggcaacctgtcacagggacagaagcagctgttatgcattgcaagagtcatgctgtgcctgcctccgatgctgattcttgatgaggcgacatcctcgattgatacgcgtactgagatcaagattcagaatgcgtttgcaaagatgatgcagggacgcaccagttttatcgtggcacaccgtctctcgacgatccgcgaggcggacatcattctggtcatgaaggatggaagcatcattgagcagggaaatcacgaggaacttctggaaaagaacggattctatgcgaagctgtataacagccagtttgcaaagacgtcatagattagtttgacgtgctaagtaataggataagaggcatatccaaccgatttcaggcggaaatgcagatggaacattcgttgaaaaaaatgcgtgcatttcttccgaccggatttttgcatcggattccgtgtctcttctacgttttgacaatccacggaatgtgtccgacaaaccgcagacaatgagcggactttctggtgtccctaagggcacctcttcacagacaatataaaaccgcgcgaaccgaactcgccggcatctgctattgaaaacagggcagatgccggctcagacagcggcttcgcgcggttatgttatgtttagaggtgcccataagggacacacaaaaaagtcctaaaattgtctgcggattgcggacacattctgtggagtgctcaaaacttggaaaaacacggatcatcgcagatgcaaaaaccggttgtttagaaatgccacattttttgatccgaatttccagatgcattccgcctgaaatggaaaggaatgattctcccttcaattacttagcacgtcaaaaatttattctgaccggaagcggtgcctacgtatagatctggcggcagccgtcaatactttcgttggtggagtccgtgatatagcggatggcggcgtctttgtcgcgatcccgcacatgaatgaaaatctgctccgcgctctcagcgagcgccgctgcgccgtacttgctggcgaagcgcacccacaggtttgtcaccagatccttgaaggaggcgaaaaacagcgggagcagcgaattgccgccgatgaaggaaagctcgtggctgaagtcaaagatcagcgatgcagcctcctcaggatcttcgcatgcctttaaggcggtcacatactgctcgagcccggcgatggacgcgtcatccgcattgtcgatggcgagcgtggcggcaagattcatgaacatgatgcggacttccagaatggagcgcacttccttgtcgcggagcataccgccgttgtactgcatgatggagactagggtgtctgcggtaccgtatttgcggtagtcggcaacgaaggtgccgattcgtggtttgaccacaagaaatccctttttctccatctcgtccagaccggaattgacgacggcgcgcgatacctgcatggactcggcaagctcgcgctcaggcggaagttttgcgcctatctcaagctttccggataatatcattccctctaattctgcaacaaaaagctcctttaaagaaggagcacttaatttcttaaacaacataatgtgagcctctcttttctggtatatccaaataccacacagatattttagaaaaaaaacgaataaaatgcaagagataaagtctgaaatttttagaaagaatggcgggcgtgggtgtcatggacaaacaataggaagtatgataagattggaactacgggtaagacagaattgcaacagaatctatacaggaaaagagcatttaatatatgaagaaaaaggatcaggtaacagcggccgaagagcagaaggaagctgtccaggtaaaagggaaaaaacgccgtgcaagagaggcacagagggagatccgctgggaccgtctggacaatacggcgcatttgtttccggtgatagccggggagagcatgagcaatgtataccgcatcagcgtgacgctcacggagctggtggaccgtgaattgctgcagcaggcactggatatggtgctgccgaagtttgatgggtttaatctgcggctgcgccagggcgtgttctggtattattttgaggaaaacggcaagccggcaccgcgtgtgcgggaggaaagtgcgtttccgtgccgctatatccggcagaataagaaccacagctatatgttccgcgtaacctattataaataccgcatcaatctcgaagtatttcatgtgctcaccgacggtatgggtggcatcaattttctcaaggagctgacctatcagtatctgcggctggcacatccgaagctgcgcgaaaaggtgggagattccttgagcagtgatacctcgttgaaccgtgaggacagcttcctcaagaattacaagcacagctcccagaaggggtatcagacgaagcgggcatatcttttaaagggagaaaagctgccgccgggagagttcggcgtcatgcacggctacatgaagatcccggagttgaagaaagtctgccatgcgtacggagtcagcatcaatgagtatctggtggcggtatatgtctggagcgtctacacggagtgcatgcacgggatgccttccgaacgtccggttcgtgttgcggtgccggtcaatctgcgcccttattttaactcgatcacgacgaagaatttctttgtgatggtgtcggcagaatttcatccgacaaaggagatctatacatttgaggaagtgctaaagagtgtcagtgagagcctgcgcagccagatcagccgggagaatctggagaagcttttttcctacaatgtctccaatgagaagcttcttgcagcgcgtatcgtaccgctgtttttgaaaaatctggcgatgcgctatgtatacacaacctctgcgcttgcaaacacagcgacggtgaccaatatcgggaatatctccgtaagcgaggagtatcgtccttatgtggagatgttccatgcgtttcttgccatgtccaaagggcagcacttaaagggaacgatctgttcctacggggatacgctggtattcagtttcagttatgatctgaccgacacgtcggtgcagagaggttttttcagaaaaatcgcggcagacgggattgcggttgagatagagacgaatggagtaaattatgagtagatgcaagcaatgtaatgtggaaatattagacgagacggagcgctgtccgctttgccattcggtgctggagaagacggttgaggtggaaaacatgtatccgaatgtgcggacgatgacgaggcgtctggcgttgcttagccgcatctatctgttcgtggcgattcttgtggaggcgcttttgatctatctgaatgtactcagcgactcggagatgttctggagtgcgattccggggctggcgatgttgtacggctatctggtgctgcgctatgccatattgggcaaatccggctacaagggcaagatcatcgtgttgacgctgatcgccatcctgatggttgtggcgattgacttcgtggtggggtaccgcggctggtctgtcaactatgcgcttccatccgccattcttttagtggatgcgggaattctcattctgatgtgcatcaaccggcgcaactggcagagctacatgatgtggcagatttttatgattctctgcagcgttgtcccgctggtcttgtatgcggtggggatcgtgacggcgccgcttcttgccttgctggcgtttgcattttctacggcactgtttttgggtacgctgatcataggagaccggagggcaaggacggaactgcggcgaagatttcatgtccgctgacgcggctgttttgctgtccggcggcgcagctgttttctgacagcggaaaatagaacagaggtacagtgaatgagagaaaatgaggcgagtatccgcggcagagtcgtgagggatctgatcgcgcatacgacgaatgatctgctgattgggaaaaagataaaaaatggggaactccgcaaacagatcggaacggcggaatctccgtggaaatgtccggaatgttttaccatgcagacgatcgagatggaacattttaccatggagcttttagagtcgaaggagaatgcgaaccgcgacaaaatcattttgcagctgcacggcggcggatatgtcggggcgatgcgcaatgcataccgcatgtttgccggattgtacaatgaggtcagccacggcatgagcgtgctcacgccggattaccgcgtggcaccggagcatccgtatccggcggcgctcgaggatgccgtgtgcgcgtatgaatggctgcttgcgcagggatggttttcggagcagatcattgtggcgggagattcggcgggcggcggacttgcgatggcactctgccactatctgatcaatcacggcagacagcttccgtgcggaatcattgccatgtcgccgtggacggatctgacggcaagcggggagtcttacgataccaactacgagagggatcccctgtttggaaagaccagggacagcctgatctacaatcgggattatgtgggagaccacgatccgatggatgaatatatatcaccgatgtttggcgatttcagaggatttccgccgatgctgatacaggtgggatcgtatgagatgctgttgtcggattctgtggatgtcgccgcgaaggcgagaggacagggcgtaaaagtacgcttaagtatctatgacgggatgttccacattttccagatggcagcaaagatgctgccggaatccagaaaagcgtgggtcgagatcggtaaatttatcgagattctgctccgggaatagggagcacctgtctagtgcttagacaggtggctcacatccatgtatacaggcagaccgttgtgataggagacctgcgattcgccgagaatcagcggagcaagatagtcgagcagaggctgttcgatgtcgttgccggcactgttgatccactctctcggaacgctctttgcctcgttggcgatctggcggatttccgcataggagtaatccacggtatacggtgcgtttgaagtgcgctcgatggtgaccatggaagctgtcacaccctcctcggagagtgcgacggcttttttgccgagtgcgaaagattcgtctaagtctgtctgggaagccagatgtgcggcacagcgctgcaggacattgatttccacggaacgcaccttgacaccaagcttttccttgacaaggaactcaagtgtcttgccggcgccgcttaactgactgtgaccgaacgtgtcgatggactgctcggacgcgctgatgtaattgccggaggcgtcgcggatgccctcggacactgcgacgatgacattgttgcgctcgaaaaggagacgcttgacgtctaaaaggaaatcctccgggtcgaaagcgacttccggcagatagattaagtgcggggcggtgttgtatccgttgcgcgcgagtgccgcggcagcggtcagccatcctgcgtcgcgtcccatgatctcaacgatggtcacgcttttgaccgcgtagataaaggtgtcgtgcgcgatctctaagagcgaggaggcaatgtattttgcggcagagccaaagcccggggtgtgatcggtctcgcagagatcattgtcgatggtcttcgggatgccgataatgcggacggaactgccgatgcgttttccgtactcggacagctttaacacggtgtccatggaatcattgccgccgatatagaaaaacgcttcaatgtggtaagtttcaaactgcttaaatatgaagacatagggtgaatcatcatccagataatggggaagtttgtagcggcaggagcctaagtacatcgcaggtgtctgcgcaaggcgggaaagatattccggatgaccgtccataagctccgtgaggttgagaaggtcatcgtttaaaataccggtgattccgttgagcgagccgtaaacggtgtcgtacatggaagaggcggacacgccgtcaatgacaccggcaagacttgcgttgatcgcaacggtaggaccgccggactgggctaccatacaatttttctgattcataacgaactccttatgtgtaaatatatcaatgtcagattgttccgaaaatggtcatttcggaaatcaaacattatcatacccaaaatacgcgggattatcaagattgaatttagatagaaagagacggacggaaagatgaaaatgtgtacattgtgtcctagaaactgcgcagtggaccgtgcgggcggagagcgcggcatctgcggacagaccgaacagctgaaggttgcgcgtgcggcgcttcattactgggaggaaccctgcatctccggggaaagcggctccggcgcggtatttttctccggctgtgccctgcattgtgtgttctgccagaaccgcagcatcgcaaacgggacggcaggaaaggagattaccaaggagcgtctggcagaaatattcctggaactgcaggaaaaaggggcgaataatatcaatctggtgacgccgggacattttgcaccgcagattacggaggcattgcgccgtgcaaaaaaggaaggactgcggcttcccgtcgtttacaatacgagcagttatgagagtgcggatacgatcaaaagtctggaaggacttgtggatatctacctgccggactttaaatatataagtcctgcgctcagtgcaaaatattcacacgctccggattatgccgacgtggccaaagcggcggttgcggagatggtgcgccagtgcccgagacccgtgtttgacggagacgaagcagaagacccgatcgaggagggacttctgatgagacagggcgttatcgtgcgtcacctgctgctgccgggctgtaccagggactctaaggcggtaataaaatacctgtatgaaacctacggcaatcagatatatctgagcatcatgaaccagtatacgccgttggaaaatgtcagcgcctacccggagctgaaccggaaagtcacggacgaggaatatgaggaggtcgtcgattatgcgatcggactgggggtagagcagggatttattcaggagggggagacggcagaagagagcttcatcccggcgtttgacggcgaaggcgtataacgcatagcagaaaaacattgtatagagataaagataaaggggggtgtcgcacgaagcataccgtgctttggtttgataagtaatattacaggaaacacacttggggatttcatgtggaaatgcagatggaaattcgttggagaaaaatgtgagcatttcttccggctgaatgtttgcatcggattccgtgtctcttccacgtttggacaatccgacgggtgcatgtccgacacaccggagacaatgggcggactttctggtgtccctaatggcacctcttcacagacaatataaaaccgcgcgaaccgaaactcgccggcatctgctattgaaaataaggcagatgccgactcagacatcggcttcgcgcggttatgttttgttcagaggtgccaataagggacacacacgaaagtcctacaaattgtctccgggatgcggacatgacccgcggagtgctccaaacttggaaagacacggatcatcgcagatgcaaacatccggctggttagaaatgccacattttttgaaccgaatttccacctgcatttccatctgaaatcccacggtgcggtcttctcataatattacttatcaccccaaagaggtctatgcttcgtgcgacaatttttgtcctgtaaatatgggtttacataacaagtgtccaaagaattggacacatcatgtgcgatactgacaccatcaaagcggatggggagggaagaacatggagaaaaagatcgagatcattgccgtcgattttgacgggacattgtgcagtgaatgttatcctgccatcgggatgccgaatctgccgctctttgcattgctcaagggtgcgagaaggcagggcaaaaaagtaattttgtggacatgccgctgcggggatctgctggaggaggcggtggcctggtgcagaatgttcggactggaatttgatgcggtaaatgaaaatgtggcgcagacgttggaacagtatggaacggaatccagaaaaatctccgcggacgtctatatcgatgacaaggcgtgctggccgtggatgacgaagcaggagtgggaacggtatctggcaggttagaaaaggaggataagaagatgaaaacagtggatatggaattgatacttttgtgtgcgcttatagcggcgattggagcgttcggactggtgacgggtgtggttctgctgttcggaatccagtttcaggagtgcaatgctgtactgctcaccggaattgtgtgcgggctctggggcatattatggggaagcctgctgatacagaaccggaacctgatgtcgaaaaacgtctaaatatagtacagcgtgcaggaaaatggctatatttaggttgacgcgtgtgatagaatctcctataatgagactgaattattgggcgcatgattttatggacttgtgcggtactcagggaggaattcgatgaatcactttatatatagaaagaagagaaagatattgctggcggcaatcagcatgggagtgcttgctgccagcatatctgcttttcacggccccgaagccgtatatgcgtacacggcgacggcgggaacgatcaatgacggaccggtgaaggtgcgcaacgcaccggtgaccggggataagctgacactgctctatccgggaaatgcggtgacagtaactgatgagacggcaggatcagacgggtatacatggtaccagatccagatgtcggatggtgtaaccggttatatacgctcggattttgtgacgcttcagggcacggattcttctgcgggacagacgaatgcggacagcagtgcaggtgggacaaacggggtggtgcagaacacggaaaaaggtgtttatgtgcgctcgggagcgggaacgtcctactctgtggtgacaaaggtatacaaaggacaggctgtgaatgtgggcgagctggtctcggcgggcggaatgaactggtacagtgtgacgctcgtggtcggaggcgcctcctattccgggtggatttgtgcggactatgtagccgtgaacggtcagacgtcagacgaccagtcgcagggagagacgaccggtgtcacggacagcgagtatgaggcggcgcttgcggcagcgggttttccggcaagctattgcagcgcactggcatccctgcatcagaagtatccgaactggcagtttgtgccggtgcagacgggacttgactggaatacggtggtatcgaatgagagtctggtcggaagaaacctgatccagaattccgtgaatgacgcaagaaaatcgacggacagtcaggcgtataactgggagaccaacaagtggtacgggtttgacggggcaagctgggtgtcggcgtctccggaatatatcgcatactgcatcgatcccagaaattttcttaacgagaatcagatctttcagtttgaaacgttggaatatgcaggctatcagaacgcagcgggtgtgcagagcgttctttccaatacatttatggcaggcaattataccgatacggacggagcggttcgcagctatgcggatacgtttgtggagatcggctccaatgtgggcgtgagcccttaccacctggcatcccgctgtaagcaggagcagggcgtgcgggggacgagcgatctgatttcgggacgatattccaactatgcaggctattataactactttaacgtccgtgcgtttacgacgggcagcgcgtcggcgattgtgaacggactggaatatgcgaagttgcagggatggaactccatctacaagtcgattgcgggtggatcatcggttgtggctgataattatgtgaaaaaagggcagaataccatttactttgaaaaatttaacgttgtctataccaatagtctttacgcacatcagtacatgaccaatgtgcaggcggcgatgagtgagggcaccaatatgggaaaagcctacacggacaagaaccaggcgtttgttttccgcattccggtctatcagaacatgccggagagcgcagtgacgtttgcggacaaggggaatccgaacaactggctttcctcgatcacggtggacggatatgcgctgacaccggcattttccggtgcgaatacctcctattccctggtcgttccggacagcgcggcttcgatcaatgtgggagcgacggcggtggcgggaacgtcaaccgtttccggtactggaaattattcgctgaattatggagataatacgattcagattacctgcatctcgcagagcggagattcgcgcacttacacgctgatcgtggcaagagcggggggcagtgccggcggaaccattcaggtggcggatgacgcggcgattacgccattctatccgatcggaacctatgtgacgggaattgagcctggaacaagcgcatccacagtcgcatcgggaatcggaacccagaactgtaccgtaaagattctgaatgcagacggcagtgagaatacacagacggtgggaacgggcaacaagctggcagtgtatgtcggcgacacgctcgtgcagcagtatgagattgtggtatatggagatatcaacggtgacggaaaggtttccaatctggatctggtattgatgcagaaacagatccttggaattgaaagtcagtccggcagtcgtctggaagcggcaaacgtcagcaaggacggcggtatttccaataaggatctggttattttacaaaaacacatactgggaatctcacagattgatcagtgagaggaagaattgggagagcagaaatgaagaaaaaaatagcaatgatgatgatggcgcttagcctgacattcggggttgtcggagtgccgcagacggtattcgcggcgagcggatcaacatctgtctcggtgtcgtcaggaagtgtcaatatcggtgatacggttacagttacagtaaaagcgagcggtccatccggcgaaaaggcgaatgcgaccatgacgctgtcttatgattcgagtgtgctgcagtttgtgagttgcaataccacatacggcggaggcggcggaagcgtgatggcgacgggagaaagctacacggtgacattaaaagctgtgagtgcgggaaattccgccctctctgtctctgccaacgacggagtgatctttgactccaatgaggagatggattccatgtcgggcagcagtgcgtcggtcacagtaaagaatgcagcaagtacaaatacagattcaggcaataatagtagcagtaacagtggaacctccaacggaaacggaacatcagcgggtggaaacggggattctgcggcgaatactggcgagacaacaggaaaacagtctgcggataattctctgaaagagttgaccatttcaccgggaacgctctcgccggcatttaacgggaaaacgctgacttatagtgctacagtgggaagcgatgtaaccaatatcgccgtatctgccacaccggtcaatgaaaaagcggtcgtggagtcggttacgggaaataccaatctgaaaagtggagataacaccattaagattgtagtcaaggcggaaaatggcgtgaccgcaacctataccgtgaatgtgacaaagcagggaacctcgtccggagagacaacggcatccgatgagggggaagtggagacaacagaggagacggacagcagtgaaaacacggttacggtaaatggcatttcctatgtaattgcagaaaattttgcaacagagaatattccggcagatttttcggagacaaccgtcaattatcagggggcggattatcggggcgtgagttatgacaagggatctgtggtcatgctttatctggtgcaggacggagcggaagagagcacaggaagcttctttgtatatgacagcacaagagataccctgtatccgtttgtaaaaatggtcaatggggaacactacgtgatagcgcttctgtcaccggtggattatacgatgccggatacgatgcagcagacacagcttacgctggcggacggaagtcttgtgacggcatatcaggagacccaggaggaagggtctgaggtggaatcggagttctataccttttacggagtgaattctgacggaacggaaggctggtaccagtacgactccatagaggagacctatcagcgcgtaaatacagggacaactgtatcttccgacggactgcaggacgaggatgcggcctatctgcaggaggaatatctggcgctgtccgagaaatataaaaaagaaaaagcgttttccagaaccgcgattggcatattgatatttctgctggcggtaatggcagtggtacttgttaacctgttactgcacaggagggaagcggatagagatgacctggatgaggatgacactatggatgacggtgtctcagagcatgatgatacagaagaactgctggatgaaaaccaggatgatgtgatcgaggaaccggaaaaggattcccggaaaaagtggcactggaagaagcgctctgctgcagatgccggggatgcagatgaattcgacgaacaggaagagagagaagagaaaacgaaaacgcaggaatctgacgatgacgcgttcgatgatgcattcgatgaggatgacatcgaggaggaagagccgccgaagaagagattcggtttctggaagcggaagtctgacgatctggatgacgatctgtttgatgatgacgacgcgtacgaggatgatgacgcgtacggggatgacgatgacacgtatggggatgatgacgcgtacggggatgacgatgacacgtacggggacagcgatgcgccggacgatgaaaaagaaaaagtttcaggcggcaaagaccagaaaaacaagcaagacgatgagctggatatcatagattttaatgatctgtaaagacgaatgtgatatcggactggaaataggaggtagcgatgcagacagcatatacagcaaaggcaaaaaaggcgattgatattgcaacgcggatatcaaagtcattgcatcacagttatatcggcacggagcacatactgcttggcctgttgaaagagggaaccggtgtggcaagccaggtacttgccgacaatggtgtagagtatgataaggtgctggaactgatcgaggagctgattgcaccggggaatgcggttgcggttctggaggacggattgtccccgagagcggcgcatgtgcttgaggtatccaaagcggaggcggcgcgtttccactcggagaagattggaacggaacaccttttaattgcgatgatcaaggagacggaatgtgtggcgtccagactgttgaatacattgtctgtcaatgtgcagaaaatgtatgtggacaccctgatcgcgatgggcgaggatgtgagccagtataaggatgaattccagaacgggaaacccggcaagcggaaaaacgcggagggaacgccgtcactggatcagttttccagagatctgaccgaacttgcacgcgacggaaagcttgatccggtggtcggcagagaggcggagatcgaccgtgtcatccagattttaagccggagaagcaagaacaatccgtgcctgatcggagaacccggcgtaggaaaaacggcgattgtagagggaattgcagagcgcattatgggcggaatggttccggatacggtgcttggaaaaagagtggtctccctggatctttccgggattgtggcaggctcgaagtacaggggtgaatttgaggagcgcatcaagaaggtgcttgcagaggtggcgaaagccggaaacgtcctgctgttcatcgatgagattcataccatcatcggagcgggcggagcggaaggcgcgattgatgcatccaacattttaaaacctgcgcttgcgagaggtgaggtgcaggtgattggtgcgacgaccatcgaggagtatcgcaaatatatcgaaaaagatgccgctctggaacgccggttccagccggttgttgtggaggaaccgacggaggaggaagccatttccatattaaagggactgcgcagccagtatgagagccaccaccatgtgacgattacggatgaggccgtggaggcggcagtgcgtctttctgcacgttatatcaacgaccgtttcctcccggacaaggcgattgacctgatggatgaggccgcggcaaaagtgcgccttcacgtgggcggagacccgagggaggctgcagaactccggcgggagattgcggagtcgcaggagacattggagcaggcactttgtggcggagacctggaagcggcgagagaggcacagacaaagcgtcaggaactggaagaaaagttggaaaaactgaacgcaaaggcaaagcagggcggcagacggcatcaccagaccgtcggagaggatgagattgccgatgttgtgtcgggatggacgaaaatcccggtgaagaagcttacagagggggaggctgccaggcttaaaaagctggaggcaactcttcacaagcgcgtgatcggacaggaggaggcggtatcggcagtggccaaagccgtgcggagaggccgcgtcggattaaaagatcccaagcgcccgatcggatcgttccttttcctgggaccgacaggcgtcggcaagacagagatatccaaggcactggcagaagctgtctttggacaggagcaggcaatgatccgcgtcgatatgtctgagtacatggagaaacacagcgtatcgaaaatgatcggttcaccgcctggatatgtcggacatgaggacggcggacagctgagtgaaaaagtgcggagaaatccatacgcagtgattctgtttgacgagatagagaaggcgcatccggatgtgtttaatattctgctgcaggtgcttgacgacggacatatcacagattctcagggaagaaaagtggactttaagaataccatcatcattatgacctccaacgcgggagcgcaggctattgtggagccgaagaagcttggctttgcttccggcaatgacgagaagcagaactacgagcggatgaagggcagcgtgatggaggaggtccgcagaattttcaaaccggaatttttaaaccgtattgacgagaccattgtattcagggcactgaataaggacgacatgaagcagatcgtaggtctgatgacaaaagagctggcgaagcgctgcgaaacacagcttggcattacgctggtcgtgcgcgatgccgcaaagcagtacattgtggataaggcgtatgacccgaagtacggagccagaccgctgcggcgcaagattcaggatgagattgaggatccgcttgcggaaaaacttctcgacggaagcatccgccggggcgacgaagtgatcgtcacgacgaagaaaaatgcaatttttctggagccgaagaaaaagtaaaaaattacttaaatgtcagtgaaatcactggaaatcaaagaacagatattatataatatttttacaaatttacgataaagcagaccggatgaaggagctgcaatatcacaggaggataagatggccgttattagtgaattactccgttcagaggaggatggaacgatcagctttggggattatacattgagcaccaaggcaaagcttgacaattttgagcaccagggagacctttacaaagtaaagacctgtcaggagattaccaagctggagcgcaatggcatgtttgtatacgagtctgttccggggactgcagtggagcatttaaaagcaacagacacaggaatggagtttagcgtagaaggcgcagaggacgcacaggttaccgtagagcttgaggatgaggctgagtacgacatcgtgatcgacggtgcagatgccggcaggatgaagacgaatctcggaggaaagttaagcctgagcgtagagctcggcgatgctccggtaaaggtaagcgttcagaagtgctagagcagccgctttcgcatatgacaattacaagatcagtgagacctgtccgtatggacaggtctttgttgctctataggaaatgacgtgttatgttaaagcgcgaaagccgcgctttctatggagaaaaagccctgtctgggcagcagccgcgtctgcgggaaaggaagataagaacatggcaaaaggaaaaacaacagtgtacttctgtcaggagtgtggatacgagtcggcaaaatggatgggacagtgtccggcatgccatgagtggaactcgtttgtggaggagacagtcgagaaaaagagcgcgcgtgggaaccgcagtgcggatagcagccgtgaggcaaaggcagttcccctgtcacagattgagatgacgcaggaacagcgggtgtccaccggcatgaaggagcttgaccgggtgcttggcggcgggattgtgcagggatccctggtgcttgtgggtggagatccgggaatcggaaaatcgacgctgcttttgcaggtatgcaggaatcttgcggaacataaggtgaaggtgctctatatttccggtgaggaatccttgcagcagatcaaaatccgggcagaacgcatcggaacctttggggacagcttaagtctgctctgtgagaccaatcttgataccatacggcgcgtgattgaccgggagaagcccgagatcgtcgtgattgactccattcagacgatgtataatgaagacatctcgtctgcaccgggaagcgtctcgcaggtgcgggaatcgaccggcaccctgatgcagatcgctaagggacttggaatttccatttttatcgtcggacatgtgacaaaggaaggcgtggtggctggtccgcgtgtgctggaacacatggtggatacggtgctctattttgagggggaccgccatgcggcgtatcgtattctgcgcggtgtgaagaaccgctttgggtcgacgaacgagatcggtgtttttgagatgcggggagatggtctgacagaggtggagaacccgtcggaattcatgctgagcggaaagccggagggagcctccgggtctgttgtggcatgctcgatggaaggaacgcgaccgatccttctggaaatacaggcattggtctgccacagcaatttcggtatgccgaggcggacggcggcaggaaccgattttaaccgggtgaatcttctgatggcggttctggaaaagcgtctgggactttcactgggaaattgtgatgcctatatcaatattgcgggaggcatccggatgaatgagccggcaatcgatcttggtcttgtgctggcgattgtctccagttacaaagaccgcccgatcgatgagaagaccatctgcttcggtgaggtgggactcagcggtgaggtgcgcgcggtcagcatggcagagcagcgtgtgctcgaggcgaagaagcttggatttaagacatgtattctgccggaggtgtgcagggagagcctaaaggagatcaaggggatcggtcttgtcggcgtgcgcacggtaaaggatgcgatggattacgtgatgcggtagtccgtaggaagggaaaatgaatggttctgaattgtatgtacaattaaaacaattcagaaccgaaaactttcttttttaaaacggcggaaatgtggttgacattctaaaataatgatgataatataaacaagctgaccgcgagaacagcgaacaggcaaagcgcttcttaaaaagaagcaaaagaaaaataaaaaagttgttgacaaacggttgatggtatgatataataaataagctgtcgccgagaga

SEQ ID NO: 11526 - DNA, 34662 bp, Unknown
  gut microbiota DNA sequence
gtgtatgtttggtacaccatttagtacgtaaaaaaatataacccgcaaatgtgatgaatacgtgatgaaaaaatgaaaaatacgatattccggacaaaaaatgaagaaattcttatttttttcaaaaatggcggcgcgggcgaaaaaaagctttgaaaaatcccagtttttgtatataataatgctgtatatgtaaaaatatgattaaatgcatctttatgtccttttggacgtgaagaaagattcaacgaatagatgaaccattggcagagaaaagaaaggggcagattagaatatgatgagtacggacatcggtatcgatcttggtactgcaagtatcctggtatatattaaaggcaaaggtgtagtgttaaaggagccgtcagtagtggcttttgatcgtgatacaaacaaaatcaaggcaatcggagaggaagcgagactgatgctcggcagaacgcccggcaacattgtagcagtccgtccgctgcgtcagggtgttatttctgattatactgtcaccgagaagatgatcaagtatttcatccagaaggcacttggcaagaagacattccgcaagccgcgcatcagcgtgtgtgtgccgagcggagtgaccgaggtcgagaaaaaagcggttgaggatgcgacctattctgcaggtgcgcgtgaggtggcgattatcgaggagccgattgcggcagcgatcggagccggaatcgatatttcaagaccatgcggcaacatgatcgtggatatcggcggcggtaccgcggacatcgccgtgatttctctggggggatcggttgtcagcacttccatcaagatcgccggagatgattttgacgaggcgattgtccgttacatgagaaagaaacacaatctgttgatcggtgagcgcacagcggaggacatcaagatcaagatcggttcctgtttcccactggcacagaatgagaccatggacgtcagaggccgtaacctggtgaccggtctgccgaagacggtaaccgtttcttccgaggagacggaagaggcgctgaaggagccgacactgcagatcgtggaagcggtacactcggtgttagagaagacgccgcctgagcttgcggcggacgtggcggaccgcggaatcgttctcacgggaggcggatcactgcttcgcggacttgaggaactgatcgaggacaagacgggcatcaataccatgacagcggaggagccgatgacctgtgtggcagtcggaaccggaaagttcgtggagttcctgtccggaaagcgcgatgatgattaagtttgacggcagttatgacgatataaacaacaaagagcccttgggatgcgggagcgtctgatggattctggtgagaagcaggcagaagttacaagaggtaacagaaaaaggagcagtctatggtaaagggattgtatacagcgtatacaggaatgataaatgaacagaagcgtctggatgtgctttccaacaatcttgcaaatgcagatacgaatggttataagaaagaaggcacaacgtcccagacatttgcagatgagctggcaatcaagatcaaagatacatcgtcttacggtcttgcgcagaagctgggtacaatcagcatgggcgttcatatcggtgagacgtatacggattacagtaccggaagtttcaaggttaccgataacagtacggattttgcaatcaagggagatggattttttgcgattgcctacacggataagcagggaaattcatccgtaaaatatacaagggacggagcgttcacggtcaacacccagggctatctggtgaccaaggacggcgattatgtcctgaatgcaaatgacgccagaaacggcaatgtgaacggacggattcaggtggatccgacccagaagatcaccgtggatgagcttggcaatatctatcagaacgatcagcaggttggaacgatcggcatcgtcgattttgcggattatgactatctggcgaagtacggtgagaatatgtacgaccttgtgaacggaggaacggtgacggcggcagacggcaggatcgtgcagggaacgctggagtcgtccaatgtgaatgttgtttctgagatggtcaatatgattacgatttccagagcatatcaggcaggacagaaggttattaacacgattgatgagacactggataaggcggtcaatcaggtcggaaatgtatagacggaggtagctgacatatgatgagggcactttatactgcggcaaccggtatgcttgcgcagcagacgaacgtggacaatatttcaaacaatctttccaatgtgaatacggttggattcaagcaggagaaggcagagtttaagtcgctgctttaccagaccattcagacgaagacaacgagtgcaaacggagagcagaaaccgattccggcacaggtgggactcggaacgagagttgcggcagtcacatccgtgtacacacagggagcgctgcaggcgagtgagaatgataccgattttgcaatcgtcggagacggattttttgcagtgcgctgcgcagacggcgagacacgctataccagagcgggagattttgtgtgggcagtgggaaccaacggcgttacactgaccaatccggacggctatccggtgctagacagcaataaccagcagatcgttcttccggccaatataagttccagcagtgtgacagtatcgagcgacggcagaatcggttacacgacagcaaatggaacttatgtgaatatgaaccgtcagatcggactgttccagtttaacaacccgagcggccttgagaaaacgggtgacaaccttctggaagttacagcagcttcgggtgcggcaatgaatgagaatacgacagcaggtcttaccagaagccaggttcgccagaattatctggaggcgtccaatgtacaggtggcggacgagatggtcaatatgattatcgcacagcgtgcctatcagttgaactccaaggcaatcacgacatcggatgagatgctggagatggcgaacaacctgaaacgataagcagatgataagcgaacggtaagcggatgataagcggaatggagcgtaaagtatgagtttttcgatagacggtatttcgtcattagtcagcaatgcacagaacagcgcagccgcaggcagcgcgtcggcactgaagaattcgatcagtagtgtgtcctccagctcgagcgaggaagaactgctctcggtctgcaaggattttgagtcctactttgtggaagaggtattaaaggaagtaaaggagaatctcatttcggatgatgacgaggataaggattcttctctcagtacgctgacagattttcacatggacagcacgatcgaactggtggcagatgagattgtggatcaggtgggagaaaattatacgcagcagctttatgagcagatgaaacggaactatggcatagaatagatgccggcagttaagagtgaacgaggcagagaacagtcgccgttacgggtgacgggttctctgcttttttcggcgggaggaatgatttggaaaagttagcaggatatgtggaacatattatatacagaaatgcagacaacggatatacggttctcaatctggtgagcggggaggaggagattacctgcgtgggaatcttctcggcgatcgcagagggggagaacattgaggcatccggcgactataccgatcatcctacttacggtaaacagtttaaggtcgaaagttttgaggagaaagcgccggaagatgaggaagccatcgaacgctatctcggttccggggcgatccgcggaattggtctggcactggcagcgcggattgtgcgcagattcaaggcggatacctttcggattatcgaggaggagccggagcggctggcggaagtaaagggaatcagcgagcgcaaggcgatggagattgcggatcaggtgaatgaaaaacgtgatctgcggcaggcgatgattttcctccagcagtacggcatcacgatgaacctggcagtgaaagtatatcagcagtatggacaggaggtatacgggattatccgtgagaatccgtatcggctggcggacgacattgagggtgtgggattccgcacggcagacgagattgctgtccgggtaggaatccgcatggattctgatttccggatccggagcggaattttatatgtgctgcttcaggcatccacagaggggcatacctacctgccggaggaggaattgaccagaagaaccggacagctccttgaggtcggggaggagcagatcgagaagcagtatatggatctggcgatcgagcggaaaatcatcatgaagcagggcgaaaaccagacgcagatctatgcggcgtccttttactacatggaggcaaatacggcaaccatgttaaaacagctcaatgtcagctatgatgttccggatctggaaatcgaggagcgtgttcgcagaattgagaagcagaccggaatgaaactggatgagcaccagatgacagcggtcaaagaggcggtgcgcaacggacttctgattatcaccggaggaccgggtaccggaaaaacgacgacgatcaatacgatcatcaagtattttgagatggaaggacttgatatttttctcgcggcgcccaccggacgtgcggcgaagcgcatgagcgagacgaccgggtttgaggcgagaaccatacaccgcatgctggaactgaacggcggtgtggacggtgcggcagggtttgagcggaatgagcagaatccgcttgagacggacgttgtgattatcgacgagatgtccatggtggatatttctttgatgcatgcactgttaaaggcggttgctgttggaacgaggctgattctggtcggagatgtcaatcagctgccgagtgtgggaccgggaagtgttctgcgggacattattcgctcgcacgagtgcaatgtggtcatgctgacgaagattttccgccaggcatccacgagcgacatcattgtgaatgcgcacaaaatcaatcagggcgaagaagtgacgttggacaacaaaagcatggatttcttcttcctgaagcggtatgacgcagatgtgattatcagcgtggtactgcagctgatcaagcagaaactccccaaatttgtggatgcgacgccgtacgatatacaggtgttgacgccgatgcgcaagggactgctgggcgtagagcggttaaacggaatactgcagcgctatctgaatccgccgtctccgcagaagcgtgaaaaggaacacggcgatattctgttccgcgagggggacaagatcatgcagacacggaacaactaccagttagagtgggaaatccgtacaaaatacggtctgtctgtggataaagggacgggagtattcaacggagacatgggaattgtccgggagatcaatgatttcgcggagacgatgactgtggaatttgatgagggcagaatggtggaatatccatacaaactgctggatgagctggaactggcgtatgcgattaccatacataaatcgcagggaagcgaatacccggcggtcgtcattccacttttgtccggaccgtcgatgcttatgaaccggaatctgctgtacacagcggtcacccgtgcgcggaaatgcgtgacgctggtcggcaatgaagtaacatttgcacagatggtacagaacacgtcgcagcaaaaacgatacagcgggctgtgtgaccgcctgaaggagacataacactgccgtggaatattttggaggaagaagatatccggggaaaacgaatgcaggcgagaggctcttcatgtttcgggatgcaacggcacagtccattctttggagcaaaatcccgtatttcttccgtgcgatcgttgtcttaggttccgtgtctttgccacgtttgaacaccccacgaaagctgtccgtcaagtagcagacaatgagcggactttctggcagcactaactgcactcacgcatagacatcataaaaccgcgtgaaccggaactcaccggcatctgctattgaaaatagggcagatgccgactcagacatcggcttcgcgcggttatgttttatgcttagagtgcaggtaagtgctgcacaaaagtcctaaaattgtctgtagcttgcggacagcttccgcgggggtgctccaaacttggaaagacacggatcatcgcaaaggcaacggccgcacggattagaaatacacgattttgcgattagaatggattgtgcccgttgtattttgaaacacaaaaggctcccgcctgcgctctcttcatccgggcagcttctcatcccgaaatatcctgcggctgcgttatgtctctttcggtcggttacgacagcagcgctttatcgtttgcaaactcctcaccgctgaccttctcaaattgatggagaagatcttccaccgtcagcttcttcttctcttctccggcaatgtttaagatgacccggccttcatgcatcatgatgaggcggttgccgtgtacgatggcatccttcatgttgtgggtgaccatcatggcggtcaggtgatgatctgcaatgatcctgtcggaaatctcaagcaccttggcggctgtcttcggatcgagcgccgcggtgtgctcgtctaaaagcagaagcctcggcttctggatggaggccatgagcagcgtgattgcctggcgctgaccgccggacaacagccctactttgctggaaagccggtcttccagaccgagatccagggtggcaagcatctcacggtagacgtcgcgctcctttttcgtgatgccccaggagagaccgcggctctgtccgcgtctggcagcgatcgccatattttcctcgatcgacatcgtcgtcgcggtgccggtcataggatcctgaaagacgcgtccgagatatttggcgcgcttgtactcggaaaggcgtgtcacatcatcgccgccgatatagatttttccggaatccaccggccacacgcctgcgatggcgtttaaggtggtggattttccggcgccgtttccgccgattacggtgacgaaatctccctcctcgagagagaggttcacaccgtttaatgcaactttttcgttaatggtgcctggattaaacgttttcttgatattgtctatttttaacatttctgccatggtgttaccgctcctttcctttgcgtgtggatttcagataaggaatggcaaggaatactgccacaacgatcgcggagaaaagcttcagatcgtcggaaggaagctttaaccataaaaccacattcattacaatataatagatgatcgctccgccgattacggaaaacagcgtgtaggcgaaagcgagattcttcccggcgcagagtctgccgaaaataacttctccgataatgacagcagcaagaccgatgacgatggcgccgcgccccatgttgacatctgccgcaccctgatactgggcgtacagaccgccggagagaccgaccagaccgttggagatcatgagcgcaatgacggtgtgaaggttggtgttgattccctgcgcacgcgccatctgctgattacatccggttgcgcggatggcatgtccctgctccgtgccgaaataccagtagagaatcgcaacgattgcaaaacagaacaggatgcatgtcgcaaaaatctgtacacgggtgctgttggagtcggacaggtagcggagcgagaccaccagagggtacttgtcaacactgacggcctggttggaacagcccatgatgtttaagttgatggaatacagggaaatctgggttaaaatgcttgccagaatgcccggaatgccaagagcggtatgcaggatgccggtgatgaaaccggcggccatgcctgccagaaaggcaaaaataagtgctgcccacggactcattcctccgcggatcagcatgacggcaaccgcacctccggttgcaagagaaccgtccacggtcagatccgcaaaatccaacagacggtaggtaatatagacgccgagtgccatcagcccccagaccatgccctgggcgaaagcaccgggcatggaacggaagagggcaagcgggtcaagcgacataaaataattcatcaggaaaaacccccttgtaaggaaaaatattattcggcaccgattgccacgtaatcatccggaacggtaatgccgagatcggaacagatatccgcattgtattcttttgtgacattcggggcatattcaatatccatggtggaaatatccttgccgtttaccagaatgtcgtaagccatctcgccggctttgtatccgatgtcataatagctgatggagagcgttgcaacaccgcatccggagcagattccctcctcgccggcgatgactggaatgcctgccgggcgtgtgatgttgtcgaccgcttcggtgttgcctgccatggtgttgtcggtcggaatgtagatgacgtctacttcgctgacagcactctgcacgacagaggcgatgtcgttggaatccgccacggtgtactccttgtgggagattccgtcctcatccagatactttccgaattctgttgcctggtacacggagttcggttctgcggaacagtagaggatgccgacattcctggcgtccggaaacagttccacgagcatatcttcctgctggtctaacggagccagatcggatgtaccggaaatatttttcccggtggcgccggtccaatcgtcaatgtcgagcgcggtcgcgtagtccgtcacggaggttccgagtaccgggatcgtactggtggccgccgcggaagcctgcagggcggtcgtcgcattggcgaggatcagatcgtaattgttggagacaaaggtggtggcaatgctggaacagttcgcctgctcgccctgtgcgttctgcacatcgaaggtgacggaatcgcccatcagtttggtcagggcatcctgaaatccctgcgttgcctgatccagtgccggatgctccagctgctgcaggatacctaccttatacgttttttctccactgccgcacgcggtcatggataagaccatcgtggagactaatactgccgaaactagtttgtgtgcttttttcataagcatctcctcctttattgcattaaagctttaatgcttttaatagataaaattataatgaggaaaagtatattcgtcaaccgttccttaaaataaagaaagaaaaaattaagaaaatgtttatggcaaaaaaggggcggacatgctaggataaagcggaatcagatgatcgggggagagcgggaaatgcaatgcaggctgattttgcaacaggaaaagaaaaaacaggacgcggactgcggtgggtggcggagacgatcgttggtctcatctatccgccgagatgtccgatctgcgaccgcgtgacggtgccggaatgtgtcccgtgcagaaggtgcgcggatgctgtacggcttgccgaggaaccggtgtgcaagcgatgcggcaagccgctggatggcgagcgggcggaattctgtctggactgcggaaagcgcaggcatgcgtactgccaggggaaagccgtgtttgtgtatcagggaaatatccggcagtccatgtaccggtttaaatatgcaaaccggcgcgaatatgcggcgtattatgcgagggaggcggcagcgctttatcaggactgggtttttaaaaatcaaatcgaagtgatcgttccggtgcccatgtaccggtggaaaaagcggcggcgcggatacaatcaggccgagacattcgcgcgggcgcttggcagggagctggggcttcccgtggacgccgggcttgtgcgccgtgtgcggaacacggtgccgcagaaggagttaaatggcggacaaagagcggcaaatttaaaaaatgcttttcaattagcagcagatatagtaaaatataagaaaatattactggtggatgatatttatacgacgggaacaacgatagataccgtttcggaggtcctgcggaagggcggcgcagagcggatctattatatttgcgtcagcatcggtgcgggattttgacaggggaattcaggaggattgagaagtatggaagtgagaaattgcaggagctgtggacgcctgtttaactatatggggggagcgccgctttgtccggcgtgtcagaaaaagcttgaggagaagttccaggaggtaaaggctttcctggaggagaatccgaattcaagtgtggagacggtcgctgaggagctggatgtgtcggtgaagcagatcagacagtggattcgcgaggagcgtctgtcgctttccgtggcaggagcagacggcattgtctgtgagacctgcgggaagccgatccgcacgggaagattttgcgagaagtgcaagaacaatatggcgaacgcgcttgcagagtcgattcataagccggagccgcctcagccgcaggagacagagcgggataaaaaccgcatgcgtttcctcaaataataccaagagaatcaacagggcctgggtatcgggctctgttttttgctttgaaaataaatagtgctgtgttataataaaaaaagaatgcataattgcgtgcaattttgacctgcgcaggctggaacggcagggcggagaaaggataactactgtatggtaaatgaagaacgattgcgccacctgattaagatggcacagtttgatacaaacgacgggaaacagtgtaagccgatgacgcagtatgcgagaaaagattatgtttccatgcgtctgctggggagcttcgtgacaggaaccatctgctacgggcttctgatgggaatgtgggggctgtatgcgacggaagagctgcttgcaaagctgaacaagttcgatatccaggggcttgtcatgacagcggtagtgccgtatctggtgtttatggtgatttacctcggagccacgtgggtaatatttaacatgaaatacacagagggacgccgcaaggtgaagaagtattacaacaacctgaaaaaggtgaatcagatgtatgagagggaagaacgcctccggacatccgatcataaagactgggattagagcgggaggcatggaatgacaaccttattggaactcaaagaaaaattagtacgcttctacggaaaatacgaagtgtacattacaccgatcgtcaagtttatcgtggcgtttgcggcgctgatgacgattgacaggaacatcggctacatggaactggtcagctccacaccggtggcgctgattttaggactgctctgtgccatcctgcctgtgggcggcacgatctttattgcggcggtcgtcatactggcggatatgtatgcattatcgattgaggtatgtctggtcgcacttcttctgtttgtgctgatctattttatctattttcgttttgctcccagacagggaatgggcgtattgctgacgccgatctgcttccggctgaatatcccgtatgtgattccggttggaatgggactgttggaggaggcatattctgtatttgcagtgatctgcggtacggtggtttactttttcctcgacggagtccggcagaatgaaaagctgctcggcagtgcggcggaggagagtgcggaggcgaattccaagatcgtggtggcgttaaaccagcttctcggcaacaaggaaatgtacctcgtgctcggcatcatggctgtgacgctgattattgtatatctgatccgcagaatgtctatcgcgaatgcatggcagattgcgattgcatccggtattctgttcgagacaatcggtttgattgcgggctatatgctgcttggaatttccggtaagacggtgagcgtgctggtcggcaatgtgatttcacttctgattgcatttgtgatacagttcctgttctttaacctcgactactcaagaacagagcggctgcagtttgaggatgatgaatattactactatgtaaaagcagtgccgaaggctgtggtatccggcaccaacaagcaggtaaagcgtttcagcgggaaggacgaaaaggaacgtctcacgaagaagcgttttgcggaagagatggatatcgacgaagaattattagattaaggaagtggaccgcgtgcagaacatgttagctaccctcgatgctttctggcagaaggcgtctctttatatgaatcttccaaaaatctccataacagatatcgtggagatcataatcatagcgtttctgatctactatatgctggtgtggatcaagaataccagagcatggatgctgctgcgcggtttgatggtgattctgctcttcgttctgctggcagcattgttccagatgaacacgatcatctggattgcaaggaatacgttaaacgtcctggtgatagctctggttgtaatcttccagccggagatgcgcaaggcgcttgagaatctcggacggaaaaacgttctggcgttcctgttttcctttgattcctcaaaggaggatacgggaaagttctcggataagaccatcaatgaaatggtcaaggcgtgctacgagatgggaaaggtgaagaccggagccctaattgtggtggaggatgagattgttctctcggaatatgagcgcaccggaatcgcggtggacggtattctgacaagccagcttctgatcaatatttttgaaaaaaacacaccgctccatgacggcgccgtgattgtgcgcggggacagagtcgtggcggcgacctgctatctgccgcttacggattccctgtcgatcagcaaggatctgggaacgagacaccgtgcggctgtcggaatcagcgaggtgagcgattccctgacaatcgttgtgtcggaggagaccggaagagtgtcgattgcgctcggcggtgaactttaccgcaatgtagatgccgagtttctgaagaacaagctgacgtacatccagaggcgggaacaggaattatcgaagattgcattgtggaagaggaggctgaaagatgctaaaacggctcggaaaaacgataacaaataattttagcctcaaaatactggcggtcatactggcggttgtgctgtgggtagtcgtgattaacattgacgacccgacgacgtcaaagacctataccaccaatgttgtagcggagaatacggactatatcacatcgcagaacaaatattatgaaccgctggacagcagcaacgtagtgtcattccgcgtgtcggctgcgcgcagcgtgcacgatgaattatccaatgctgatttttccgcaacggcggacatggagaatattgagtacgatgagggaagcggaatttaccgcgtgccggtgacgatcaccgcgaagcggtatagcaataaagtctccgtcgtctccaaacagctctatctggaagtggcgctggaggatcgcggcacctgccagaaggcgattacggcggcaaccaagggaaccgtgatgaacggctgtgcgctcggcacagtgcagattgtgggatccaacctgttaaaggtttcgggaccggcgtccatcgtcagccagattgacacggcggtggcgacgatcaatgtggacggcatgtccacggatgtgacggattccgttgtgccggtgttatatgatgccgacggcaatgtgattgatacgacaaagctgacgctcagcctgtccacagtcaatatttcagcacagatcttaaataccaaggatgtgccgctggagtttgaggcgaagggcgaaccggcggacggttatgtgctgaccggtgtggaaagcagtctggatactgtgcgcatcaagggcgaggcggcgacgctcaataccgtcagcaagatcaccattccgcaggaggtgctggatatttccggtatcacggaggatctgaccacgacagtggatatcagttcctatctgccgagcgggacgtcccttgtgctgaattcggatgcaaaagtagaagtgatcgcgaaggtggagccggttgtcagtgcaacctacgagataccggcggcaaacttcaccattcagaatgtgcgcgacggttataatgcaaattatctggagagcacggtcgcagtggagatcagcggcgcggagagcgagcttgcgggaatctctgcaaaggatattaccggaacggcagatgcatcgaaccttggtgcgggcgaacatcacctgaatgtggagatcaccctggcgcaggagcactgctgggtgactggaacagtgacgttgccggtgacaattaccgaccacaataccgcagaagcggggactacggatgatgcggatgcgacagacagcgagagcaagataaccgacacagccggcaccgccgctgcaggcgatgcggctgaaaagtcggataaaaccgataagacggataagacagtcactgagaacagtacggctggaagtgatgtggagagaagcagcaacaatccgtaaaaagtaagaaacatggaggaaacagaatatggctagaatgtttggcacggatggcgtgcgcggcgtggcaggatcggaactgacgattgaactggcaaccaagctcgggcaggcaggtgcgtatgtgctgacgaaggagacggagcatcaggcgacaatcattgtcggatgcgataccagaatatcgggaggaatgcttgccagcgcattgatggcgggaatctgttccgttggtgcaaacgccatttttgttggcgttatgccgacgccggcgattgcctatctgacaaggaaacataaagtagatgcgggtgttgtgatctctgcatcacacaatccgatggaatttaacggcatcaaatttttcaacggggagggctacaagcttcccgatgcactggaggatgagattgaagcactgatccgcaataacatgaaggacgtggtgcttccgatcggatccggcgtgggaaagatcgaataccgttttgacctgaaagacgaatatgtgaaatttatggaaaaatgtgttccggtcgatctgcacggcaagaagatcgtggtggactgcgcggagggcgcgtcgtattacacatccgtcaaggcgctcagcgatcttggcgcggaactggtggcgattcacactgaaccggacggcaccaacatcaatgcaaactgcggctctacccatatggatgagttgaaagcgcgtgttgtgtacgagaaggcggatgccggtatcgcgtttgacggcgatgcggaccgtatgcttgcggtcgacgaaaaaggcaatctggtagacggcgatcaggtgatggcaatctgcggcaactacatgaagcagaagggcagactgaagaagaatacgattgttgtgacgatcatgagcaatctgggattcactctgatgggagaaaaagagggaatccatgtagagaaaacaaaagtcggagaccggtatgttctggagaacatgagggaacacggatacaatatcggaggtgagcagtccggacacgttattttcctggatgacaatacgaccggagatgggcttttgagcgccctgcatcttctggaagtgatggtggacaccggaaagccgttgtcagagctggcagcgatcatggaggttctgccgcaggcgcttgtcaatgccaaggtgccgaatcacaaaaaagagcattttatggagtatccggagattgcagatgcaatcgcggaactggagaaaaagtttaacggtgagggacgcgtgctgatccggccgtccggtaccgagccgttggtgcgcgttatgattgaggggaaagatcagaaagtcattgacgaggaagcgaagagacttgcggaattgattacgcgcattatgttgtagagtcagaggatttgttaggaaaattattcattggagggaagagagcatggtaagtcagaaagtcacagtcaagaatccaacgggactgcatcttagaccggcgggaatcctgtgcaaggaggcgatgcagttcaaatcgcacatcacattccgataccgcgagaatactgcaaatgccaagagcgtgttgagtgtgctcggtgcatgcatcaaatcgggcgatgagattgagctggtatgcgagggggaagacgaacaggaagcgcttgcggcgcttgtgaatgccattgagaacggacttggagaatagaagagtaagagaggaaaaccggatgaaaaagatactggttaccggctgtaacggtcagctggggcgcgcaatccgcgcagagtatgcaaaggaagacgtaacgtttatcaacacagatgtggtggagggcgatggtgtcacagcgcttgacatcgccgatgtggatgccgtgctggcacttgtccgcgccgagcgtccgcaggttatcatcaactgtgcggcgcacacgaatgtggatgcctgtgagacacagtgggatgcggcgtaccgcatcaacgcgatcggtccacgcaacctggccatcgctgctgcggaagttgacgcaaagctgatacatgtgtccacggattatgtgttcgccggaaacggaacgagaccgtatacggagttcgatgagccgggaccggtcagtgcatacggcaaaacaaagcttgagggagaacgcttcgtgaaggcgttcacgagaaagtattttatcttccgcacggcatggctgtacggggacggcaaaaattttgccaaaacgatgttgcgactcgcagagaaccatgaggaagtgagcgtggtatgcgatcaactcggttcgccgactagtgcagtggaacttgcacgtgcgattcatcactatgaaccgacggagaattacggactgttccatgcaacctgcgagggggataccaactgggcggcatttgcggaggcagtgtttgcgcgtgcagggaagaatacccgcgttagacatgtgacaagtgaggagtatgcggcaatgaatcctgcttcggcgaagagaccggcgtattccattctggataattacatgatgcgcctgacggacggctatcgtatggctgactgggagagcgcgctggatgaatatatgcagcatttgggctgagagagataccgacagaaaagtgaaaggataaccggaacagatgaagagtgttgtaatgcgggatttgcgtgactatgtgaggaaatactgggggctgctcgctgcgtcaatggcggcaatgctgatctgtttcggttatcttgttttttgcggcaacatccgcattgatacggaagagttaatcaaccatccgggaagcagtctgggatggcttgcgatcggacggtgggagctggcgtggctcaagcaccttctggggcttggaacacatcaggttataaaaagcgggatcctgttcttcctgtttttctggctgggagccaatcttctgacgttcggcatttatgagcgctccgggaaaaagaaaagccggtactggattttcctgctcctctatgtgacgtccaacatctggtgctatcagatttatttttccctgcagcaggcggaagtggcgtttgcaatgctgctgttgattgaggcggcattcctgatgagcgggatcggcgccggaaccgtaacgaatctgctccgggcttttgcggcgggtgttctgttatttatcggtctgggatcgtatcaggcgctggcggtttactacatcgcagtgtgcctcgttttcttcctggcggagctgactgcggagcgggagcagggcggatatctccggcagattctctggatgatcgtacatttcggtgtggtgtatctgtgctatcactggtatatgagcacgtttctggtgtcttcggattatatggacagccagatgggctggggaagactgcctgcgctcgcatgtatcaagaatgtgctgcgcacgctgaaaaatctgctgctcggacatggccccagaaatttttcgttctacggatgcggcgtggtgcttctgcttgtgctggcgggaagtgtgcttgcctgccggaaaaaacaggaacttccgtgggagaagaagaaaatccggtattcattgcttggactggcgggactggtgcttgcgccgctgcttctgacggcatacatgggagagatgatcgtgacgagatcacagtttgcgcttccggtggcgggagcgttcctgggaatgtatgtgacggagcggcttgcggaactctggaacggcagagaccgcggtacgggttactggctgctgctcgtctgcagattgtgcatctgccttgtgattgcggtccagaccggctatgatctgcgccttgccgtgaccgatgagatacgatgcagggaggatgagcagaaaacccagcagctgttagagcgcctcgccggggcagacggaggggaactgctgcagcttccggtggtgtttgtgggctatcaggaggcagatctcccggagtggtgcaggcggaccgagatgtatggctggtcgttctacggttgggattacagtatggagaacccgaccggagcgacacaccgtatttgcggttttgtacaggcttacaccgggaacgtgctgcgggaggatgcaacggaagagcagaagagacacgcggtggaactggcgggacagatgaagaatttcccggaagagggatcggttcttgtgacggaggattgtgttgtggtacggctgtcggaggttaaggagcagatgccgacagactggtggtagaggtgaaacggcggtctgtgtatacaagcttgtgttggaacggaatctatgataaaatgaagggacttatggcaacaaagttgtactgaattgagatagaaagcattggagataatggaggttaatatgagaacttatttggtaacggggggagccggttttatcggttccaattacattcactacatgttccgcaaatacggagatacgatccgcatcatcaatgtggatgtcctcacgtatgcgggaaatcttgagaacctgaaggacattgagaacaatccaaattatacgtttattcgggcggacattacggataaggaagccattgcgaagattttcgcggagaacgacattgaccgtgtggttcacttcgctgcagagagccatgtagaccgcagtatcaagaatccggaggtcttcgtgaagacgaacgtgctcggaacggcagtgatgttaaactgcgccaaggcggcatgggaacttccggacggaacatttaaggcggacaagaagtttttacacgtatcgacggatgaggtgtacggctccctggaggatgacggatcttatttttatgagacgactccgtacgcaccacacagcccgtattcagccagcaaggcatcctcagatatgttggtaaaggcatacattgatacttacaagttcccggcgaacatcacaaactgctccaacaattacggaccgtaccagttcccggagaagctgatcccgctgatcatcaacaatgcactgcagggcaagaagcttccggtgtacggcgacggtaagaatgtgcgtgactggctgtatgtcgacgatcatgcgaagggcatcgacatggtgcaggaaaaaggacgcctcggtgagacttacaacatcggaggacacaacgaaaaacagaatatccagattattgagattattattgataccttacaggagatgcttccggcggacgatccgagaagaaagctggtaagcaaagatctgatcacttacgtggcagaccgcaagggacatgacagacgctatgcaattgcaccagacaagatcaaggcagaggtaggctgggagccggagacaaagttcgaggacggcatccgcaagacgatcgcgtggtttttcgagcacgaggactggatgaagaatgttaccagcggtgattatcagaaatattatgaggatatgtatcagaacagatagttgatgcaggcagcagtaccgccttttgggcgatactgcttgtttgcgttttaaattaagaaaaaattaagctgtgtccgttacaaatgttaatggacgtggcgtatattggataaaatgggaggattttcagatgaagggaataatacttgccggaggctccggtaccagactttatccgctgactaaagcgatttcaaaacagatcatgccggtgtatgacaagccgatgatctactatccattatcaacgttgatgcttgcgggaatccgcgaggtgttaatcatctccacaccgcgggatctgccggtgtttgaggagcttttcggagacggaagccagctcggcatgagtttttcctatgcagtacaggagcagccgagaggtctcgcggacgcatttatcatcggtgaaaaatttatcggaaatgatgcggtggcactggtgctcggcgataatattttctacggacagagcttttccaaagtgttaaagagcgcagcggagcgcacggaaaaggagcagggtgcgacgatcttcggctactatgtcagagatccgagagagtacggcgtcgtggaattcgatgagaatggcaaggcgctgtccatcgaggaaaagccggagcacccgaagtccaattatgcagtgccgggactttacttttacgataacaatgtggtggagattgcgaaaaacgtcaagccgtccgcacgcggggagatcgagatcacctcggtcaacaacgcttatctggagcgtggaacattgagcgtggagacgcttggaagaggattcgcatggctggatacgggaaatcacgacatgctgcttgccgcggcagattttgtgtctgcattccagaaacgtcagggcttatacatctcctgcattgaggagatcgcgtataagcgtggttttatcgacagagaccagctcatcaagctggcacagccgctcttaaagacggattacggcaaatatctgatggaaatcgcggagggattatagaacatgggtaagatcaaggtaacagagaattgcaacggcattgagggactgaaggtcatcgagccggcagtattcggcgatgcgcgcggatattttatggagacttacaattataacgattttgcggaggcggggattgactgccagttcgtgcaggacaaccagtcagcatcgaaaaagggcgtgctccgcgggcttcattttcagatcaattatccgcaggacaagctggtccgtgtggtaaacggcgaggtgtttgacgttgcggtggatttaagggagggatcgaagacgttcggcaaatggtacggcgtgctgctttccgcggagaacaagaagcagtttttcgtgccgaagaattttgcgcacggatttatcgtgctgtcggaggaggcagagttctgctacaaggtaacggacttctaccatccgaacgatgagggcggtattctgtggaatgatgccgaggtcggcgtggaatggccgatgccggaaggaatgacagcggcggatctgatcttatccgacaaggataaagtgcagaaaagcttcgcagaatataaggcggcgcacggcataaagtaaggaaaaacatgcgcctgcagagggatagaaagagattaggagaacatagatggcaggaaagaagaaggatacatcactgcttcatcatctgatcggaagtagaagcctggtatggaatctggcaaaaaatgacatcaagaagaagtttgcaggctcctactttggtgtggtctgggcgttcgtccagccggtaatcacggtgcttttgtactggttcgtgtttgagaagggactgaattccaaggcgacggatcttaggaccggaattgagattccattcgtgctgtggctgacagcgggacttgtgccgtggttctattttcaggaagcgctaaacggcggcaccggtgttctggtggagtacagctatctggtaaaaaaagttgtgttccagatcgatatgctcccagtggtaaaaatgatatcggcgctgtttacgcatctgttttttgtggcgtttacgattgtgcttttcatctgtatgggatatatgccggactggtatgcgctgcaggtcatatattattctttctgtatgattctgtttgcgacagggcttgtgtatgcgacgagtgcggtgacggtatttttccgcgacatgaaagaagtggtgggaatcctgttgcagattggcatgtgggtgacgccgattatgtggaactttgagacgatggtgcagataccgggatgggcgattgccgtgttaaagctcaatccgatgtactatattgtttcgggataccggaacgcgctgatcaatcatatcggattctgggaggatatggggcttaccgtatatttctgggttgtgacggcagtgctactgtttctcggaacgactgtgttcaagaagctgcgaccgcattttgcggatgtattatagagaggaatttgtaactgaatggatgagttagcaatcagggtagaagatgtcagcaaggtataccggctatacaacagaccctcggagcggctgtttgacgcactggggcttgcgggaaaaggcagattcaaagaacatcgggcactcgaccatgtcacgttcgatgtgaaaaaaggtgagacggtcggaatcatcggaacgaacggctccggcaaatccaccatcttaaaaattatcacaggcgtgctctcacccacaagcggtgaggtcgagatcgacggaagaatctcggcgctgctggaacttggcgcaggctttaacatggaatacaccggcatcgaaaacgtatatctcaacggcatgatgatgggattctccagggaggagatggatgcaaggctggacgatattctgaaatttgcggatatcggcgaatttgtaaaccagccgtgcaagacgtattccagcggtatgtttgtgcgtctggcgtttgcggtggcgatcaacattgatccggagatcctcattgtcgatgaggcgctgtcggtcggagacgtgtttttccaggcaaaatgttataaaaagttcgaggatttcaaggcggagggcaagacgatcatctttgtcagccatgacatcagcagtgtggcaaaatactgtgaccgcgtgatcctcctaaacaagggcgtcaagctgtcggagggaaatcccaaggacacgatcaatctgtacaagaaagtgctgttaaatcagtcgcagaatattgcgagcggacaggtgcttgcggacgcgaaagaagacgggacaaagaaactgtggaagtccaactacgagctgaacccgcaggtgaatgaatacgggaccggggaagcggaaatcattgattttgcggtgattgacgagtatggaagctatacgggctgtatccagaaggggacatcttttatcatccgctcaaaggtgcagttccacaccgatattcaggacccgatttttacctatacgtttaagaccgtgcagggaaccgctgtcacgggaacgaacaccatgtacgagaaagtcggcgtcggactggcacgggcgggagagatctacgtggcctccttcaaacagaatatggatctgcagggaggcgagtatctgctgtccatcagctgtaccggctacgtgggaggcgtgttccgggcgtaccaccggctgtatgatgtggtgggcgttacggtcatatcggacaagaatacggttggtttctatgatatgaattcggagacgaccgtggagcgtgtggaggaatagaatataccacagagagatggaggaaaaaggatggagaatgcacagattctgacagaattgtatgaagttataaaacagaatacaccggatcagtatgccagaatcatcagagagcgggcatcctactcttttttgtaccatttgtcggaaattcgtcagaacctgattggctggctgccgattgacgcgacgaagcgtgtacttgagtgtaatccagagtgtggagcgcttacaggaaagcttctttccatggcaaaggaagtagtttgtctgataacggatgacagacaggaacagattctctctgcacggtttgcaacggacagccgcgatgggcgtcttattttcacacgggagattccgacagaaacgcagtcatttgatgtaattcttattgcgggaagtttctaccggtggcagaatcagttgacagatctgagaaatctactttgtagggatgggtacctctaccttgcagatgcgaatcgtatcgggctaaaatatcttgcagggtgtcaggaagagtatgtgggcggctattttacagggattaatggttattctaatatagattgcgtggagaattctggaaggtcatatacccgcagtgagtatcagagactacttacacaggcgggctttgatgatttgaaatggtattatccctatccggatcacaagtttccgtccgtgatctactcggatgactggctgcccgccgcgggagaacttgcagaggggcgaagtaactatgacagggacagggtcgcatgttttgacgagcgcgtaatggcagataccctgttggcagaaggtgtgtatggaacatttgccaattcatttctgattgtggcagggcaggagggatagagcggttggatagaacgatttattccaaatattccaatgagcgggcagaacgattccgcatccggacagacattgtgttagatgttgccggaagaaaaacagtatataaatatgccggaacgaaggcggcggatccgcatgtacggcggatagaagagtgcttccggcagctgcaggaagcctatcgcggcagtcggatccgtttttgcccctgtgaagtggaagaattacaggcgggaagccgggtcagctctccgtttgtgaggggggagaccttacagagcatgatcgagcgcagtttccggcagggcgactggagtacagtagagacaatcatacgtctgtatggcagacgcttgatggaggcggggggagacagcccgtttactgtgacggaggaattccggaatgtttttggtccggcaggacaggagaatgcgtacatctgtgcggatgtgagtgatgtggatatgatcttttccaatatcttcgtggaggcggggaatggcgggacggttttggatgtatcggcagactggactgttattgactacgagtggacatttccatttccggttcccaagaagtttgttctctatcgtgccatctattttgcttattaccagattttcaaggctcagggaagagacctttcggagtggcttgcgatggtggacattaccagggaagaagcggcacagtttgcagaatgggagacacattttcaggagtatctgctggaaggaggttttccggtgcgcaatatgcagcgcattatgggaacaaaagtcataccgtttgaagagcttcttgccggagagcagaccacagacggagaagtggtgaaagaatcccgatggatccgggtgcgcaggctgctgtatcatatcgaccgactggaacggcaggatgggagtgtgatctgcagtggatgggcactggcaaaatgtctggacggaaggtgcattccggttaatatccggatatatggtccggatgaaaagcagattcgggcagatgtaacccggagtgaccgggcagatgtggcagaagcgttaaagcttcggcgtgtggatcgcccacagtttgggtttgactgtgtgtggattctgccggcaggacagaaatggagtattcatttttccatgggaaaccgtgagatcatctatgagggataaagtgaggaattgatatgtaccaatcaaaagaaaagatccagacagtggtgttgtttctggcggatctggtatgttttgtcatcagctatttcttcggaggttatctatggctggtgcgttaccggaatgtgtcggtaataaatatgaagaccgagctgatggaaagcttcggagtggtaatggtcatctacatgctggtgcttctgttttcggacattgagaagaattttatacgacggaacctggcaagggattttatggcggcagtggaagccagcgtagtcatgatctttgtgacggcactgacaatttttttgcagcacaataatgcagatgcttcccgtggagtgtatttctgtattgcagtggttaatctgatactgttttttataacccatgccgcgatcaagtattaccttctaaagatctataggaataaaagaggaaccagccagatttttctggtcacaactgtggaccgtgtgctggatacactgacagagatcgaaaatgcgaaggactgggcacaccgcctgaccggaatcgcggtcattgatgacaatcagattggcagatggtatgagggaattccggtcgtggcaacttacgataccatgtaccagtatgtgaaggaacagattgtggatgaagtatttatcaatgtaccttacgatacgggggaatcactggcagaggttgtcaataattttgaaaatatgggagcaacggttcatataacgatcgaactgctgcgtcattttgatgagtatcataagagttttaatatgatgggcaatgtacccgtcgtaacattttccaatcagtattacgactggaaaatgttatttgtcaagcgtctgatggatatcgcaggagcgattgtcggactggcaatcacagcagtcgtaacagtatttctggcaccgccgcttttgatcgagtcaccgggaccgctgttttttgcacagaagcgggtcgggaggaatggtcggtttttcaagatctataagttccgctccatgtacagggatgcggaggagcgcaagaaagaactggagagtcagaatgaaatgaacggctttatgttcaagatgaaagatgatccgcgtatcacgaaagtgggaaaatttatcaggaagaccagcattgatgaactgccgcaattctacaatgtattaaagggcgatatgagtctggtgggaacaagaccaccgacagtggatgagttccggcagtacgaatctcatcagaagcgcagactgagtgcaaagcctggaattacaggactttggcaggtgagtggaagaaatgaaatcaaagattttgaagatgtcgtaaaactggatgtgcagtatatcgacaactggagtattggattggatatcaaaatcatactaaagacgatcaaggttgtatttgaaaaaggtggagaataaggaggcagaatcatatgaaccagaagtatcagttagacagggaatacagtatagcggagattattcaatgtaatctacgaagatggtggcttgcattgatctgtgcagtggtgtgtgcagtagtccttggtggatataagtacaaatctctcgagccgtatctggagcagaatatttatgagaacgtcagacaggttgtggcaaccttatatgtgcagacgtacagtgatgagagttccactgagcgtgcaaataatctcattcgtatcgcggaaagcaaccgtacctttgaaaaggtaaaagaaaaacttggctgtgatattgactataagacttatcaggccctgtttcggatggcgcaggaagagacaggagatattgtgctgctctatttacagtatccgattgatacaggagatttcagtattgcagaggaagaggatgccattgtgtttgcacaggcagttctggatgcaacagcagagagtgcaacagaacttaacggacaggagtgcttttctgtgatcgatgcaccgtatgcaagtcaggagaataaaaaggtagagaactactttatttctgaggacgatttcaaccgtggtgtgatgaagggactggttgccggatttttattgggaattattgcagaagtggcattatactctttttggcttgtgttatatagaaaaccaaagagtgctgaggaggtatgccagattctggacgtgccggtgattgatgatgtgaaaacacgaaaggtcagtgaggaggaagtatacaaaaaggtttctttattcttacgaaagcatacgaaagaaagaacaaacggatgcatgcgcattaattgcattccgattggaaccgtgaggagagacgctgctttaaagcttgcattcagctgcgcaaatgagcagaagaaaacactttttatagatctggctatcgatgcagagggaaaagatgcgaaaaattcaattagtcaatatattctcggggagagcggagagccggtaccgagtgcattgaatggttatctggatactatatgtcgtgatacggcagaggaaaagaattttgatgttgtgatgcatgaaaaattcgctgcttatttaaacgagatgagcaaaaaatatgattatattgttattaacagcccaaatgcaggagcaagtgcagatgcttatgcggcttccaggctttgcaacagtagttttgtcgtatgcacaagaagcggtgtggacaatgagatgctgtgtcgcctgaagaatacggcagatgcgcaggaaatcacaattgaaggggttctggtatatgaagggtagtgacgttctctatctgagttgtgcactgctttttgtcccggtgctgatcggcagtttctgggtacacttgttgcagcttgagggaacggtaaaccggtttctgcatgcctgggtgctcggctttacgaccatgctggctgtggcacagctgctgctggttccgatggtggcattgcagcgcacattgtacgaagcggttatgctgtggaaaatcttgctggaggtgctctcggtgatttccctgatcctgctctgtggcagggaattccagaaaagcggaaaacgggatgaccggggaaaacggcagaagatgacagcgtggacggctgtaattggcattgctgcggtggtgttgatcctgttacaggcatatatcccggcgagatatcagcacagtgatgatgatgatgcgaggtttattgcggaggaagtatcggcggtagtacatgggagcatgtaccgcgaggatacgatcacggcagattttatgtactgggataccggggaggtgcgcaaggatctgacctcaccgtggacgatgttcgtggcaatgatggcatacgatggaggaatcgctccggcggtactttcccatgcatatctgccgtttttcctgatccttctgtgctatgcactctatacactgatcgggcagaaactgtttgacggtgactgggaaaagacaggcgtttttctgatcctgctgtcagtgattcatctgtgggggtatacatcgacgcatacgctggcatcgatgattctacttcggatctggcagggaaaggcagtctgcgccggttttatgatcccgctgtttttctatctgttttatcgtgtgatgagaccggactatgagaaaagatggctgcccctgttttatgtggcagctgtgggagcctgtctgctgtcgggagtcggaattatcacgacaccgattctgcttggaatctacggttttgtggatttctgctgtcacagggactggagaaagacgcttatgatttttctggcagcagttccgtgtggaatgtatctattgtactatttgaggtaagagaaaatgatgacatacatgttgggtgtctggggagaatttctgaacttcatagggggaagagtgggcgctattcactttgtattgtttgcagcggcatcactctgctgttttttccttggaaaggaagaacggaataagctgttctggccatcggtgcttgtaggtctgtttttctttaatccggttttttatcggtatattggcacccggtttttaagtggcatctactggcgactactctggatgctcccctgctctttcgtgattgcctacacattgacgaggattctgttccggtttcggaaaaacgtatggcgcatggtggcactggtgctggcgtgtgtctgtattgcagtgaacggacgcccggtcttatcggcagagacttactcggagagagagaatctttatgaacttccggatgcagtgatgggaatctgcgattatgtgcaggcacatctggagggatggcaggagacaatgattgtcccgaatgaactgctctgtgatatcaggcagtattcttcggccgcatgtcttttatatggaaggaatgccggcggatttatctcgatcatcggcgatcgggagatgcaggtctatgaggagatgtcgaaagagaacccggatgtggaactgattacggacattgcgaaggaaacgaactgcagatacattgtatttaatacgtcatttcatcagataccggaagatttgcgcggctatgggtatgagaaagtcgctgtgatcgatgagaactatgccatgtattgcagaatcagcgaataagcagcagggatatgaggaaggcagtcagacaatatggaaaaaataaaaacgattttacggacaagtgactgggaaaaagtcggcattgcagctttttatggatattttgcgatcaatatcctcatgaaggcatttgcctatgatcatggggatgatatctacaagtttttctttatttttgccatgacattctgggcaatcaaggttgtcacgacaaagtataccatacgtgagactgcatggattgcggtgttgctggggatcggtctgatgctctcggttatcaccaaacagaatacgtggctgttgttgtttatgacgatcatcgccatgaaaaactgtagtttccggcagatgatccagattgctgtctatctgcgcgtgttttgtctgtttgttctggtgctgggctcggcatttggtgtgtttgacatcggatttaagacgacaccggataccaattatgtggagattccggtgtacagttttgccatgaacgaaccgaatacggcatttctggcagtctttttgacaatactgcttttgttatactataattatgaaaaattaaatctctggtggttcatcggaacttcagctgtggcgctgatcttctatgaactcacgttctgccggacaggaatcgcagtatttttctttacttgggcactgatcatttttgagaagattgcaaaggacaggtataaagtaatttttacgctttctgtcccggtaggagccatcttcagccttctggtgatgattttttatgacggcggcaattcgtttatgcatctgttaaatcatctggtatcgggaagaagctatattatgagcagttactataaggcacagggtgtttctctgtttccgagggtacaggaactcttttacggagagtattatggactgatcgataatacttatatgtatgtattcctgtattgcggcgggcttgttgcagtattcttctttgtattggtgcagaagacactgatgcgtctttatcgtgagggacattataaagaattggctatgatcacggcatttgcactctatggagtgttagagcagtttgtaatgaacggttttatgaatccgttcattcttctgtgtggaattctgctgtatccggatattctggaccagaacactgcgggcatagagaaatgaggaagatatgaaaaattaccggattttacagatacacaatttttatcagatcccgggcggagaagatgtcgttgtacgcaatgaaaaacgtctgctggaagagcatgggcacaaagtctacacctattaccgttccaacagtgaactgaatgaaaagggaattgctggaaagctgttattgccgtttacagcagtcttttccttgaaaacatatcgtgaggtaaaaaggctgatccgtgagaacaacattgacatcgtacatgtgcacaatacgcttacgatggtcagcccgtcagtgttctatgcggcattccgctgtagggttccggtcgtacagacactgcacaattttcgtatgctctgtccggcgggttcctttttccgggataatgtcatctgcgaggagtgcgtggcacatggaatgcactgcgcgatccgtcacaaatgctaccgcaacagcaagttgcagtcttttgtcagtgcggcgatcttacagattcaccggtttgtggggacataccggaaagtcaattttatctgtctgacggagttcaaccggaaaaagctgctggagtccctggataccagacgcgagattgtaaaggcagaccgcgtctacatcaagccgaactttacctttgcagaagagattgtgccgaatgaagtacaggcagaggaggaatatttcctgtttgccggtcgtgtggaggcactaaagggcattgatattgcagtaaaagcatttgaaaaactgccggataaaaaactctatgtggcgggaaacggaccgatgatggaagagatgcagacttatgtcaaggagcatcatatggacaatgttaaattccttggatatctgcagaaggaggagatgtccgagaaattctatcaggcgaaggcggtcatcatgacatcgcagtgttatgaggcgtttgcgatgaccattgctgaggcatattcttatggtgttccggtaatcgcgggcagggtcgggaatatggaaggtatggtaaaggatgggattacgggcgtgaagtttacctataattcatcggaggatctggcagagaaggtcagaaaatttgacacgatggatctgtctgtgctcaagaaaaatgcgagatctttttacgctgacaggctgcgcccggaggataattaccagaaactaataaagatctatgaggatatatcaaaatgataaaagctgtatttatcaccaatattccatctccgtatcgtgtggatttttttgtatacttgcaggagcattatccggaatatgagtttcatgttattttttccggtgcaggaatggagaaccggaagtggagtgtggaacttgccgaactgaaaaatgcacattttttaaagtcaaagacgatcatcatccgcaaacgttttgatgaccggtatatatttcttccggtcggcgtggaaaagacactacaggagatccatccggatctcgtgtttgccatggagtataatccgacgatcctgcgagcggtgcactggtgtcagaaaaaaaagattccgtttatcagctggacagacggtacattaaattccgaaaaaaatatcggaaaggtgcagcgtatgtcccgcagttatattataaagcgtgcggcagcgtttgtggcgagcagtacggcatcgagacaggcgcagattgcttatggggcagatgaaaaaaaatgtttcatttcctatctcacggtggatattcagaaatatctgcagaagaaaacggagtatggtggaagagaacttttgtatgtgggcagtctgattcagagaaaaggactggatctgctgtttccggcacttgcacagaccagggaggatatctgccttacgatcgtaggtgaagggcaggagaaggaagcactgatggaacaggcaaaaaagcttgggatcacatcccgcatccgctttctgggatatgttgagggagaaccgctgcgggagctttaccataatgcagatgtatttatcctgccgaccagagaagattgctttggactggtgatcctggaagcaatgtgtgcgtctcttcctgtaatctcatcaaaatatgcggacggtgcgtttgacctggtacaggaaggagaaaacggctgtattatagacccggaagacacggctgcttttgcagcgaagattgatcagatttttgcggatgaaaagcggcttgcagagatgggacagaaaagctatgagttcgcgcacgcattttctttccaggaagtggcaaagggatgtattgatgcactgcattatgtaacaggaaaggcatgagcatgaagaagattttatttaacggacttggtaaccgcggatggattggtggtctgtactatctgaaaaatattatattcagctgtctgcagagtgaagagatcacaaagaaataccggattgtggtactgattgatccggaacatgcggatatttttacctgttttggaaaccggattgatctgcgcatctatgacgggacgaacaaggtgaagctggcactttatgagatgaacctgatctggctgcacggcgtgaagtattgctacgcactggaactcaaccgcatcggcagtctgtttgcttccagagggatcttctggataccggatttccagcataagacgctgccggagttttttaagccggaggagctggcaagaaaagatgtcacggaccgcagaatgacggaactttccaatccgctcgtgcttagcagtgaggatgcaaagaatgatctggagcggttttatccggaacatcagtgtaaggtgcaggtcatacattttgtttcctacattgagccggaactgcgtgccatcacgccaaagctggagcacgaggtagcggaaaaattcgggctgcagagaaaatatatctatctgccgaaccagttctggaaacacaaaaatcatgtggtggcggtaaaagcgattgaactgttaaaaaagcaggggcttctggcagattatgattttgtatttacgggaaatcttaaggattaccgcaacccggaatatatcgatgaattaaagaagatcatggaggcacagccggtggcaggcagtatcaaactgcttggttttgtggagcgcacggagcagctttgcattatgaaaaatgctgcctttatcgtgcagccatctttatgtgagggatggggaacggtactggaagatgccaaggtactggataaggcagtgctgctgtcggatattc

SEQ ID NO: 11527 - DNA, 4017 bp, Unknown
  gut microbiota DNA sequence
atgcgcttaaaaacagtgcaggaatggagaggtggtttatggcgtataatcttgaaaagttcaaaaaaggcctggatgatttgcagatccatctggacgaaaaacagatgggacaatttctaacctattatgaacttctggtagaaacgaataaagttatgaacctgaccgctatcacagagtttgacgaagtaattgagaagcattttcttgacagcctttcgttgtgtcgtgtgaaggatttaagaagtatcgaagatcggccggagacatatcggattctggatcttgggacgggggcaggttttccgggaattcctttaaagattgcttttccgaaacttcagattgtattggcagattcactgaataagagaatccgtttcttacaggaggtcattgatacactcggattggaagatgtgactgctgttcatggaagagcagaggagatgggtagaaatacattatatcgggaacagtttgacctatgcgtgtcccgtgccgtggcaaatttatcctctctcagtgagtattgtcttccatttgtgaagaccggtggggcatttatttcctataaatcaggagaggtggatgaggaagctacacaggcaaagagagcgatttatcttctgggcggtgaagtgaaggatatttacaaatttgatttgtttgatcagaagcgttcgtttgttgtgattgaaaaggagcggaagacgccgaaagcttatccaagaaaagccggcacaccgacaaaagaaccgctgcagtaacaaaaaagagagataatgcgatggatccttgatccggtcgtgtcatctctcttttgattttatgaagtatttgattgtataaggtatgacgttacattagtgatcttcatgtaaaaacatccgcatgatgttcagaagcttatccggtacttcaagctgcggggttagacctgcatttgaaatataggcggtttcgacagccgcgtttttgtgtgcataagaatctgcaatggcaactgcatctgtcatggaacggctttcaataatatacagtggaacggtaagctttttcacggcatgtccgattgcattgtcggtgtaatgtccctcgatgcttgccatcagatattttccgtggctctttcccatgtgcgatgcctcatagtaggcatcaagcatcttgctggatacaagctgcggtctgctaaaatatgttttctgcagtgtccgccggatattggattcgtgtgtccggacattgtagagaaatgttcccaagatcggcagctccagcagtgtctttttgacagaggaatacttgtccggtgtgcggtcaaagctgctcatcgcaggcggattgatcgcagtgatgcttgcgagaagattcggattcatattctgggcaagtaccgcaaatgagatggaattgcctgtcgtcacaacatccgggcgttccccgatcacatcatgaataaaatctgtgagaagctgtacatacaggtaattggtataagtcagataaggcttgtccgagcggccgcatcccaacaggtctatggtatataccgtatagtgcttctcaagctttttcgcaagtctgcaccattcataagaagaagcaatcggatttaattcgtgaatgagaaggagcggagaaccggagccgcgcttggtataaaaaatactgccgttcttccagtgatagtagctgccgctttccgtctttaaaatatttttcatctctgctgtcatatcgatgaagcggttcacaagatgaatcgtgcctgcagcaagagcagtcagcagaaagaaatgtctgatattctttttcatgctattgttcatagaacctcccgtaatctttgcaaaacgtttcctattacttatattatagccgctttccataacttatacaaattaaaaattctgaaaatataaatttttgcttttcattgaattacgtttggtataaaataatactggtaatttggtttttaatatcaaacatatgttcggtggcgaaatggtagaagaatatattcagaaaatttatgaggaacttttaaaagaggagcagaacagtgcgaagcggatttctgatttacagattcatttgaaagagacgcaggcaatgatccatttgcttgaggagacgaatgatcctaattatgagtcgtttactccaagaaaagtaaattccaggaataagcagaaaatcgatgaattgcatgcagagatgaaagaactcgaggaagcaattcagcaggagacagactaccatacgcagcagatggaaagagtggaagaagcggcgaaggtattgcggcaggcgaaagcagatgttgcatgcaggtgtgacagaaatacacttgaggaagaaaggtaccatacgtctctccttgaaacgcaggagaatgagagacagcgcatttcacgcgaacttcatgacagtaccgttcagaatcttacggcaatggttcacatggcagaactgtgcagtaaactggtggatatggatccgatccggtgtaagttggaactcagtaagatgatcaagaatctcagggagatcatcgatgataccagaaagatgatttataacctgcgccctatgtcttttgatgatattggtctggatattacaatcgagagaactttggacaagctggaagcaaccggcacgaagaagattcattttgtagtggaaggaactccttatcaattaaaaccgattatcgggataacgttacttagaattattcaggaggcatgcagcaatgcgatctgtcatgcaaacccgactttgatacatgttctgttaagatacgagcaaggggctatcacggtaatagtcgaggatgatggaacaggatttgatgttcatattctggatgagcgtccaagggatgataattctgggtttggaatgtctatgatgaaagaacgagtatatttattatccggttcgatacagattgactctaagatcggtgttggaacaaaaattatagtgaaagtacctattagtaacaaggaggagttttaaatggcagtaaaagtaatgattacagatgatcattcattgattcgcgaaggattaaagcagctgttggaactggaaggagactttcaggtaattgcagaggcgtgtgatggtattgagtgcatggaaaaattaaaagagcagataccggatgttttgttgctggatatcaatatgccgcgcatgaatggacttgaagttttgcagaagattaaagatgaaaaaatagatgtcaagattcttgttcttaccgtacataatgaagtagagtatttattgaaagcagtggacatcggaatcaatggttatctgttgaaagactccgagtcttctgaattgaaaaaagcaatcttatctgttgttgatggagaagattacatacagccgagtctgattcctgtattgaatgcaaaaatgattgaccgggatatggacagtgagaagattgaaaaactgacgaagagagaactcgaagtgttgaaacttcttgcggttggaatgtacaataagggagtagctgatgaattgcacatcagtgaacgtactgtgaagaatcatgtatcaagtatttttaaaaagattgatgtttctgatcgtacgcaggcagcggtatttgctattcggaataatttgatttctattcattagtattagagagtataaagattgagtgtttcgggaatcatccggtacactcaattattttatagaaaataatgtttattactacataaaaatattttaaaacgcgtattattggacaaatcatcacaatgtttcacgtgaaacattatataaatgaaatgtttcacacatgttttctacaagattttgtatttataaaaaaacagaaatacaacagtttgaaatcactgtgaaaatgtttcacgtgaaacatttcatacgaactttcctatagaaaagaatatgtaaaagtgttataatgaactctgtcgagttcatattagaagtttcaatgaa

SEQ ID NO: 11528 - DNA, 2119 bp, Unknown
  gut microbiota DNA sequence
actgaagaagattcagtgtccgtttttgtatcatggaaatttttttttgccgcacattttgcgccggaactggcgggaggcttgacaaataggaagtgattgataaaataaggttagtaaaagctaactgaaaaggaggcttgcaaatgaactggagtgtattttacggaatattgataccgtttcttggaacatcgttcggcgcggcgtgcgtgttttttatgaaaaaggagatgggagaccggctgcagcgtatgctgacgggatttgccgcaggcgtgatggtggcggcgtcgatctggagtcttttgattccggcgatggagcaggttgtcgatatgggaaagctggcgtttgtgccggcagtcgcagggttctggtgtgggatcctgtttcttcttctgctcgaccatatcatcccgcatctgcaccgtaacagccagagtgcggagggaccgaagagccagctgaagcgcacgacgatgctcgtgcttgccgtcacattacataatatcccggaaggcatggcggtcggcgttgtgtatgcggggtatctggcgggcagcacccagatttccgcggcggccgcgatggcgctgtcgcttggaatcgcgattcagaatttcccggagggggcgattatttccatgccgcttcgggcggagggaaccggaaagccgaaggcattcttaggaggcgtgctctcggggattgtggagccgatcggggcgattctcacgatcctggcggcgggactgattgtcccggcactgccgtatctgctcagttttgcggcgggggcaatgctctatgtggtcgtggaggaactgattccggagatgtcgcagggagagcactcggatgtcggcacgatattttttgcggtgggattcagcgtcatgatgatgctcgatgtggcgctgggctgacacttttattagaacgggcggatggctttgtgtctgctgggtatgaaaacgccagaaaagattccgaaaaatataccatagaaacaggagtgggaacagatgaaagtatatgaagttggagagcagggaaagccagttctcatgcttttgccgggaaccggctgttactggcgcagcaattttggaaaggtgatcgagccgctggcggagacattccgggtggcgtgcgtctcttacgacgggtttgacgagacggaacagacgcagtttcccacgatgatcgaggagacggcgaagatcgaggaatatattaaggaacactatgacgggaaaatctgtgcggcgtacggctgctcactcggcgggtcattcgttggacttatggcagcacgcggagtgattcatatggattatggcattctcggcggttcggatctggatcagtctgcaaaactgccggcgaagctgatgacagccctgatgctgccgatgatttatccgtttcttacgaccggcagatttcggcttccgtttttaaaccgtaagctggagaagtggcgcaaggcgggagacggatatgtggatgcgtttatcggcatgatgcgcggcgccggtgtggatctctcctttatcacaaaggagagcctgcgcaatcagttttattcggatctgattacgccgctgccggatgcgatcgatccggcgggcaccgagatccacattttatatgccttaaagatgggagaaaaataccgggcgcgttatcacaggcattttgcgcacccggtactgcatgaactggacatgcagcatgaggagcttcttgcagtacatccgaaggaatgggtggagctgatagaggatatatgcagacagaagtaatacggaggaagaacagcaatggaaaaaattgtggtaaaagtggatggcatgcagtgcggaatgtgcgaggcacatgtgaatgaggcagtgagagctgcgtttccggtgaagaaggtaacctcttcccatgcaaaaggggagactgtcattctgaccgaacaggacatcgatgatgcaaagttaaaggaagtcattgacaagaccggctatgagatgggaactgtgacgagagaaccttatgaaaagaagggacttttttccgcattccgtcatgaaaagtaagaaaaaggatgtctggatagagcgcc

SEQ ID NO: 11529 - DNA, 7402 bp, Unknown
  gut microbiota DNA sequence
agataaaaaacaaccgcgcaattatatggtgagcggcagacacagaccaaaaagaacagttttttggggaggagaagagtgcagacggaagagattttaagtgccggaattgatattggaacgtcgacgacgcagcttgtgttcagcaggatgattctccagaacacaggcggatttggcagaattccacagatcaaggtggtgtcaaaggaggtcatctacgagagtgagatttattttacaccgctgtcatcccgggaggagattgacggggagcgcgtgcatgagatcataaaaaaggaatatgagaaggcgggtgtttgtccggcagatcttgcaaccggagccgtcatcatcacgggggagacttcacggaaaagaaatgccgagtcggtagtgcgggcgatcgccgatgtggcgggagagttcgtcgtggcgacagcgggagcggatctggagtctgttctggcaggaaaaggtgcgggagccgcggatttgtcccaaaagacggggaagcgggtagtcaatctggatatcggcggcggcacgacaaatatctgcgtttttgagaacggaaatatggttgatacggcatgcctcgacatcggcggcagactgatccgcgtgaaggatggcagggtgacctacatggcgcccaagctgcaatggctgtgcggcaggcttgagattgatcttgcggagggcgggacggcagaactggaaaagctgcgcagactcaccgctgcgatggcggaacttcttgcggaggcagtgcatctggcgccggaggcagcagagctttcctacatgcagaccaaccatcttctggcggatagcacgccgcccgatattgtgatgttctccggcggggtggcggcatgcttcggggaagaggagaatctgttccgctatggggacatcggaatccttttggcgcaggcgatccggaagaacgaagtgttttgccgggcagcagtgacggatgcgcgggaaaccatgcgggcgacggtgatcggcgcgggcaactacagcatgaacatttccggaagtacgattgagtacacgacgaaaccgtttccgttaaaaaatattccggtggtgaagcttccgctggagcgtgaggaagagattgaaaaactgccggaaaacatgcaccgggcgctgctgctttatagggaggatcaggaaaaagaccggcaggtggcgcttgccatgaaggggttaaagtgccctgctttcgcacaggtacaaagaattgcagaactgattgcggatcagtatgtcagggagtgcggcatgggcaggcatctgatcctggtgctcgaggaggatatcggaaaagcaatcgggcaggcgctgcatcacagactgaaagagaagtgcagtgtcatctgcatcgatggaatcagctgtgggagcggagattttattgatctgggtgaaccggttgcgtctggtaacgttattcccgtgatagtaaagacattgatatttaatggttaggagcagcttatgatattaaagacacggatgctggggcagacctatgaatttaaggatgtaaaagatgtgctggcaaaggcgagcgagaaaaaatcgggagacgagctggcaggtgtgggagcggagagcgccttagagcggattgccgctaaggaggtgctggcgcagctgaccgtggcggatttaacagagcatcccgtggtgccctacgaggaggatgcggtgacgcggatcattcaggatgatatcgatgaaacggtctacggcacgatcagggacagaacgatccaggagatgcgggagtggattctctgtgacgccacagaaagcggggcgctgatgcgcgcaagccggggaatgaccagcgaagtgattgccgggatctccaagatcatgagcaatatggatctgattcttgccggaagcaagatccgggtgacggcgacctgcaataccacgatcggaacagaaaacgtgctcgcgtcgagactgcagcccaatcatccggtggatgatgtggaaggcgtggcagccagcaccttagaaggactcagctacggcatcggcgatgccgtcatcgggctgaatccggcgattgatacggtggacagcacgcttgcgatctggaaagtgctcggggacatccgggataaatatgagattccgacacagacctgtgtgctctcacatgtgacaacacagatggaggcgcttagaaccgggcagggaagcgccgatctgtgttttcagtcgattacgggatcggaggcggcgctctcggcgtttggcatcaccaccgggatgctgtcggaggcggagatgctgtttcgggaggagggaccggcaaagggtcccaacgtcatgtattttgagaccgggcagggttcggaactgtcatcctcggcggcgtttggcagcgatcagcagacgatggaatgcagatgttacggtctggcacggcactatcatccgtttctggtgaacacggtggtaggtttcatgggaccggagtatatctacgacaccaagcagctcacaagggcggcgcttgaggacgtcttctgcgggcatctgcacggactgccgatgggctgcgacgtatgttatacgaaccacatgccgaccgatcagaacgactcggagacgatcctgacacttcttggaacggcgggcgttcactatgtgatgggactgccgcaggcggatgatattatgctgatgtatcagtccaccagctatcacgatgtggcaagcatccggcagctgctgaaaaaggagccgataccggagtttaaggcatggcttgaaaaacggggcatctgggaaaacgggcatctcggcccgaacgccggagatccgtccatattctttaaataggaggaacgggatttatgagtgaaaaagagaccgcctgcctccgcgatattacagagacagacattatggaatatatgcaggtggagcacccgcacaatgaaaaggaactctggaagatgaagcatgcgacgcccgcgcggatcgggatcggacggtgcggcgcacgctacacgaccgaggcgcagctccggtttctggcggcacatgcggcggcaaacgacgcggtgttcaatgaagtgccggaggaagtggtaaaggagcttggcgtttttgaggtgcggacaagatgcgccaataaaaacgaaatgctcctccgcccggactggggcagggagtttttgccggatgccagacaaaaaattgtggaaaactgtgtccatcatccgcaggtacagatctatttcggcgacgggctgtgctcgccgtctatcagggcgaacattccggatctgtttccaaccataaaaatgggtctggaggataagggaattaccgtcgggacgccgtttttcgtgcggtattgcagagtgaataccgcgcggacgatcggatcgctcctggatgcggaggtgacctgcgtgctcatcggagagcgcccgggtcttctgacgtcagagagcatgtcggcatatatcgcctaccacgcgagaccggacatgcttgagtcggagtatacggtcgtatcgaatatcagcaggcacggtgtgccgccggtggaggcagccgcacatattgcggatctgatcgcacagatcctggaaaagaaaaaaagcggtgtagaattttcaaaagcagaataaagacatggttgcgaaggagcacaggcgggacgtctgtgctctttttctataggagcagcaagacagacaaaggaggatacgttatggagaaaaacgaaggaggtcagctggtgcgtgctctcggactgaaagagtcgatcagtatgacgataggaacggtagtaggagtgggactgtttacctgtggttcctcacagattggatatgtcggatcggggattattgtaattacatttttatccctgctcatttcgatctggccctgtctgatctacggcgagatgtcggcggcacttccgtgtgccggaggtacttacaattatgcgaagcgcggactcaaccgggtctgggcgaatctggcaggctggcattacatcatctccgtggtcggcatcggtgcgggcgagacactggcattttccaattattttaaaattctgttcggagaactcggcatcaatatcgagggagtggattctcggatcattgcgattgtgctggttctgtttttcctgatcttgaacttccggggaattgagatgtctggaaaagcgcagacgggattcattttcttcttctggggctgtgccgtggcatggttcttatatatgataccgcacattcacctggactatttcggcgggatcgccatggattccctgccgccgtttaaggaaatgatgtacattttcggactggtatggtggtgctataccggatttgagacctgtgtatcgatgggtgcggagacgaaatatccgcagtatacgcttccgagagcgttaaaagtatcggtattccttgtatttgcagtcaacgcgttattccagtggtttcttgtcggactggtgccgcacgagttttaccacatccttgcagtggcagacgcaccgtatgcggagggactccgggctgccggactggtgggcttcccgatcattctgctctgcatcggcattgcattcggcggcgatctctccaccatcaatccgggaattgcggcaccggcgcgctacatctacacgatggcggaggacggttccctgccgaagttcttgtgcaaggtacatccgaagtataagacaccgtatatggcggttcttgtggtcggcatcatcaatattatcctgattgcaacagggtcaatcaattatatcgcgtcggtatcgctgatctcactcgcagtatgttatatgatcggctgtctggcttaccttggcttaaagaaacactatccggatatgaaccggccgtacagggcgccggcaggaacggtcggatgctatgtcacgattgcagcctacactattattctgattttcgcagaccgcatagcgcttctgacggcggcggttgtgaccgtggcagcgattgtctactgggcgcttttcaccagaaagcatgagaataagattccgtccatcgaggaggagatcggtatcctcgaggagccgtccccccaggaaaaggcaaagatggacaaggagtaccggatctggaaagccggcacgatccttgtgacggtgatagcacttggcatttacattattccggtcttattttaaaatttaagggattggaaaggagcacggtatgagactttatgatggtaacattttaacctgtgacaaagagaaccggattgcacattatttgttggaggatcaggggaaaatcctttactgcggggacgagctgccggccggctgtgtggcggcggagcgcgtgtccaccggggagggggcattgattccgccgtttgtggacagtcatatccatttcgcaagttacgcgacgtttcatgccgggctcaatgtcatgaatgcgcggagcaatgaggagattcttcagatgctccgggagcatctgaagaaaacgaaggaaaagctggtgatcgggtttggcgcatcgccgtattccgtgtcagacggacatctggtgtgcagggtgcagctggatgaggtgtgtcccgacaaaccgctctttctggtaaagtatgatggtcacgcgtgtgtcgtcaacacggtgctgttaaacgaagtgcgcggcaaggtgcagcatctgcgcggttttcatgaggataccggggagatgaaccaggaggcatttttcgccgtctcggattatatcacagcttcgctctctacggtgcagctggtggcgcacatgcagaaggcgctggacgatctggctgcgcgcggcatcggcatgatccatacggtcagcggcgtcggctttgcgagagatctggacgtcgatctggagcgtttttttgcgcgcggcatcacaaacggcatgcagatgcgcgtgtttatgcagacgctcgatgtgaataaggcggtaaagcgaaagcttccgagaatcgggggctgttttgagacagcgcttgacggatgcttcggttccatggatgcggcactgctctcgccgtatgaaaacacgtcggactgcggcgtactctactattcggatgaaaaagtgacggaattctgtaaggcggcaaaccgcgccggtctgcagatcgagatgcacgcgatcggcgataaggcgtttgcgcaggcggtgcgtgccatcaaggcggcgcttgacgatctgcccagagaagatcacagacatacgatcatccatgcatgtctgccgactgcggaggagattgcggtctgtgagcggtatcacatcaatctggcagtgcagacggcgttcattgactggccgcaggagccggacagctatctggagcagatcctcggagagcgtgcgggcaggctgaatccgatccgcacattctgcgaacacggactgattttaagtgcgggatcggacggaccctgcacagatccggacccgcttttatggatgtataaggcatgcaatcacagcaatccggcagaatccatctccgtgcggcaggcgctgcgcatgtgtacctacaacggatattacacgacctttgatgagagggagcgcggaagtctggaagcgggaaaaatagcggacatggtgttgctggaccgcaatccttacgacatcccgaaggaggaactggcttccgtcaaagtgaagcagctctaccttcgggggcaggaatataaaaaaggaaacggcggcggagccgcacagattctgcgcggaatgataaagcggggaaaatgctgaccggcatttttcccagttagggtgatcttacagatattttacatatcccttctaaattttacacaacgcacccgaacaattttacaaacctccgatatgatagaagaaataagaagctatcatatcggaggtttttgtatacatggaaaaacagacactggtatgggcgcaccgcggtgcaagcggctacgcgcctgaaaatacactggaagcatttcagaaagcggttgagatgggcgcagacggcgtggagctggatgtgcagctcacaaaggatggagagctggttgtcatccacgacgagacggttgaccgcaccagcgatggcagcggctgggttaaggattttacatacgcgagaatttccaggtttaattacaaccggacgcataaggaagggtacgagcgggcgatgatcccgacgctcgaggaagtctatgagctgttaaagccgacgggacttacgatcaatgtggaattgaagaccggcgtggtcttttatccggagatcgaagagcgcgtgcttgacctgactgcccgcatgggtctggaggagcgcgtgtggt

SEQ ID NO: 11530 - DNA, 35007 bp, Unknown
  gut microbiota DNA sequence
actggggctgtctggaatcctcggacttcggcagattatagttcttaccaaccccaatcccacattttcgtttaatctgtgagatatagaggttggacacctttaacccggtatgctccaacacatactccttgatctgcggataggttgccccatcctgaaattcggacatatccatatcttccaaagagaactcaacccgaatctttttcgagtcgacctcacccttggaaagcaagacaaccgtctcaacatgcacggtcgccgggaacatatccacgcagcataccttcttcacctcatacccactcgcctgcagcacctcaaggtctctcgccaggctggtcggtttgcaggagatatacaccatctgcggcacaccgtagcggatgatcttctccaacgcttttggatggatgccgtcacgcggcggatcgagcacgatataatccggcttctcctcaatctcatcaatcaccttgagcacatctcccgcgataaactcgcagtttgtaagactgtttaaccttgcattctccttcgcagcttcgaccgcctccggaataatctccacgccgatcaccttttttgcaaccggggcgagcatctgcgcgatcgtaccggttccggaataaaggtcaaacacgacttttccatgctccgcgacatccgcatccgttccgctcggcagggcatccccgatgaactcccgcgccgtctcatagagcacctccgcgcccagagagttcgtctggaaaaaggagaacggtgtaatctgaaaacgaagtcctaacagctcttcatagaaatggtcctgcccaaaaagcacatccgtaccctcgtttgtgacggtgtccgccacactgtcgttgcgggtgtgaagcacaccggtgagcgttccctgataggcggcagcacacaacacatccttccatccggcaagaagcgcctcttcccccccttctgctatctgtgtcgtcgttaccagatccaccaggatctcccctgtctttaccgccttgcgcaccagaagatgacgcagatatccggtgtggcgcagtttgtgataatacggcagattccgctctttaaaatagtctagcgtcactgtaagcaccgtgtgaaaatcatcgtctacaatccggcattccgggacatccacgatatcgtagaagctgccgcgcttgtgcatgccgagtgccagcggtcctcccttgtacgcatcaccgaatgaaaactccatcttattccggtactcctgctgtctcgggctcgccttgattccaaggaattcgtagtctgtattttccggtacaatgacgtcgtcgatcagtttttttacctgtgacgccttcatggcaagctgctcctcgtaaggtagcgtctgatatgtgcagcctccacactctccggcatggatacaggcagcctccggctgctccttcgccgaacgctccagcacctcaagcagtcttccctcgcattttcccctgcgcactttattgatcgatgcggacactttctgtcccgggactgcattttttacaatcacgcgtcccccgtcttccgttctcacaattcccttattggggaactctacgcattctaccatcccctcgataatctgtccctttttcacgttctatcctccattgtccgtccagtttcttctgcacattgccaaacataaaaaatcctgcatgcaggattcactcgcctgactcagccacttacgatatcgtttcctgctacagaataaagtgtgcgcctgccgcacacttgcgcctgtcttggcaggctgcctgatgcggtatgcaaagcattatttacctcaccacgaggtgcgcatccccacagagcgtttcctattacataaaaatagggctgcatctctctgcagccccatgccctttgtcttaatcttcggttgtttcctctttgtcctcagactttgccggcgcttcctcatcatcatcgtcctcgaagaaatcatcatcaaaatcatcctcgaaatcgtcctcgaaatcctcaagataatccggcgtaaagaaacggtagatgccgtatatcgctgcagctacagccgctacaataccgataattgcaaaaatccatactaccttggaggtcttcttctcctccacttcttccttcttattcagaagttcgtttaactttgtcatgttgatcagatcttccatcttattcatcagattcccctccttgatttatcttcatttattgcatgtcttcttattacgcacattatagcatatctttccctgttcgcctataaaaaatttataaattaagacattttatactttttttaattttgcaaacgctgcaaacattttcttggttcccgccgcgtcaaaatcgaccgtcacctcaaaatctctgccgccgggcacgatggcttttaccgttccctccccgaacttcatgtgggacacacggtcgcccacaccgtagcttaggcttccgccttccgtatgtaccgatgaaaacgctctcgcctgcatgctctgcccggacagctgatcccgcatcgtcggccgtttctttttcaccggctccgccgtgtgccgctccctgttctccagatatgccggctttttgatctcgccgtttaaaagctccggcggaatctccttcacaaagcgtgagaccttgttgtactgtgtctcgccgcgcaccatacgctgtctcgccgacgtgatgacaagctctttcatcgctcgtgtaatgccgacataggccagcctgcgttcttcctccagctcactgctggcattgtctgacgtgatcgacatatagctcgggaacaaaccgtcctccattcccgccagaaagaccttcgggaactccagacctttggcgctgtgcagtgtcatgagaaccacataatcgttctcctcgccgacgctgtcaatatccgccacgagtgcaacctcctctaagaaaccgcttaatgtcggctgttcttcgccctcctcgtaggcgaccaccttacttaacaactcatcgatattctcgatccgcgcctccgcctcgtcggtgccttccgcttcaagctccttcacatagccggtttcctcaatgacctcccgcagaagatctgccacgctgatataaggcagcttgctgcgcatcgtctggataaatgtcacaaacggtttgattttcgctgcactcttgccaagggacggtatctcctctgcacgctttaaggactcataaaaactgatgtcatacgcctccgcataatcagacacccggtttagtgtcgtcgcaccgattccgcgcttcggcacattgatgatcctgcgcaccgccagatcatccctcgcattgtcaatcgtctttaagtatgccagaagatccttgacctccttgcgcgcatagaaattcacaccgccgacaatcttgtacgggatattggacacgataaaacgctcctcaaacagacgtgactgtgcattcgtgcggtaaagcaccgcgtagtcgccgtagccatactttccgtcccggacaccggacgcaatatccctggcgacataatccgcctcctcgtaggcggtgtcaaactgctcaaagtcgatcttctctccctcgccgtttgccgtccagagcgtcttcgctttccttccgacattgttcgcaatcacactgttcgccgcgtttaggatgttctgcgtcgaacggtaattctgttccagcttgatggtgaccgcatccggaaaatgcttttcaaagtttaaaatattgtagatattcgctccgcggaacttgtagatcgactgatcgtcatcaccgaccacgcacaggtttttgtatttgcccgcgagaagacggatcagctcaaactgcgccgtgttcgtatcctgatactcgtccaccatgatatagcggaaacgctcctgatagtaggcaagcacctctggatctgtctgcagcagctctaccgtctttacgatgagatcgtcaaaatccagcgcattattcttctgcagcgccgcctgatactcctggtagacctgcgcctgctttttctttgcaaaatcactcgatgccgacgcctgcagggcaaactgcgtcgggcttacaagctcgtcctttgcagaggagatcgccgccagaaggctgcgctccttgtagatcttggtatcgatattcaggcgcttgcagatctccttcatgacgctcttggaatcatccgaatcatagatcgtaaaattcgtgtcgtatccgatgcggtcaatgtgtctccttaagatgcgcacgcaggtagagtgaaacgtcgacacccagatgctctccgagccgtatccgaccagcgcatcgattcgctccctcatctcgccagccgccttgttggtgaacgtgatcgccatgatattgtacggattgacgcccttttcctcgatcagatatgccgtccggtgtgtcagcactctcgtcttgccggaacccgctcccgcgagaatcagcaccggtccttcggtggttataacgccgagcttctgctgctcgtttaatgtatcataaatactcatgcctgtttttccttttccgtttatagtgatatgagaaagtataacacatttctctctgtttttcgataccatacagaacatattttctatttttcatgctggggcactgtcatatacatttcccaacatttgtctcttgtcatctggttttgaaaactatataatgtgataagaggtgacacatatggacaacgatacaaaaaaatttctaagtgatctgttagcagaattacagagaattgattatgtcagaccggaagatattccgaacattgatttatatatggatcagattaccacatttatggattcccagttggaggcatccaaacggcatgcggatgacaagattctgaccaagacgatgatcaacaactacgccaagaacaatcttctccctccgccggagaagaaaaagtacaccaaagagcacgtactgacgctgattttcatctactattttaaaaatatcctaagcatcagtgacatccagagcatcttaaatccgatcacggacaaatatttcggaaaagacggcagctacagcttggaagacatctaccgtgaagtcttcggactcgagcatcaggagacacaaaatctcatgaaagacctcgccaggaagttcaacacctcgtgtcagacattcccggatgctgcccctgaggacgccgagcttctgcggaacttcagtctgatctgcatgttaagctacgatgtctatgtcaaaaagaccatcatcgagcgcctcattgacacgaccacctcggacaagtccaaggcagaaaaaaataaaaagtaatcgaaaaagccacaggcacgggcaaaagttcccgttctcctgtggctctttttatctgtctctactacttgtccgtattctgcatgcggctaaataccatgtcataaccgtcatttccataattcagggatcggttgacacgactgatcgtagcagtcgatgctccggtcttctccgcaatatccagataagtcttctggtcacgcagcatcttggcaacctcgaaccgctgtgataaagaaagcagctcatttaccgtacatacatcctcaaaaaatgtgtagcactcttctctattctgtaagctcaagatggcgtcaaaaagatgatccactgcatctgtcctaagtttcttactcatgttcttctccttcttcccaaaatggattcttttgttattttagcatattaaagttttaaagtaaatacccaagtttctgtccatgcacgcactttttccactgcttgcattcatgaaatccgattgttataataatagaagtatctggaaattgcaagaactttatttcataccaacgataactggagattataataatgaagaaattaaaacaattcctgtttatttttgtcccgctgcttcttgtgattgcgattcagtttctcgcaacctactttgccatgggactttccctgctgatcgagagcggctggtactctgtcaccggcagcgcggggttcctcgatattgtagatgacgccttttccctgtggagttcccagcgcttcaacaccggcgtactgttaatctacaatgccatgtcgatcgccgtgttcggtctgtggtactactgccggtacggcggcaattaccgccccgctctgcgccagacgtttcatcccgctgcaatcgcaggcatcgtcatgctgatgccgggcacacagtatctgacgacctatatcatgagctttgtcgcggcgctctttccgcactggatggatgcatatgaatccctgctcgagacggcaggtctcgatgatcagatctccattctgatggtcgtctgctccgtcatcttcgccccgttctgcgaggagctggtcttccgcggcgtcaccatgcatcaggcaaaaaaatgtctgcctttctgggcagccaatctgctgcaggcgctgctttttggcatcttccacatgaacatgatccagggcatctacgcattctgtctggggcttgttttaggctatgtctgcaaccgcggcggcagcatctattactcgatccttttacacatgctgtttaacttctggggaaccgtgctctccgggctcatcccgttcggcgacacgacgttttctctgatcttctggttcctgttcggcatcgccatgacagtcggcggtctgatcgtctttacctccggcatccgaaagctgcaggcggccggccgctcatcggctatgcctctttcagatattccttcaggaaccgaataaacgtctccatctcttctctcgttccgatgctgatgcgcaggtagttgttgatgcgttccttggtaaaatgacgcacatagatatgctccctgcgcagcgcctcgaacagttctgttgccggcacgcgctcgtgcgaagcaaagataaaattgctcatcgaatccccgaacgtaaaacctaacgcccgcagctcttttttcgtccactctctcgtctcgatgatcttttttctggtctcctcaaaataagcacggtcacggatcgcctccacaccaagtgcaagcgctgtccggttcatcgtataagaattaaacgaatacttcacgtcattgatataacggatcagcttcgcatttcccatcgcatatccgatgcgcattcccgccatggaacgcgatttggaaaatgtctgcacgatcagaagattgtcatatttttcaatcagcggcagcgccgacacccctccaaaatcaatatacgcctcgtccaccacaacgatcacgtcgcggttgtgcgcgatgatgtcctcgatcttatcaagcggcatcagaatgccggtcggtgcattcgggttcgggaatatcactccgccgttttccccgtaataatcctccacccggatctcaaacgcatcatcaagcgctttcgtctcatacggaatgcgcagcatatctgcccacacatcataaaaagaatacgtaatatccgggaagaaaaccggctttccggaattaaagaatgtcagaaaaatcatcgccagcacatcatccgaaccgaccccgacgaatacctgatcgctgcccagtccataatatgacgcaatcgcatccacaagcaccttacaggtcggttccggatacaggcgcagcgtatccgggttaaatccggcaagggccctctgcacccccggcgcgggcggatacggattctcgttggtgttcagcttgatcatccgctccgcctgcggctgctcccccggcacatacggcaccacttttctcacatatgactcccagttctccatcctttttcctcctacttgtccagtccgtacactgccgccagcttcgcaaatgcaggcagggaatgttccacggtctcatgggacacacaatatgcgagacgcacaaaccccggacagccgaaagcacttccctttaccattaaaagattaaatttctttccctcgtttacaaattcttcttcgttttccaccggcgacttcacccacagataaaatgctccctccggcttaatgcaggtaaatccgagctttgtcagtccttcgtagagtctgcttcggttctcatcgtaaaatgcaacatccgtcttctccgcaaggcagcgcgccacggctttctgaatcagggacggtgcattgacaaatccgagcgtccggtttgagatctcaatgccgcggatcagctcttcggcgtccgccgcttcatccggcaccacgacataaccgatacgctctcccggaagggaaagggatttggaaaaagaatatcccaccagggtattgcggtaatattttgtcagaaaatcctccttattcccgtcatacacgagttcccggtacggctcgtccgagatcaggtaaatatcggttccaaattcagcctgctttttctctaaaatcgctccgatctgctccatcgtctgcggcttgtagatcacgccggtcgggttgttcggcgtattcacgataagcgccttcgtccgcgcggtaatctttgactccagatcggcaagatccggctgaaacgtctccagattcggctgtacaatcacaatctttgcatcaaaattcgccgcgtactggcgatactctccgaagaacggcgcaaacacgataacctcatcatccgggtcaagaatcgtcttgaaaataatgttgagcccgcctgcggcgccgactgtcatcaccagattgtgcgccgtaaactttgttccgaaacgttcgttcaaattctctgcgatcgcctggcgtacttcctcatagcccgcatttgccatataaccatgaatgcccagagaacctgccgctccctttgcatccgcctcatccagaaggtcacggatcgcatcgtttaacgccttcggcgccggggttgccggattgccgagtgagaagtcaaacacattctcctccccgtactttgcagccatctccctgccctcattgaacatggcgcggattgccgaattgccctccagcgctttttgtattctctttgataccataatacctatcctcttttctgcggtctgacccgcatcgttttctcattcctttactttaccaaattaccacgtgaaagtaaacggtcatttgcaaaaatttgctccatgcacaagtataacacatttatcgggaattgaaaaaaagaacggacaacttccggggaaaaaatccccgtcccgtaatccgttcttttcctctctctatttctatgcgttcaccgtatccacaaagcgcatgaaggctgctctgccctcttccgtgcacttgtagactcctgcgtcggtgagaacctccttaaataccagaccgatctctgtctgaacgatctcatgtaacctctccggtgtgatctcgccctccagaccgctgccggcggtaaagccgtactttggaagaaattcctccacccagtctgcatgcttcgccagcttctcgtccgcacggatgtcaacgccgtccaagatcgcctgctccagatccgccatctcatcctttaagcgtgccggaagaactgccagacccataacctcgatcagaccgatgttctccttcttgatatgatgaagctttgcatgcggatgatatacaccgagcggatgctcctctgtcgtaatgttgttgcgcagtaccagatccagctcatacgcatcgccgcgccgtcttgcgatcggtgtgatcgtattgtgcggctcgccgtctgtctcggcgtagacgaatgccgcctcgtccgtgtagcctctccatgcgaggagaatcttgtctgccagatcgatcagacgatccttgtccgtagcgctgatacggatgacagacatcggccattttacaatgcctgcctttacatcctcatatcctttgaatgtgatctcgcgctccaccggtgcctttgccatggcgaactcataatgaccgccctggaaatgatcgtggcttaagatggatcctccgacgatcggcagatcggcattggaaccgacaaaatagtgcgggaactgctgcacgaaatcaagcagctttccgaaggtagcgcgctcgatcttcatcggtgtgtggtttgcgttgaacacaatgcagtgctcgttgtagtaaacgtacggagaatactggaaaaaccagtcgctctggttgatggtcaccggaatgatgcggtggttctgtctcgccggatggttgatacgtcctgcgtatccctcgttttccttgcacagaaggcatttcggatagccgctctgctttgccagcttcgccgccgcaatcgccttcggatccttctccggcttcgacaggttgatcgtgatatccagcgttccaaactctgtgtccgccgtccatttcagatccttcttcacgcggtatctgcggatatagtccgtgtctctggacagcttgtaaaaataatccgtcgccgcctgcggagactccttctcataaagatcatagaaacggcgtaccacctcgctcggtcttggaaccagcatgctcatgatctttgtgtcaaacagatcgcggtatgtaatcgtattgtccggaatcagcatctgctccgccgcgtaatcgagcatctctgcaaggatctgtggcagtgcctcctcggcgctctcctgcgtcatcggcgtgcgcttctcataagccgccgtgacttcatcctccagttcgtcaatgtgaaacagctccagcagacggttgatcgtaaaccgcttatcctgcggctctatgagtcccgtcaccagtccgtattctgtcagttccaatattctttcctgtatcatgatccaacctcgtttctaaatatactctgtcactacgccaattttaccgggccgtcgccgatctctacgacatagaaatctgcggcatagccaatcttgttcttataggcggttccgaccttctcgataaacgcatccaccgcgtcatccttcacgatgctgaccgtgcatccgccaaagcccgcacccgtcatgcgggaaccgatcacaccgtcgatcttccatgcttcctcaaccagggtatccagctcgattcccgttacctcgtaatcatcacgcaaagatacgtgggagtcattcatcagctttccgaacagcgcgacatcgttgttctgcagtgcctccaccgccttgatcgttctctggttctcatatacggcatgttttgcacgcttttggcacaccggacttgtgatggcatcctgatactgctcaaactgcgcttctgtcagatcgccgagcgcgttgatctttaccactttctgcagttcggcaagcgctgtctcacactcactgcgtctctcgttgtatttggaatcaccgagtccgcgctttttgttgctgcaggagatcacaatcttcgcattctcgagcctgatcggcgcatactcatactttaaggtcgccgtatccaggaaaatcgcatgtcctgccttgcccatcgcaatggcgaactgatccatgataccgcagttgacgccgttgaacttgttctcggaatactggccgatcaatgccagatcctgattcgtcacatcaaaaccgaacatatcgcgcaggatgaatccggtcagcacttccaccgatgcggaagaagacaatccggaaccgttcggaatattgccgaacagcacgagatccataccggactccactttcatgcccttctcgccgaacgcccacatcacacccttcgggtagttcgtccagtctgcttccttctccggctttaagccctccacggaagactccagcacaccgagattttcaaaattcatggaataaaagcgaagcttcttgtcgtctctttttctcgccacaccgtaggtaccgatcgtgagcgcacatggaaatacatgtcctccgttgtaatcggtatgctcaccgatcatattcacacgtcccggtgcgaaataaactccgatctctccctcatccccaaataattctttaaactttgcaagtactggttcccagatcatgcgttacctccttatacatcattttttctatgaatggtttctgttaccgtcctgttgtaattctattataacgtctctgtgttcctttgcaatagacctttttcaaactgcaacataatcaaaaaaacatgcaacaaagttgcatgtttttctgatctgtcatttatcatttttcacaatgccatcgatcacaatctccgttcaagcggtagccccgttttttatacttccggtttaaaatcacggatcagtgaaagtgtcggcagtgcgttgccatcgtagtcaaacagcgcctgatttgcccactcgtttccacatggtcccggatcgttcatgtattttaaggatgccggtgttgcccagccggagcccggtaccggaatccatgccggctcccagtagaagaatccctttccttttccgcctttgatgtggctgatgcggtttaagaaatcttccatgaaatcgtactgaccctgctttgtcatcggatattcgatcttttccacaagcgccggtctggtcgcatatcccttgcgctcttcatcggaaagcttctcgtaattcttgtagtcttccatcgtatagcccatggaaacctcggcaatcaccagatccttgccgtagcgctctgcaatgtcattcatgttgtcgtttaacatctgcagtgatccgtgccagaacggataataggaaagtccgataatctcgaaatcctccccccgctttgtaaaattgtcgaaccactcgcggtacagcgcattgtttccgccgttatccagatgaatcatcaccggaatcgccgcatccgctttccgcaccgcacgaattcccgcattgacgaatgtcgcaatattgtcatagttcgggacttttccctccggccagagcagaccgttggaaagttcatttcccacctgcaccatggtaatattgacgccggcatccaggaatgtccgcatggattccagcgtgtagtcatagaccgcctgctccagctccttcacaccgtaatctgcccatgccttcggcttgatctgtttgcccgggtctgcccagaaatcgctatagtgaaaattgagaagcacgccgaaccctgccgccgtcacacgctttgcaatctcaagagaagttttcaaatcattctcccctgcgccgtaagattcgccggtctccgaccacggatcattccacagacggatacggatggtatcaacgtcatagctcttcatgatcgcaaggagatcccgctcctccccgttatcgtaatactttgcaccacaccgctccagttcgagcagtgtggacagatccattccttttacaaacttcatatgcctcttcgcgggcacagatctcattccatgcccgctctctcctttctgtttttttatattccacggaaaccgaaccgcagtgttaacggctttgtcacatcaatgtgatattccggatgaaccggagctccccagctgtcgtctccgccgatgcccatctgtgccagtgccacacggacaaccgtgtaatgtacctcaggcaattcatacgcatgcattgcattttccagttcatgcggtgtataaggcagtgcggaaaatgacagttcgtctccggtaaagagcatgcctcttcctctctcatccgtcaccttcgcgtagcgcacgcctactttgttgccgcactcctgcggtaccagatactgcgccatattatccgccacgcggttcttatatacaccgagcttcgcgccgcatctgcggtccgcatacgtctcctgcggtccaagtccgtaccactccagtctgtcgtaatccgcattcagcttaaaaagcattccaaactccggcatatcgcccagctcctccaccgggtcataggtcagctcggtctgcacatacgcatccggcgtcacggtgtaggtcacgcggcattttgcctgcggcgtggtcggaagcaggtaggtatatgtgatggagacgctgttctccgcctctctcacaaccggttcctcataatcgaacatgcccttgctgctcatgccggcatacatactcgcgatcttccactgcgccatccgcccctgcatgcggcttccgcagtcattgtcaatcggcgcacgccagaaattcggcatcggtatcttctcaatcagctcttttcccatgtagcggtaggacaccagtccgcagctgttgtaggaaaacagtacgtcaaaattctctcccttcacccccagattccactttccgcggatgatctgaagtcccgccttacggttcgtcacgcactttccttcatattctgccgcggcatcgccgattgtcccaccatttgcaggtgattttgccgcaaaaatcttctgtccgaatgcaatctcatgccccggctttgcccagagcagttctccgcgcagtacaaacgatacggtcagtgcgtattccgccccggcttcctttcccgcatgttccagttcatcggcaagagccatgcagccctccagttcttccagaacaaacgtcttttccgagagcggtgccacagacagcgctatttttctgcggcctgccgccacgccgttcttctccagcagaaggatgcagtcatactctgccgtatcggtaaacaggtttttattttttaccgtaaaaccatcttcggtaaaggatacgctgatgttctggtaattgaattttacttcctgcatcttcggtgactcggcgcgcccctttgcatagcagatgccgttgccgctgaaattatagtccgtcggccgctctaagaagtcaccgccgtacgcctggaattccttcccgtagcgatcctttttcgtgatggactgatcgatgtaatcccagataaatccgccctgatagcgcggctctgtgtcggtcagatcggtgtacttgtgcatcgcgccgcaggaattgcccatcgcgtgcgtgtactcacagcagataaacggcttctctttctgctctgccagatttttcacaatccgctctaccggcgggtacatctggctttccatatcgctgcttccgttgtagcgtctgtcgttatagactccctcgtagtgaaccaggcggtcgggatccagctctctgaacttctcggacatctgataaatcacacttccgccgtaggactcattgccgcaggaccagattaagaccgccggatggttcttatcccgctgatagcaggaattcacgcggtcgagcattcttgcctcccacttcggattatcccccggcacaatcgtccgcggatcggcaatcttacgcatcgccgccgcatcccagcttccgtgcgactccatattattctctgcaatcatgtagagtccgtagatgtcgcagagctcatacagtccgatattgtccggataatggcaggtacggatggaattgatattgttccacttcatggtcacgacgtcggtgagcgtctcctccatgctcaccacacgtccggtcagggaactgaattcgtggcggttgacgcccttaaacacaatccgctttccgtttaaaagcatcagtccgtccttcatctcgaaccgacggaagccgatcttcgacgcgacgacctcctgcaaagcgcccgccgcgtcatacacctccatccgaagttcatacagatacggctcctccgcgctccacagcttcacatccgccacttcccgcgagacatgtaaggttccttccatcttctcctccagagcaaacacctccgtgccctccggtgtctcatagcggctctccgccagatcaagtcttccgcgctcctcaagctgtatgcgcacacttccgctgccgcaggagcgaagatccagctccagcgtgccgcaggacagattctccgccacctgtggacggatcttaatgtcacagagatgcgtctttggaatcatgtagagatagacgctgcggaaaataccggaaaaccggaagaaatcctgatcctcgcaccagcttccgatcgtccacttgaatacctgcaccgccagcttgttctccccgtccttaagataaggcgtcagttcaaactcggacggcgtaaaagaatcctcactgtatccgacatacgctccattcagccagagtgccatgccgctctccgctccctggaacgagataaacacacgctctcccaaaaaggactccggcaatgtgaaatatttcacataacttgcaaccggattgaacttcgtcggcatctcgtccgtccagacgtcttcccttccatcccacggatactgcgtgttcgcatattgcggactgtcatagccttccatctggatatgtgccggcacgcggatgtcatcccatcccctgcagtcgtattccggcttttcaaatccatggatcgtctgctcatagtttctcgcatagtggaatttccatgatccgtctaaaaacaggcggaaactgctctttcttccgagcggatccagccacacgtccgcctcatcccagttccggtacgccacatggtcggagtgcgccgccacgcggttctcctcgtaatattccggatcacttaatctctcaaacaaaaattctcccatactgttcatcccccaatttatgattgctgttattgcgtttgttaagttcattatagcgaaaaaatgcgcattttgtacttatttttcggcacaaaacgcgcattttcaaccattatttattaccatccttttcgcgcggaaatattgtaatttaaaagctttgtctcgtaattttccggattgattttccactgatagggggatgtgtttaaaaactttttaaaattccggttaaatgtggatgttgtcgtaaagcctaccttctgtgccacaatgtccatcgaatccgtcgtctttttcaacagatcgcatgccttctgaatccggacaagattgatgtaatccaccggagacatgttcatacaggactcaaacagccttctgaaatgcgtctcactcatatgacattcctgcgccagctcctccacccggatcatgtgcatatattccatgcgcacatagtcgagtgccgccgcaatctgcgtcactcccgaatgtttctgcatttccacaccctgcacttcctgctttgcctcctgctcctcattcagccggataatctctatcacaagagaatacaacagacctctcacgctgtccgtataatggctgcgccgtccccgcatctcctccatgatctgccggacaagaaacgcgagattgtgattctcccattcatggagaaacagcgctctccggttgactttccggatcagttcccggcagaacagctcgttcttcggatacatttccgcaataatctgcgccggatcaaaaaacagatattcccagtagcttggtccttcttttgtattgctgatcgtcacatgaggataattgttcggtataatacttaccatagcaggctgataggggcgctgttcttcgtccagaatcagtttccccgtaccgtttctgcacactccgatctccatcagattgtgaaaatgaagatgtacctcatcatgaccataatcccggatccagttttctccaagaagtgccagaacatattcattttgcggtatctcatagaaccgaagctcgatggtatctttcttctttttccccataattactccattttctccccgctgtggcagcgtaaagctactcgccgtgacagctcgattccgcttcgctccttctcgccgtgggcgctcgccctatagagaaatccagcaacaccctctggaaagcaatctttcctccggtgtcactggatttctctacactgctcgtagcttaatcaaagtcgaacttgtcgaaccgctggtgcattgccttatagcggaagcggatcatttcatttttctccaggacatcttcttctgttcctctgtactggcagcggatacagctgtaaatacctgtttccttattgtaaaacatatcaatgtccagatctcttaaaaagcaggacgggcatctataatttaatttgcctttgccaagttgagccatgttgcaaatacctccttatctgagattgtttttctgtatcccagggtaaacatcggtgagaatgcatatccctcttttacatatccttccgcgtctgcgttggatgcagtcatggatacgcgtgtctcgatctccggaatcacggcgcttacttctgtcgcacccttgaccccctcctcgcggcacttatactcataatggatcgtcttctcttccggtccgtcgatctttaaggtgatatgggacatatcctcggaatactcggttgtgccgtagcatgcaaccatatactcgtttaaggtaacctctgcactcgggtcactcatctcaaggatggtacgctcgatcttgatgttggaggagccttcctcaaagtactcttttgtctgaagctttacagtcagatcacgaaactcgatcgttaccggatccagtgtcaggattcttgtctttccctcctgtgaaaaatgtgcgtgtgtcgggcagagacagagatccacttcctcacccttataggaaagctttgcacttcttacagttccctctcctgcgtaatgtgtgaagtaacctgcacggtacttctcctgaatcaggaacggataagaggcatcctgcacatgctttgtgccgataccaaccggccactccagcttcgctgcatacggacgaaggtcaacgattgcgccgccctgatccatattgacgcaggctctcatgtacgggtcgcagtaccagaacagctgcttgtctgatccgtaaaggatatctctccagagtgcacactccggctcattgtagttgccggcatccacacccttcttctcgcggtagtaatctgcgaactcggacattgtcatatcgactaacttgccctcttttttcagcttgccgtaatatgcacagccgtcgctgtaagacttgtagagaagctcatacggctgctcccagcgtcccatcttgttcatccagcccggtcctacaaacatcatgttgtatgcatagccgttgttgtattttcctaacgaacgatactgatcgatcaggttgtacagatacgggtactcccaggtctttgtatcatagatcattccacgaagtacattctgcggatgcgttccgaagttggaaccgttaccgtcatagcatgcgatcaggtcgcgggacagatgcgggattgcaacgataccgctgtcctcagccgcattggctgccggcgcatgtgtattctgcttggacgggatccacggtgcccatggaccgccgtcgaataaggtgtaccaggagttgttgcaggtatggtaagcttttgggccttcctcccagcaggtggcaaccgcacactttacggtcggataagttgccttgatatagttggtcagatcggcatccatgtagtaggaaccggttgactccggatagaatccgaatctgtcatggaacttctcaaacacatcgttgacgatggctttcttgtcctccatggagaacatccagatacagaaatccttggtcttgtatttctcacggaactcctcacacggaagtccgagcaaggataatgcgatctcgtctccgtatacgtcgtggtcatgcttcgcaatctccactgcctcgtcattgaaaagagatgcgtatgtcatctgaatggttacttttaatccattctcatgtgcgagtctctgctgtgtcttgaaaatatccagagattctgtcaaaagagccttatctccgatgtcctcttcctttccctgtcctgtgacagttgcggaatactccggaaccatctctggtctgtgaatcagatttaaaataaattgatccattttcttcctcctcaatttctatatttctttcatttttatggaaaagatgcctggtgcatcctcacccgcctaacttatgctgtttttgcatttttctgatgcgaagctggaaatactcaggcattgcagcctttgcctcagattaaaacttcatggaagaatgccgcttctgcattcttctaatgcgaagctggaaatacttcctctctaattaaaagttctctgaaaaatgccgcttttgcatttttctaacgtgagattagaaacactcaggctgcgcatcctatgatgcgctgtctgccatagtgtttcttctcacaatttatcctttcaccgaaccaccggtaattccttctacatagaacttctgcatgataatgaacagaataccgatcgggataccgaccataacgccgcccgcgcagaatctcgagaagtatgtcgggatcagcgtacgattcagcatgttgtaaagtccgatcgcaacggtccagtctgtcgagataccggagtttaagatgatctttgcaaaaacgaaatctgtccacggtaccaggaaagaactgataacagtgtacacaatgatcggcttggaaagcggaagcacgatcgtgaagaatgttcttgcctcggaagcaccctccagatacgcagcctcacgcagggatgtcggaatcgtatcaaagaatcccttcgccacaaggtaacccagtccggatgcaccggagtacactagaatcataccgatatggctgttggttaagttgacggacttcaaaataaagtaaatagcgatcatggacaaaaagcccgggaacagctgcagcataactgcgatattcatgagagcttttcttcctttgaaacgcatgcagctcattgcatagctgaccatcaatacaaaagaagttgaaatcagacatacaaaaatggcaataaccaacgtattcttaaaccagatcgggaactgtgataccgtgtccggttcaaagagcatgcgagtataattgcggatcgaccatgtctccgggaagaaacggctcgtgttcataccgtcatatccgctgaacgaggttacaatcagccacacgatcggcgtgatccagatcactgcaagcactgcaagcactacgtgaagcaaaacggaattaacaatttttctctttcccatcatctgaatgtatcctccttatctcctttaatcaggaagttaaaggcaaataatgtaatgactgcacatacgacaaagacgcagataccgatgacggatgccatcttatagttgtactgctcactggtcagacgatacagccaggtaaccagaagatcaatctccttaccccaggaagccgccagtttctggttggtcgttgtgtaaatatcctgtgtcagcaggtaaattacattaaagttattgatgtttgccgtaaactgtgttacgaggtatggtcctgtgataaacagcatatacggcattgtgatcttgcggaaaatctggaatgagtttgctccgtcaatcttcgcactctcttttaactcttccggaatgttcataagtacaccggttgcaatcagcatcagataaggaacacctacccagatattgatgacaacgatcgtgattttcgcccagaccggatcgctcaaaaacggaatataatttgctttgatccagccaagattctgtaacagatcaaccagaccgatgttcttgcagaatgaattgacaattcctgtatttgcgaaaaagttacgcagcaacagcaatgttacaaactgtggaacggaaatagctgcaacaaaaagcgttctccacatcttttttaattttgtgttcttgttgttgatcagaagggcgagaataattcctccaaaataggtcgtaaatgtggcaagcactgcccagagcagcgtccatcccagaattctccagaatgtatatccgaatgtggaggtaatgctcgtggtaaacagggacttaaagtttgcaagtcccacccaggtaaacaatgcatttggcggcatatgactcttatcatagttcgtaaatgcaatgcagatcataacgaccaacggcatgatattaaagataatcacacccagaaccggaagcgccagcaacgtaaaatgaaacttatcattcagcatctcattgcagtcttccttaaatgtattgatgtgctttcccgcttcagcgcgaagctgtaagcggtatgtatttctcacgtttgccatccaaagcaggattcccacaatgagaaaactcagactgatgacaccgaagagcagaatcagaagggagttatcataatcattgacctcattcttcatcgttgccgggttgtacaccatcgcacgctctaccgtacctaaggtattcagctggctgatatatggcaccccgatcaataccgtatatagaattaacccgatttccagtaatgttaccagaaatcccttgatgatttgttttcttttccaataaccggcacccgctacgagcagcgatgctttcactgcaccgtcccctttggcggcagcctcaccaaattccttaaagaattttccgattgctccgaagaatgcagccaccggattctttttactttccttactattcatgcaagcacccatgcctttccataaccgtcattttctgtaaaatggcgttctccttgtatctttgctgcacgcagtgtatacctgttctgcgtgttctttgggttctgttgatattcagatgaagaaaaagacccactcacgattcccatcttcgtatgcgggcctttttctcttcatacactcttataaaatcgtgttactgcttattctgtcggctgtgatgcagactctaccagattatccagcaatgtctgtacatctgttccgtccgggttaccctgagcaatgatctcaccaaatgctttggacggatcccagtaaccgctgcctactatctgaacaacaccgttagcaccattctgtgcggtaactgcagcgattgctacatttgctttaacctcatcagactcgccagctgcaatgttggacggtccgatctgtctctcagcaaaacgtgtctcctggctctgctcgttggttaagaactttgctaattccatagcccagccaacctgtgcagagtttgcattaacaccgatcatcttgtaaccagctgcagaacccatcggaacctggttgccagcgcatgtataagtcggaagtgcgcatgctgcatatccatcaccgaatgcttcctgtactgctgctgcatcccatgtaccggaaacgatagcaccaagctcaccagttgcaatctggtttgctgtatcaccgtctgtgattggtaagaatgccgggtttgttgcgattgcaagcataccgtctacaacatcggtacctttgataccgtcagcagatgttccgttccagtccattgctgtgcttccgtcatcatttaatactgttgtaaatcctgctccgtagaagaaacctgcattgtaccagccgcttgcaagcaccattccggctttcttgcctgctgctgcacagtctgtaaggattgcatcccagttggtcggatctgttacaacattgctgtcataatataagaagtatccgttatcagcagacatcgggtaagcatataatgtaccgtctacggtagctgcctcaacagcacctgctacattctggctggagacagtatcaacatcctgtactgcctgtaatacacctgcatctacaagatcaatcagctgatcacttgcgaatgcgaatacatcagctgctgctgtcggatcaactaagatatcatccttagcatttgcctcagactctacaccaactgtaatgtcaaatgtctgatccggatttgcttccttaaactgctcaataagctcgttggttaatgtctggtcttcctcagcggcccatactcttaaagcaatggtgtctccgcttgctgcaggagctgctgcttcctcagtacctgctgctgcgctgttgtctgctgcgctgttgtctgctgctgcattgctgtctgttgtctcgctgctgcttccgccgcatccggctaccatggttgctaccatgctcgcacataataatgcgctcaaaacttttttcttcattttgaaaatcctcccttttctttttcaaaactttttcagaacgccgcatgcccaattccgtatcgtacctgcggtactgcgcatctattgcgcaatcggttgttctatgattaaagtatattacgtgcctgttttgatgtcaatgtttatattttataataaatttgctttttttttggcacaaatgcacaagttttaaaaaaatatcagcttttcgtggaatcattcattatttttgtgcaaccgataaacccgaatattccaagcatattccactgttttctttatattttccaacatttcaagcgcatattgagcgattttgctgattttcccattccctgcaccatttccggcgtgtcagacaccgtattccgacacaatccgcactgcccggtgtgcactatttcgtggattccttgagtacgacctcatatggaagtaatgtcttctgctttacctccagtccctccacaagatctaaaagcgtccggcacgccacttttccaagttccttggcatcgaaagcaagcgaagtgatcgacggcacatggttctcgagaatcgtgctgtcataaaaagatgccacccgcacatcctgcggcaccctgacgtgctgttcccgcagtacctttaaaaccctgctggtcaccgcatcgtccatgcacagaatgcagtccacattctgttccaggatctcctttaccgtccgatcgacgcgcacccggttttccgggcttaaatacagcagattctcatcgagcgtctccccctgctgttcataggcgtcccggaatccgagcagacggctgtgcgttaccatgtatccctcgtcctcgccgatcagtgcaatccgctttaaattcttcattaaaataatggatgtcaattcccggcaggcacttctgtggttgtggtcgatctggattacaccctcataattcgtacttcctgtcgtcacaaacggaatatttttctgctgcaggaattcaatctgtgcatcctccagaaaggtacgcatcagaatcacaccgtccaccttatgatttgcaacaatccgctccagtgaggaaatgtcattcatctgacacatcgtaagcagaatgtcgtatccgacggtctccgccatctcctgaatgccgaacaggcagcgctggaagaaattccagtccaccacttcataatcgcgcggcattaccacacagatattgtacgttttcgactgtgccaatcccttggcgatagcgttcggcttataatcgtgctcctctatgtattccatgaccctcttgcgggtctctttcccgattcttccctttccggatatggcgcgtgaaaccgttgtctttgaaacccctaacgcctccgctacgtccgcaatggtaatatcttttttctcttccttctccatagtaacctccaactctggactatcgtccggagttcccttaattttgcgctggttgcgcaatctttttttattatcaaacacaattccagaaaaatcaatccacttttttaccaaaaatgtgctctcatattttgcagtatttacggtactttctgttgtttacagttcatttttgcgatgatataatgaaaaagcgcaagcggttgcacgttttttgtgccagcatgtgcaaaacaactacttcttatagaaaattttagaaaagattggagatcacccgatatgagaacagatcacctgctctttggagcagcctactatctggaatatttgccgtataaccgtctggagacagatatggaaatgatggagcgtgccggcatgaataccatccgcatcgccgagtccacctggagcaccttagagccgtccgacggcgtctttgactttacctgcatcgaccgcatgatacagaccgccgcaaagcatcatctttccgtcatcatcggaaccccgacttacgcgataccaacctggctggcgcgcaaatacccggatattctcgccgtcacagcaaacgggcaggagctctacggtcaccgtcagaacatggacatcacgcaccccggctaccgttatcacgccgagcgcatcatccgcgccatgatggagcacttaaaggacgttccgaacatcatcggcttccagctggacaacgagaccaagagctacggaacggccggtccgcgggttcagcagatgttcgtcgcttccctgaagaaaaaatacccggacattttggatttcaaccgtgaattcggtctggattactggagcaaccgcgtgaacgactgggcggattttccggatgtacgcggcacgatcaaccagagtcttgccgcagaatttcagcgttttcagcgctccctcgtcacagagttcctctcctggcaatcggacattatcaaagagtacaaacgtgacgaccagttcatcacgcagaattttgattttgactggaccgatcactcttacggctatcagccggaggtcgaccagtatgacgccgcccgctacatgaccgtggcaggcgccgatatttaccatccttcgcaggacgacctgaccggagctgagatcactgtatgcggaaatattgcgcgcagcttaaagaaggacaattatctgatcttagagacagaggcgcagggtctgaccccgtggctcccctatccggggcagctgcgcctgcaggcgtacagccaccttgcaaatggctccaacagcgtgatgtactggcactggcactcgatccacaatgcgatcgaaagctactggaaaggcgtgctttcccacgatttttccgaaaatgccacctaccgggaagccagcgaaatcggcgcggagtggaagcgcatcggcacacacctcatgaatctgaaaaaggaaaaccgcgtcgccatcctgctggacaatctctctctggcggggctgcgccagtttccgcttgagaccaccggtgaccacagctacaatgccgtgatgcgctggcttgcggacgccctgtaccgcagaaacatcgagtttgacatggtctcttccggcgagcgcgatttttccgcctatgattttctcgttgtcccggcgctctatgccgcatccgacgatcttctcggtgcgctcgaccgctatgtggcagaaggcggacacctgatcgccactttccgcacgggcttcgccgacgaacagttgaaaatccgccacgatgtacagccgcatcttctttgcaggtgcctcggtattcactacgatcagttcacctacccgaagaatgtccgcatcaccaccgcagacggcagaagcgccctcgcacacgactggatggagcttgtcacctgcgacaccgcgacgtcgctcgcgcattatgaccatccgttctggggcagttatgccgccgtgaccgagaacgcctatcaaaagggctccgccctctacctcggcgctttcttcgatgatgaactgttggagccgctgctcgtatcctacctctccagacacgggtatgaaggtctttccgaagacactccgcagtttccgctgatcgtaaagcgcggcacaaacgattttggcaaaaatctgtgctactacttcaactattcggacgaaccgcggacagtgacccacaccggaaatgcgggcaccgatcttttaaccgacaccccggttgccgccggtgccgtcctgacactggctccctgggggctggcggtcgtcgaatcatagatgcctaacaccccgatgcatcccgggaacacggcggcgaaaagcagagacaggaagtaatcacaagatggtaacgtgttccggctggaacttgccggcggcggttctgatcgcaaaatccggcatttctaatccgcaccgcgcccggcatccccgatgctccatgtctttccaagctttgagcactccgcgggtgtgttcgcaagccgacagacaatttaaggacttttgtgtgttccttgcatcaccactgaacaaaacataaccgcgcgaagccgatgtctgaattggcatctgccatgttttcaatagcagatgccaacgagtttcggttcgcgcggttttatattgtctgtgaaggggtgatgctaggaacactaaaaagtccgatcattatctgcggcttgtcggacacatcccgcggattgtcaaagcgtggcaaagacacggaatcagatgcctggcgtgatgcggaagaaatgctcacattttgctccaaagaaccgctgcctgcaagttccacccggaacatgttgtcattttacaattaactcctgtccctgcttctctcctccgcacccccgggatgctccggggtttttatgcacaccggatattctacaccgcccgccccaggaaccgcgtcagttcctcgatcggtatcggtttggaatacttgtagccctgcagatacagtgcattcatctgcttgcactgatcctcgtctttttcgttctccacaccctcaaacagaatctcatagtgcgaattcttgaaaatatcggaaaagcttccaaccatatagcgggattctgcatttttccctgccagaatagtcagcgaacggtcgaacttgatcacatcgatcggcaggccgataatgcgctcgaaattcgagtagcccgttccaaagtcatccagatagaatttgattcccagcttctgaagactggtaatcgtattcttaatgttgtcaaattccgtctcattccagctctctgtcagttcaatcgcaactttttcatacgggatttcattctggcggatgatgtccatgacatccttgcagaattcctttctgcggaattccagaatagaaaaattaacggaaacacggtcgatctgatacccctcctgctccaggcgtttgatctggcggcaggttttatttaagatgattttgctgagcgtatgaatataatcgtgccgctctgccatcggtatgaactgatccggatataccattcctgtttccggcagctccagccgcatcagcgcctccgccgaggcaaaccggttggtacgtgtatttagcaccggctggcagtacactttaacgcgctcatcctccaagtcgcagtgtgcattgatgtcctttaattcgcctaatatgtaagatgccttccgatattctatgatgtccttattctgacactcatataccgcgccaaccggtattttctcttccataaactcattcaacgccagatactcacctgcctcacgcagcctgtcatctgcatgtgcaatcagcacccggtagcccagtccatgttctttacacacacgctcaaacgttttttgtatgttatattttccgtttttctccgctttattactcagtctctgatacaccagtgcaagcttatcatcctgcagacggaacaggcagaatgttttgaaataattctccgcaaacgtcagaatcgtacgcggaagttctggtatctttttgagattggtttccgggaatcccatgaagattacagaaaaatcatcgtcccccacatctctcagatagctgtcaaacgcaccagcatcaagtgttcctgtctccctgtcgtaagatgtataatgaaacaaaaacagcactcccatatagggaagtaatagtgccatgcagctataagatgtagatacatattctgcctccagtgcaatcatgccaaacgaaaacagtaaaatataggcaaggcagcgcagcattttcagcacgaacttcttccggtacgtaaaaagcacaacgacaagaacgatacagtaataaatataggcaaaacgaaacggatcaaaatagaaattctgatgaaccatcagatctgcatcgatataaaaacccagatgcgtaaacggtgatccgatctcaagaaaagcaaacaccgcatagccgccccaggataccgcgcccaagagtcttgccggtctctcttccagcttaagaagtgtaccgaagtaattgcagagcagcacaaacgtgagaatcagtaaaagatatatcccatcctgtaacacataaataagaatcttccgggattctgtaatccgtgtgattgctgtatggaaactgatactgcagaccgtcgccatcatcaggcaaaccgttcccgctttgaagataatcaggctcttctctcttaccgtataggaagaatgcagcagcagccagcagatgatgcagagcacaatcgcgctgatatcggctacataagtataattctgatagaacaaaacatccgtcataaactcattctccccttcgatcattttccctttatattatcattatacatttattgacagcagatttcaattttttcacgcaaaatgacagcaaaggggcagagaagcggtaaagcttctctgcccctttttctgtcatctttggctgcacacgcctattcgtagcggagtgcatcgataacttccatctttgacgccttgttcgccggataataaccgaagaacactcctgtcagcatcgagaagaacagtgacagtaaaattgcagttgccgatggatgcacctgcataataatgtaattggaatactcggaatacatattggcaatcacaaacttcgctgcctggccgagcagtgctccgacaccaacaccgatcagaataccgataatgccgccgattaagcagagcatgatcgcctcaatgacaaactgcatacggatcgtccgccgctttgcgccgagtgccatacgcacaccgatctccctcgtccgctccgtgatcgacacaagcatgatattcatgacaccgacaccgccgacgatcagcgagattgctgcgattccggatactgcaatcgtgatgacattgagcaccgtgttgatcatgcccatgctggactgcatgttgctcgctgtcacatggaaattcgtattgttctgatatacctcatcaaaataattctggatatcttccgttgcctggttgacatccgcaaggggcgtcaggagcagattaaagtattcataaccagtcttatctgccccctgcagcttgaagctggtctggatcggaatcatcatataagtggaacgatccttttctctgacagatgtatccacttttccaaacagtgccgcattgtatttgtaaacacctacaacaacaaaatcatagatcgatccgtcgtccattgttaccgataccgtctcgccaatcgggtctttgtctccaaaataattctttgccatcgtatccgcaacaacgcagactcttttcttccccagattgtctgccctggtaagattacgtcccgcctgcatctcaagcttcatatactcgaactgttctggtgtcatgccatccacactgacattggcataattgtcggaatccgcctcatccttgatctgcccgcctccaagataattctcggcagcgataccctgaatttcatccggatactgcgcaaccagttcatcgatcatctcctgtgacacataatcactctgtgtcatatccggataaatccaggtatcccagtctgcatcgtcctccggatagcgcgcctccacatagccggaaactgtgttgccgccgagggaattcattgtcgcggtcagggtgctctgtatggaaccgccgatcgtcgtgatgatgataacggaactgataccgataataataccgagcatcgtgagcagtgaacgcatcttgttcgacagaatactgatgattgcctcttttatgttttcaaaaaacatcagtgctcacctcccctgttgtcccccacgatctcaccgtctaagagggtaacaatacgctgtgtctccgtcgcaagctcctgggagtgtgtgatgagtacaatcgttttcccctgctcttcatgtaaccgatgaaacagatccatgaccatatgtccggtcttggaatccagcgctccggtcggctcatccgccagaatgattgcaggatcattgatcatcgcgcgggcgatcgccacacgctgtttctgtccgccggagagctcatttggtctgtgatctgcacgcccgtccattcccaccatcgccagcatctccatcgcacgctccttcgcattcttcgtcttttcctcaccatatataagcggcaccatgacatttttcaatgcattggctctcggcagcagattaaagttctgaaacacaaagccgattctgcggttgcggaccgcactccgcacctcgtccgtcatgccgttgacgtcctgtccttccagataatagctgccggaggtctgtctatccaatactccaatgatattcatcaatgtactttttccggaacccgactcaccgacgatggaaacgaactctccctggttcacggtaagatcgattccgtgcaggatttccagttcattgggcttacctacataatatgtctttacaattttttccattcggattactggttcactcactattcgctaacctccgtacctgtaccgtctgtcagtcccatatcctgttcagaatacatctgctccggtgtaaatgtctgtccctcggctatcgaaaatgtcgtgtcgtagatcagcatatctccctctgcgagatcaccgccggtcacttctgtataataatccacctcatcgccgaccgtgatattcctgcgcactgcggttgcgtttccgccatcgtccgcctcagccacaagaacatacgcctgcccgttgtcatcatactggatcagatcatacggaactgccagcacttctccctttgcctggatcatgacttttgccttcacagccattccgattaaaagttcctgattgtcgagcgcgatctcaatggaataaccaccggcagaagtcgtgctgccgtcgcttcccgtcgtgccctgactcttcacacggaccactctggtcacggttcccttgatctgctcatcacccgtcgcatctgcggtcacagttgcctccatgccttcctgaagctttaatacatccgcctcctgcacggttgcaaccatctttaaggagctcgtatcctcaatcgtcatgatgacgttcttctctgcattgatgtctccgaccttggaattcaccgctgttaccacaccgccgcacggcgctgtgatctcgcagtctgccagctgttctttcagattgctgagtgtgtccttggatgtcgtgtcggtgtctttgtacttgttcagctcctgtgcctcctgtgctgtctcaatcgcacggttggtggtctctactgccgtatcataagcagtctgcgcatcctccaccgcctgcttggcagcgagcagtgcagcgaaatccgcctgtccctgatcgtagagcatctgtgcgccgttgtagctgtcctttgcgcggtcgagtgtcttctgcgccgccgcaagcgtcgttgtctggtcatccttcgcctgctgcagggcgtccgccgcctgctgtgtattgatgctgctcaccgcattcgcattcgacatggacttctctaagtctgcgatcttctcctcgatcgacgtggagtccagtgtgcataagacgtcaccctctttcacgatatcgccgacctgcacattcatggaagtgatctcggacgccgcctttgacgtcacattcgtgctgctggctccggcaaccgttcccttaaccgaaatcgtatcggacagatccctcttctgtaccggctccacttccacggtattcaccgccatcgccacctgcttggtcgcgttatgtatggatataccgatccagaccaccagaactgccacaataaccagcacaacgatcagtaccttctttttcttctttggctttgctgctatcgcgcctgcattctgctcgtttttttgcttcttgtctttcattctcgtctctcccttacctgtattttacaaatttatggtgattgtatcattatcacccctcaaaaaaaatgggtttaagtaaaacttaagaattcttaggaaatcctaccatttttttaaagtttctttgtactattgtaataatacagtatgttcatttgactgtcaagacattttcgcagacataaaattattctggaataccgacatcatctctctggtcagcgacagcccctccggatcttccggcacatccgagtaatgcacccactccgctgtcgcaagttctcccgtgtccagcacaatgtcccgctctccgtccagttcacagaaatagccgagaagaaggttctggtcaaatccccacggctggctcttataatagtggatattcttcaccttaagaccgacttcctcctgcacttcccgcatgaccgtctcctccgccgtctccccgatctccgtaaatccggcgatgagcgcataccgtttgtactccctgttggcgtaggttgtcatcagaatgtactctccgtccgtcaccccgacgatcaccgccggtgcgatctttgggaacacctggttgccgcatgcgggacagaataacatccgcagcgttccgttgtgcatgagtttctgtccgcatcttccgcagaaccggttatcccgataccactcgtacagatgccatgccgtggcagccgcaaggatgtgctccttcggctttcccgaccgcaccgcaaacattttttcaaaacagtatccttccggtgtgagatgctccggcagttccgtcagaaaatacgtctcctccccaacggaaaacagatagatgctctgcggcgccatttctcccgccgtctcacagatctcccggagttcccggtaagtaaggaaggcaagcgtctctccctcccttacaaggatcttgttctccctgtagatcatcatatagctggtatcgtccggctgtttttttcgtactgattctgcagatgcagtggtaaaatatcctgtatcatctcgtctctccttatctaacataattttccatgaaaccaaaagaaactgtcgcaataagcatatcatgctttgcgttgataagtaatattataagaaacacacttgaggatttcatgtggaaatgcaactgggaattcgttggagaaaa

SEQ ID NO: 11531 - DNA, 3530 bp, Unknown
  gut microbiota DNA sequence
gcagcgcaaaaagatgatataatgtttgcaatagcacaataaaatgatatacaagcggcaaacagaaaaggagcacttttatgcagatcagacatgcaggtacacaggacattccggggattgaccggctcctgtcacaggtattaacggttcatcataacggacggccggatttattccgggcaaatgccagaaaatacaacgatgacgaattaaaggaaattttagaggatacgacgcgcccgatttttgttgcggatgacggagcgggcaatatcttaggctacgcattctgcgttttccagcagcacatcaatgacaatatcttaacggacatcaagagcctctatattgacgatctgtgtgtggatgagaactgcagaggacagcatatcgggcagcagttgtaccggtatgtgctggattatgcgaaggcgtccggctgttacaatgtgaccctcaatgtctgggcatgcaatgaaaatgcgcggaagttctacgagaagtgcgggctcgtgccgcagaagatcgggatggaaaagatactgtaatccgggagacaggaggaaaatatgggattttttatagcgatgtttttatgtaatctattgatgccttctattatggtgatagcgggttactgcatgtacaaaaatcctccaaaagagataaacgggctgatcggctatagaactgccatgtccgaaaagaataaggatacctgggcatttgcgcatgactgttgcggaaagttatggatcaaatcaggcatcatattgctggtgccgacggttctcgctcaaatcccgtttgcaaaatcgggtgaagatgtagtagggacagtaacgcttgtcatcgaagcggttcaggttttggttctgattggttctgttattcttgtggaaaaagcgttgaagcgcacgtttgacgaaaatggcaacaggcgcggatagagtaagagacgcagctgaaagaggagggagatatatgaaagcagatgaagtgataagccgggttgcggatctttgcagagagcatggtgcgaaaaaagtgattttatatggatcgcgggcaaaaggaacagccggggaacgcagtgacatagatattgcggtgtccggcggggctgattttgatgagctgcttgaaaaagtcgaagaactgccgaccttgtacagtgttgatttattaaatatggatacctgtaggaatgatttattgatggaggatataaaacaatatggacgcgaaatttgacagacggtttcaatcattttgcaattcgctggatgctttggcggaggccagggaaagagatcttacggattcctttgtattaagcggaaccagtgcaaaatttagtattacttttgatttatcgtggaaggtaatgaaggacatattggtacagtattatgcaataacaggattcgttacaggttctccaagggatgttctgcgtgaagcatttaaggcaaacttgatttcggatgatacatggatggacatgctcaaagtaagaaatgaactcgcacatgattacgatagtgagattgtgaaaacatattgtaacacaattgtgaaagagtatattgatctgttttatgagtttaagggcgtggtaaaagcgttggaaatgtaaaaacttacaggaggttccaagtcattgaactatattgattcccagccggactatattgtgccaatattatgagagggtaattagaatatgtacatatttttgctaatcttaatttatatcgcttttatcagcctgggcttaccggattcacttctgggatccggctggccggtgatgcataccgaactcggcgtgccggtgtcctatatgggcatcgtatctatggttatctctggtggaacaattatctcgagtcttctttctgataagctgaccagaaaattcggcacgagaatcgtaaccgttgccagtgtttttcttacggtcattgcgctgttcggcttttccttttccagccggttctggatgctgattgtttttgctgttccttacgggctgggagcgggagccattgacgcagcacttaacaactatatcgcgcttcattataaagcgaagcatatgagctggctgcattgcttctggggcgtcggtaccatcgtcagtccgttcattatgagctatgcattggcaaacaggacatggaacagcggttatcgcatggttgggctgatacagcttggcattgcactgcttctgcttgttactctgccggtatggaatgtgaaccagagtacatcccgggagggcggaaaaagtgtaggtctggccggtgcgcttaagatcaaaggggttccgtttcttttgcttggatttttcgcttactgtgctgcagaagctacgactatgcagtgggcaagtacctattttgttgaggtaaaagggattgccgcagaccgtgcggccggttttgccgcgctgttctatatagggattactgccggaagattcatcagcggaatcattaccgatcggcttggcgaccgaaaaatgattttgctgggaacagggattcttgtctgcgggatttttattctgtgccttccggtggagtcttatacggtcgcgtttgcagcttttcttgtgataggtctggggtgtgcgcctatttacccgtgcattatccattccacaccatataatttcggggcggaaaattcgggagcgattattggaatccagatggcaagcgcttatgtcggttcgacgtttattccgccgctgttcggactcctcggcaatgcggtatctttttccatcctgccggtctatctgctggggtttgttgtcctgatgattacgatggtggagacgacattccgcatcacccgcaaggaaaaagttgtaaaaatataacagatgtgtatgatagaaatcagagagtcatacacaaccaatttaaggaggaagaaaaatggcaaaggatcagagatttgaaaaggtttattcacagggaacgatgacgaccatggaaatctgggtggacaaggaaaccggcgtgaattatgtgtttcacgcaagcggatatgcgggaggaatgacgccgcttctggatcgcgacggaaagccggtcgtttcgccggtgataaatggataaaaaggaactgccgcaataagcataccgtgttttgcgttgataagtaatattatcagaaatagacacttaaaagttccagataaacatgcggcggcaaattctgaccgcaaaatccggtatttctaaccatgccgcagctggcatccgtgatgatccgtgtctttccaagtttggagcactctacggactgtgtgcgcaagccagcagacaattttaggacttttgtgtgtgtcccttattggcacctctgaacaaaacataaccgcgcgaagccgatgtctgagttgccatctgccatatttttaatagcagatggcgacgagtttcggttcgcgcggttttatattgtctgtgaagaggtgccattagggacaccagaaagtccgctca

SEQ ID NO: 11532 - DNA, 8881 bp, Unknown
  gut microbiota DNA sequence
gcggacacactccgtgagtgtccaaacgtggccaagacacggaatgggatgccagccacagcatggaagaaatacgtgaattttgcttcaaagaatttgccgccgtctgtttattctggaacttttttgttctctggtcttctaataatattacttatcactccaaagaggtctatgcttattgtggcaattcctttttacgccaatattatgccgcctgaccggcactgctctttccaaacagcttctttaagcagctgaaggcaaccagaacaccgagcaccattaaaagaacggcaacgatgaactgcagtccgtcgacgaggaatgtcgcctgaccgccggcaatgtttttcaccagagcgatcgtcttctggatcagcgcggtgaacgtcacggcgagcatggcaaacatcgggatgtagagcgtccagccggtgcgtccggtcgtttttaagaagactgccagtgcgatcaggacgagtgcggcgagaagctggttcgcggaaccgaacagcggccacacattgttatatccgccgagtgtcagcagatagccgaagaacagggtgatgaccgtggcaaaatatttgtttgtcagcacgcgctgcagcggagacatttttgccggatcggtggtatcgccgtagaacagttcctggaaggacatacgcccgatacgtgcgacggaatccagggaagtcagcgcaagcgcggagacgcacatggtcatgaagaccgtggcaacctgtaccggaagaccaagcttctcgaggaaaccggcaacgccggaggagaagatggcgaacggagttccgtccggtttggttccgtttactgcaacagcgccgacaacgacgagggagacaatgcctaacagggactcaacaaccattgcgccgtagccgaccatcggcatatctttttcgttgctgatcgtcttggaggacgttcccgaggagaccaggctgtggaaaccggagacggcaccgcaggcgatcgtgacgaacagcgtcgggaaaaggctgctgccgtttacggtaaagccgttaaaagcgtttaactgcatggcaggatgagcgacgagaacgccgaccaccgcgccgatgatcatgccgagcagcatgaacgttgtcatataatcacgcggctgcatgagaagccacatcggcatgacggatgccagaaacagatacgccatgacaatgtagatccaggcggatttggtggtgcagatcggaagtgccatacccactgcaaacatggcaacgagcagcgcgattgcaacaaccgcttttaccacttcattcatcttgccgacatgcttctggatcagaccgaagacaacggcgacgacgataaagagcatggagatggaagcagcggcggagtttgcgtaggaggtctcggcagtcatgccgtccacgccttttccgacgaacgtgccggcaaccatgtccgtgaacgctgcaatgacaagcagggtaaacagccagcagaacagcatgaagagcttccgtccggtcttgccgatatatttttcaataatcatacccatcgacttgccctcatttttgaccgaggcatacagcgcaccgaaatcctgtaccgcgccgaaaaacagaccgccgatgatcagccacaaaagtaccggcacccagccgaatacggaggctaagatcggaccggtgacagggccggcgcctgcgatggaagaaaactgatgagaaaacacagtaaatctggaagacgggacataatcctcgccatcctcatgggtgtaagcgggagtcttggcatccggatcaatgccccatttctttgccagccagcgcccatagaagagatagccggcacccagtgctacgattccgattaagataatcactaaaccattcattttttttcccgcccgaaggcggctcctttctgatagatcaacattgggcaaagagaaggatggcatttctgtaaaacaaaaacgccctcgtcctgctgcacgaatgtgcagtcaaagacgaaggcgtaagcttccgcgttaccactttgcttgtcgtaaaaaacgacctctcaatctcatctttgcgggcgtaagcctgcagcaataagcttccctgtaacgggggaatcccggtgacacctacttggttcagtgcactgctcgcagaggatagtttctgaaatcgcataccgtctcacaccgaccgacggctctctgtgatgcggggaatcaggaaaccgtgttctgttccttgcatttgctctttgtttgactatgacaatagcactgtgatgtggaaaagtcaagcgcaaatttttaatataagaatcggtaaagacggttgacaaataaaaaaacataatatatagtattcctatcagaacagtatgagaaaggagcgcggcttctatgaaacagatattatgctttggagattccaatacatacggattgataccgggaacgaaagaccgctatgactgggacacccgctggagcggacggatcgggcagcggctgtgggaggatggctgccgcattgtcgaggaaggactgtgcggacggacgacggtttttgatgatccgctgcgggatggcagacggggaacggagcttttatctgtgatcttagagacgcataagccggttgatgtggttgtgctgatgctcgggacaaacgactgcaagacggtgtacgatgcatcggcggaggtaatcggaagaggtgtggagcggctgctcgaccagatcagaagcagtgccccggacagtaaggtgcttttgatgtcgccgatcgcactcggggaaggggttggcgaggaagggtacgatcctgaatttgatgagcgctccgttgcagtgtcaaagtggctgccggacgtttaccggcggatcgcgcatgagcggggcatttcgtttctggcggcatccgaatatgcgaagccgagtacggcagaccgggagcacatgaatgaggaagggcatgccgcgctggcggaggcagtgtatgtaaagttaaaggaaatgctcgccggagagaaagagaacgcacagatccctgcatagacgaatccggcagggagagaggacaaaaacggaatcttacggcagtgtgcctgacaggataaaaagagacgaaagaaaacgcgcagcgggaatggaaggatgatggctgctaaaccgcccgggagcagacggcataagataacagcagaagacgctgctgcgaggaggaagagacatggcagagaaaaatctggattttgacacggtcattgaccggacacataccaattcactcaaatatgattttgcggtacagcggggaaagccgaaggacgtgctgccgctttgggttgccgacatggatttccaggtttcttcctatatacaggaggcgctctctggcaacgtggcgcacggcatcttcggctacagcgaggcggaaggcagctactttgaggcggttgcgggctggatgagtcggcattacggatggaacgtggaggaaacctggctggtcaagacgccggggattgtttttgcgctggcacaggcggtgcgggcgttcaccgagccgggtgacgcggtgctgctgcagcagccggtctactatccgttttcgcaggtaatccgcgataacggcaggaagattgtggataacacgctcgtacagggggaggacggaagataccggattgattttacggattttgaagaaaaaatacgcagtgcgcacgtgaagctctttttcctctgcaacccgcacaacccggtcggccgggtgtggacaaaggaggagcttctgcggctgggtgacatctgcgagcggtacggagtgattgtggtcagcgatgaaatccacgcggatttcgtctttgagggatcgcatcaggtactggcgggactcaaagaaagctaccggaaatttgtggtgacctgcacggcgccgagcaagacatttaaccttgcgggacttcaggtctccaacatttttatccctgatgatgcgctgcggcggaagttcgagcaggcggtcgcggcgtccggctacagccagcttaacaccatggggcttgtggcttgtgaggcggcgtaccggtatggagaggagtggtacgacgcggtgaaggcatatatccgtgaaaatcttacctatgcgcagcattttctggaagaacagattccgcaggtaaaggcagtgaagccggagggaacgtacctgctgtgggtggatttccgcagcctggggctctcaaggaaggagctggaggagctgattgtaaaaaaagccggactgtggctggattccggagacatcttcggcgcggcgggaagaggctttgagcggatcaatgtggcatgtccgcgcagcgtgctgacggaagcactggagcggctcgcgcgtgcagtgcgggaatgtgtcaaatgaccgactgtgtgtaaataagaaccacttatgaaaaatggggtgcaaaggcacctcatttttgttatgttaaatacagttcttgaggacacgaaaacatgccggcagaggaagacacttcggagaggaggagcatgtgaaaatcaatattgaactggacaaagcactggaggagaccgaggtactgatccgggcagcgaaaatgaccgaggaagtcaacggaatcctaaaaaaactggaggagccgtcgatgcagatgatttccggttttgcgggagatacactggagatactggagcaggcggatattatccgcgtatacgcggcaaaaggaaaagtctatgcggtgacggcaaagtgcgaatatctgcttcggatgcggctttacgaagcggaggaacggctggatcagacgcgtttcgtacggatctcaaattcggagatcatcaatctgaaaatggcaaaacggtttgacctgagtttttcgggtacgatctgcgtgaacctcgcgggagggcagacggcttacgtctcgcgcagatatgtggcaaagatcaagcggctgttgggaatatgagaaagggaacggtgagagatatgaaaaagaaagtgttacagagaggattgttcggaattccaaccgggattgcgatcggctatgtgatcacggtcatgatgtcggcattctggggcgacggcagctactatccgtgtgtgcctgcgtttgtggacgcgatggggagtgagatacgggcagttgtggtgcagacggtgctgtgtggtctggtcggcatggtgtatgcggcgggatcggtcgtgtgggaagtggatcgatggagtcttgccggtcagacggcggcgtattttctgattacactcggctcggtgcttccggtggcgtatgcggcatactggatggagcgcagcgtcgcgggcgtgcttggctacgtcgcaatcttttgtgcgatcttcgccggaatctggatttcccagtatcttggatggcgcgcaaaaataaatcgtataaataagaaaatagcgcttgacaaataagatttcgcgtcctataatcaattcatacaaaacatagtagttttataggaaaataaaaaaccatagaaacggaaatgaattgagaacaggaggattttattatgagtaaaattgctgagagcgcactggatctgatcggaaacacacctttattaaagctgaaccgctattctgcggaggcgggcgtaaaggacgcaacaatcttaggaaagctggagtatttaaacccggcaggctccgtaaaggatcgtatcgcactggcgatgatcgaggatgcggagaagaagggcatcttaaaaccgggcgcaaccattattgagccgacctccggcaacacaggtatcggacttgcagcagttgctgcggcaaagggctaccatgccatcctgacattgccggatacgatgagcgtagagcgcagaaaccttctggcggcatacggcgcagaactggtactgacagagggcgcgaagggcatgaagggcgccatcgccaaagcagaggaattaaaggagtccacaccgggcgctgtgatcttaggacagttcgtgaacccggcaaacccggcggcacacaaggcaaccacaggaccggagatctgggagcagacagacggtaaggttgatatctttgtagcaggcgtaggtaccggcggaacggtaaccggtgtcggcgagtacttaaaggagaagaatccgaacgtgaagatcgttgcggtagagccggcgaccagcccggtattatccaagggcacaccgggtgcgcacaagattcagggtatcggcgcaggatttgttccggatgtactcaacaccaaggtgtacgatgaagtcatcgccattgagaacgacgacgcatttacagagggaagagcgtttgcacgcagcgaaggtatcctcgtaggtatctcttccggcgcagcattaaaggcggcagccattctggctgcaagaccggagaacaagggcaagacgatcgtggctctgcttccggattccggagacagatatctgtccacctccctgtttgcaaagaactaggagaccgctcgaagagcaaatgccggatcctttggcagcacgggttttgcctgtgccgccggagggtctgtttttgactgtggaaagtgcggagggtctgtttttgaccgtggaaagtgcggaagacctgttattgcatgggaaaagtgcagggcgccccggaaaaacaggcgcagagacaggaaaactctggacatttgccgaaaacatgatatgatatcaaagtatcacaatgacaatctatcgtgacaggtgtcttgtcacctaaaagcggatgtatagagaacggagataaaaatggaagcagagagagcgaagcggatcaaggaattgcagaaagagaaggatgttgtcattcttgcgcattattatgtggacggtgccgtgcaggagatcgccgattatgtgggtgattccttttatctgagcaaagttgcgacaaaggtgccgcagaagacgattctgtttgccggagtgacgtttatgggcgagagcgcgaagatcttaaacccggataagacggttgtgatggcggacgagtgtgcggactgcccgatggcgcatatgattacggcggaccggatcgcggaagtgagagcggagtacgaggatctggcagtggtctgctatgtgaactccacggcggagatcaaggcggtatcggatgtgtgcgtgacctcctccaacgcggtgaaagtcgtgtccaacattccacagaagaatattttcttcgtgccggacaacaacctcggcagatatgtggcggagaagctgccggagaagcatttcattttccacgatggcttctgccatgtgcacaagagcattcacgcggcagagctgcaggcggcaaaggatgcctgtccggaagcactggtgctgacgcatccggagtgtaccgcggacgtggttgcgatgtccgatttcgtgggaagcacgtcggaaatcattgattttgcgacgcagagcgactgcaaaaagttcatcatctgtacggagatgggcgtattctttgaactgcagcagaagaatccggacaagaagttctactcggtgggacacagacagttctgcccgaacatgaagaaagtgacgattgataaagtcgagcaggtgcttgagaagctcggcagcggagaactcgaggagatcacgctctctgacgagatcctgacccgtgccgcaaagccgctgcagcgcatgttggaacttgcaaaatagcggcggacgctatatgatagaagcggacaggcgtaaacgttataatatacaggagtatctatgttaaatcaattttccagaacagaattattattaggaaaagaggctatggagcggctctcgcgtgcgagggtcgctgtttttggcattggcggtgtgggaggctacaccgtggaggcgctggtgcgaagcggtgtgggagccatcgatctgatcgacgatgataaggtctgcctcaccaatctgaaccgtcagatcatcgcaacgcgcagcaccgtgggaaaatataaggcggaggtcatgcgtgaccgcattctcgacatcaacccggactgcaaggtggaggtgcacaagtgcttctatctgccagagacaaaggacgagttcgatttttccagctattcgtatgtcgtggatgcagtcgatactgtgacggcaaagattgcgctggtcatgcaggcgcaggagacaggaacgccgatcatcagcagcatgggcgccggcaacaagctgaatccggcaatgtttgaggtggcggacatctataagacgtcggtctgcccgctggcgaaggtcatgcgccgcgagctcaaaaagcgcggggtgaagaaactgaaggtggtgtattccagggagcagccggtcatgccgatcgaggatatgtcgatcagctgccgtgcgcactgcatctgcccgccgggagcaaagcataaatgtacggagcgccgtgcgattccgggttccaatgcatttgtaccatcggtggcagggttgatcattgcatcggaggtcatcaaggaccttgcggcagaatagagaatgagggacaggcatgtatcagagaactatagaagaactgcagaaggacgagcgggaaaaagtaatcatagacatccgcagagaagctgattttttgagagagacatatccgggagcgaagcatatctattgggaggagttcgaggcgcataaggacgaggtgcccaaggaccgcccggtctacctgatctgctatacgggagagcgcagcgacgagctggcgcgcgagcttttagaggagggttatgaggtatacagtgtgcagggcggataccgtgcgtacctgcgcatgaagctgttagaatccatggaacagac

SEQ ID NO: 11533 - DNA, 9982 bp, Unknown
  gut microbiota DNA sequence
tgctccaaacttggaaagacacggatcatcgaagatgcaaacatccggctggttagaaatgccacatttttttgatccgaatttccacctgcatttccatctgaaatcccacggtgtgatcttataatattacttatcacacaaaagtgactatgcttattgtgacagtttctttaaaaaaagcctcatgcggtcttcccatggaagaaccgcgtgaggctttttcacatattcgctatcgcctagatcgctgtcacaactccgttttcgctgtcaagctctacataagcgctggactttaatacctccagtgcgttcttggcaccaatcagtaccggtatatccagactgagtcccgcgatcgccgcatggcagctgtcgctgtctgcctccacgatgagtccggacgcctgacgcatctgcttcatcatgcagttgttggtatctgcagcaacgatgatgtctccctctttgaaatttgcaagatcttcctcgctgtggcagacgcacaggtttgctgcaatcttcttacctgcaattccttttccttttaccaggatatgtcctgctacctgcaccttgatgaggttggtcgttccggatacgccaagcggtacgccggcagtcagaacaaccacatcgcccttgttgatcagtcctgctgtctctgcagtatcgactgcatagtcaaacagttcttccgctttgtttttctgttcaagaagcagcggtgcaacgccccatgaaagtccgagctgacggtatactttctccgtcaggcatgcgccgatgatcggagaatacgggcggtacttggagatcatgcgtgccgtgcgtccggacttggatactgccagaatcgccgccgcattgaggtctcccgccatcatacaggttgcatgggaaatcgcgttcgtcacgtccgggctgctcatattcttgcgatccttgaaacgctgcagatagttgatatcgcactcggtgcgaaccgcgatgcggaccatcgtcttcaatgcctcgatcggatactggccggcagccgtctcaccggaaagcatgatcgcacttgttccgtcatagattgcgttggcaacgtctgtcgcctccgcacgggtcgggcgcggatgcttcatcatggaatccagcatctgggtcgccgtgataaccacttttccggcgccgctgactttcttgataatcatcttctggatgaccggaacatcctcaagcggaatctctacacccatgtcgccgcgggcaaccatgataccatcggaaacgcggatgatctcgtcaatgttctgcacgccctgcatgttctcgatctttgcgatgatatggatgtcctcgccgcctttttcttcgagaatcctgcggattgcaagcacgtcatccgcgcagcgcacgaaagaggctgcaataaaatcatagtcgttctccaccgcaaatacgatgtcgccatagtctttctcgctgatgtacggcatggaaagctccacattcggaacattcacaccttttttattggaaaccataccgccgttcataacggtacagacaatatccatcggcattttgccctctgcgtctgcctttgcacaggatactttctggatcttcttgacttccagaccgatcagtccgtcatcgatcagaatggtatctcccggcttcacatcgtccggcagttccttgtatgtgatcgccacacggctctcatcacccacgatgtcctccgtcgtcagagtaaatgtctgtccgttcttcagctccaccttgccgcttgcaaactctttcagacggatctccggtccctttgtatccagcagagccgcgacaggacgcttcatctccccgcgcagcttgcgaagcatcgtaagtcttccaaactgctcctcgtgtcctccatgtgaaaagttaaagcgcgccacattcatgccttcctcgatcaggctgcgcatcacattctcatcatccgtcgacggtcctaacgtacatacaatttttgtctttcttaacataatattcctctctttattattctgtcactttattttgtaatcatggtgcccatgcccggagttacctggcttccatccacgtgaagctttgtaatcaatacggagcggatcgccgaatcaccgataaagtcgatcgcagcctgaatcttcggctgcatatccccctcgccgaactgtccctgctccatatatttctttgcttccgccactgtcatggaactcagcgggcgctcattctctgtgccgtagtccaggcacacattgtctacacttgtcagtatcacgagcatatctgcctccagaagttctgcgagctttccggctgccagatccttctcgatcactgcacttgctccctttaaatgattgtcctgagaaagaaccgggataccgcctcctccacaggcaacaacgatctgatccgcatctgtcagcgcgcggatcgcatccacctccacaatatcgaccggcttcggcgctgccacgatacggcggtagccgtctgccaccttcgtcacatggttgcccttcttctcctctgcttctgcctcttcctccgtcatcacacggccgatgatcttgcttggcttatagaatgcctcatcgtacggatcaaccaccacctgtgtcaggatcgtggatacagtcttgtagatacctctgttcagaagctctgcacgaatcgcattctgcagatcatatccgatatatccctggctcatcgccgagcagacagacatcggagtcgccgtatattccggatacagacgacagaactcattcatcgcagtgtgaatcatgccgacctgcgggccgttgctgtgcgtgatgaccacctgatagtcctcacggataaaatcagcgaccgcctttgccgtgcgcttcgtagcttccttctgctccggcagtgtcgttcccagtgcgtcatgtcccagtgcaataacgatcttctttttcttcatttttatcatcctccaacgcttttatgcgcgcatttgtaatcccttttccctgtatacaccaaaaattttaccagttttattttatcacgaaccctctgtcatgcgcaatggtcaacttgtcacggaagcgttaaagtttgccgcaccagaacgcaaaaagcgggaaccgcacacacgtttttcttttgtatgtgcgatccccgccctgtattttctaatctcccgtttttccggctgaaattcaccggaattcgtcctgcccggacatctgcccggctcctactcgtcctgcggcaggacaagcgaatcgatcaattcccagatctcctctctcccctgcttggtctccgccgagaacggtatgatcgtcgttcccggctgcacgccgagtccctcacggattgccttgacatttttctgaatctggcttcgcttgatcttgtccagcttcgttgcaatgatgatcggggcaaatccctgatacaccatccactcgtacatcatccggtcgttggcagacggatcatgcctgatatcgatcaggagaaagaccgccttcagacgcttggatgtgtgaagatagttctcgatcattttcccccactttgccttcacttcctcggacgccttggcatagccgtaccccggaagatccaccagatacatggcgtcattgatgttgtagaaattgatcgtctgcgtcttgcccggctgtgcggaggtacgcgccagcgctttccggttcatcagcgcattgatcagcgatgattttccgacgtttgactttcccgcaaatgccacttcattgtaggccgtatccggtatcttgctcgtaattccgcagacaatttcaagatttacatttttgatgaccatgttctactccttcttttcgcaaaaagcgacacgaagcacctgctccattgtctctacatagacgatttccagtccctttttgatctcacctgatatttcctcgacatccttctcattcttcttcggcacacagaccgtacggactccggcgtttttggccgcaagcagcttctccttcaatccgccgatcggcagcaccctgcctcggagcgtgatctctcccgtcattgcaacatccgcccgcaccggtgtcccggtaatcgccgagagcattgccgtcgccatcgtaatgccggcagacggtccgtccttgggaactgcaccttccgggatatggatgtgaatatcatttttctggaaaaactccgccggaatgtcatactgtccgccgaccgaccggatatagctgattcctgtctgtgccgactccttcatgacgtcgcccagctgaccggtcagctggaattcacccttgccgggcatcacgttgacctcgatttccagcgtatctccgcccacactcgtccatgcaagtccgcgtacgattccgacctcatcggtctcgccgcgcatatcctggctgtatttttccttgccgagatacttctcgagattgcgcaccgtcacatcaaccgtgctgctttttccctcgtagatctcgcgcgccaccttgcgcgcaatctccccgatcctgcgctccaaccctcggactcccgcctctctggtataaccgcttatgatcttcgcaagggctccgtcgctgactttgaactgatcttcctttaagccattacgttccgtctgctttgccagcagatgttctctcgcaatgtgaagcttttcgttctccgtgtagcttgtcacctcaatgagctccatacgatccaatagcggtctcggaatcccctgcatggagttcgccgtcgcaataaaaagcacctccgagaggtcaatcgggagctccacatagtgatcccggaacttgtgattctgttccgaatccagcacctcaagcagcgccgaggcagtgtcgcccttatagtcactgctcatcttgtcaatctcgtccagaagcatcagcgggttcttcacaccggcgctgcgcagaccgttcacgaggcgtcccggcatagctccgacgtatgttttccggtgtccccggatctccgcctcatcgcgcacaccgccaaggcagatccgcacgtatttcttatccagcgcacgcgccacggagcgcgcgatacttgtcttgccggttcccggcggccccaccagacagatgatcgggctttctcccttgctcgtcagattgcgcaccgcaaggaactccagcatacgctccttgactttttccagaccgtagtgatcttcctccagaatccgctctgcgtttgcaaggtctttgttgtcctcggacgctttattccacggaagctccagcagcgtctcgatataaccgcgggtcaccgcgctctccgatgaattcgcgctgatgctcttgaagcggtcaatctccttcttgatgcggtttttcacttcctggtcggcatccagcgcatccagtgctttctggtactcgtccgcatccgattccgtattgtcctcgccgagttcctcccggatgagcttcatctgctcgcgcagtatgtattccttctggttcttatccacgcgctctttgactttgctctggaattcattctggatggcagtgatttcaatctcttttaaaaggagcgccatcaatacctcatagcgctccgtaagtgtcattgcctccagaatcttctgcttttcttcgtaagaaaccggcagattgttcgcaacctgatccatcagcttcggcagatcctgtatggtaccgatctggcgcagcaattcttttccggcacgcggatttactgtctgataccggctgtatgtctcctgcacgctgcgcaccatcgcagctttggcctcttccgaaagcccctcctccggcagcacgcacggcgccacctctgccagaagatacggatccgtctgtgcaaaagccgaaaattctgcacgctcgataccctcaaccagaattcttacgatattgttttgtaatttgattacctgctttacttccgcgatcacaccgatatggtatacatcgtccgctcccggttcttcctgctcgacatccttctgcgccgacaggaaaatcttctgggaatccatcatgcactgttcgatcgcacggatggaccggtcacggctgatgtcaaaatgcgcgatcattcccggaagaatgaccatcccgcgaagcgcaaccgcaggtatttttaagatttctgtatccaacatatcctctatttttcttctatggtctttaatttctgctcctcaatggaaagcttctcctccaccagatccttggtgatctcacactcggtgatgctctcatccgacggaatatggtacatcagatccagcgtcacagcctccataatcgcgcgcagtcctctcgctcccgtcttgcgctcgagcgccttgtcagcgatcgcctccagtgcgtccgcgtcaaatgcaagcttcacgccatccagctcaaacagcttctcgtactgtctggtcagcgcattcttcggctcttttaagatgcggatcaaggcgtcgcggtctaacatatccaaagataccgtcaccggcacacggcctatgaactctgggatcagaccgaacttcacaaaatcctgcggcagcgcatgcttcaacacatcgccgatattgtactcattctttgacttgatgtccgcgttgaaaccgattgccttctgatccatacgcgtctcaatgatcttctcaagtccgtcaaatgctcctccgcagatgaacagaatgttcgtcgtatcgatctggatcagttcctgctgcggatgctttctgcctccctgcggcggtaccgatgcaatcgttccctcaaggatcttaagcagcgcctgctgtacaccctcgccggatacatctctcgtgatagacacgttctcggacttcttggagatcttatcgatctcatcgatatagatgataccgtgctgtgcacgctcaatgttgtaatctgccgcctgaataatcttcaagaggatattctctacatcctcaccgacataacctgcctctgtcaacgttgtggcatctgcaatcgcaaacggcacatttaagacacgcgccagcgtctgcgccagcagcgtcttaccggaaccggtcgggccaagcatcaggatgttgctcttctgcagttccacgcccagatcgtcccctgccataattctcttgtaatggttatatactgcaacggaaagaacctttttcgcctgatcctgtccgatcacataatcgtccagaaacgcttttaattcttccggttttaaaaggttgatctgctccgtctcttctgcggtgccggtctcttcctcgttctcaaactcttcctcaataatctctgcacagatgtccacacactcatcacagatatatgcccctttcggtcctgcgatcagcttgcgcacctgtccctgagattttccgcaaaaggagcagcggatctcatcgtcacttcttcctgccatttttaactattctccatgttctatcttacttcctgccaaaatcaggtcttatttgctttcttccttcttggtgtccttgcggatgatgacatcgtcgatcagtccgtacgcctttgcctcctcggcagacatgtagtaatcgcgctcggtatcggcagcaaccacatcgtacggcttgccggtgttggcagcgagaatctcatttaactttttcttggtctttaaaatgttctccgctgcgatctggatctctgtcgcctgtcctttggctccgccggacggctgatggatcatgacctccgcattcggaagcgcatagcgcttgccctttgttcctcccgcgagcaggaatgcacccatgcttgctgcaagtccgatgcagatggtggacacatcacacttgatgtactgcattgtatcgtaaatcgccatacccgctgtcaccataccgcccggggagttgatgtaaagctggatgtccttgttcggatcttcggactccaaaaacagaagctgtgccacaacaaggcttgccgttgtctcattgacttcctctccaaggaaaataatacgatcttttaacaggcgggaataaatatcataattgcgttctccgcggctggtctgctctacgacgtaaggtactaaactcatattcgatcctccattttatacttttttaataattacttataagcttaaacagaccggcccaatagagccagtctgtctgttttgcaataagaactgacaggggaattactcctctgttccctctttctcttctgcttctttttctttcttggattttgctttcgctctctccttcacgttctccatgatcaggtctactgccttggtcactgcaaggtctctcttcatggaatccttctcgttgtcgccgatgtactctttgagcttgtcagcttccataccgtactgtgctgccatcttctcaatctcagcatcaagctcttcatcggtaatctcaatcttctcatcctttgcaatctgctctaataccaggctgctcttgatgcgtgtctcagcttccgggcgaacctgctcttttaacttgtcgagtgtcagaccggagaactgcatgtactgctccatggaaagaccgctctgtgccagtctctgagcaaattcattgaccatgttctcacactgtgtctcgatcattgcctccggaatctccatggtggacttgtcaatgatcttctggattgcctcgtcctccttggtcttcttagcctcgttctccttctctacctcaaggtgcttcttaacgtcagccttgtactcctctaaggtatcgaactcggatacatcctgtgcgaactcatcgttcagttccggaagttccttgcactttacttcgtggatcttaaccttgaacattgcaggctttccggcaagatctgctgcctgatacttctctgggaaggttacgtttacttctacttcgtcgccggcattcttgcctacgagctgatcctcgaacgtatcgatgaaggaatgggaaccgatctcaagcggatgattctcacccttgccgccctcaaatgcaacgccatcaacaaatccctcgaagtcgatcactgcggtatcgccgtttgcgatcggtctgtctgtaacggtaacagttcttgcgttgttatttctctctttctctactgctgcctctacctcttcgtcagatacggaggtatcgatcttggttacctgaacaccaagatacttgccaagctttacttccggtcttacagcaacctctgctgtgaagatgaaaggcttgccggactcgatctgtaccacgtcgatggtcggtctggatacgatgtcaataccgctctcctctactgctgcaggatagttctcctggatcagggtgtttgctgcgtcctcatagaacactgcctcgccgtacatcttctcgatcatctttctcggaactttacctttacggaaaccaggcatgctgatcttgcctttttctttcaggtaagcagcctggattgctttctctacttcttcggcagccacttcaatggtaagctttgccatattcttttctaagttttctacctgtacactcattgtaactatcttcctccttaatatatatgaaatatcatgtacatcttccgtccatcgcatgacattcgtcacgccagtcgcctgcagcccttttttaagggttcctgcctgtctttcggaaaaaagggcgtactacgactatcacagtcatttaaggattataacatacaagaccggaaaatactagcttttttttgatttctttgcggtttttccgccaaaaacacgccctagagctccacaccgcggtgttctacagaggtagagaacacaatcagcgtctttgtccgtccaaaatactgcaattccccgataaaacggtcgagttccatcgtattttcaaacaaaacctccagcagcatggaatagtcgccggtcacacagttacactcaatcacgttttttttcacggtacacccttccg

SEQ ID NO: 11534 - DNA, 16319 bp, Unknown
  gut microbiota DNA sequence
tctttttccgctccacgctccgcagctgcttcttccgcgcgatctcttcccgtcgcttcgcatgcgccgcctccgccagaagcttcttatagttaagcagccggcgttccggcagtcttccgtcccgcactgcctcctgcaccgcacaccccgtctctttttcatgtctgcagtctctgaatctgcaatgctgcgccaattcctcaatatccgaaaatgtcgtatccatcccgcattttgcatcccctacgccaagtacgcgcattcccggtgtatctatgacacgggagccatccggcagaaggatcatctgccggtaagtcgtcgtatggcgtcctttggaatcatcctcccggatcgcgccggtatccataaccgtctccccacacagcgcattcacaaacgtggatttgccgacaccggatgatcccagcagcactaccgtttttcccgcacccagatagcgttgcacgtgttccatcccttcgcccattaccgcacttaccgcacacactgcaactccctgcgcctgcctctccacaagatttacataatattccggttcctcgcagagatcttttttcgtcagtatgacaaccggcgtcgccccgctctcccacgcggctgtcagataacggtccagccggttctggttaaaatcatgattcatcgacatgaccagaaacacatagtcaaagtttgccgccaccgcctggcactccatgccgggcgtcggattttcccggtaaaacacgctcgttctgggaagcgtctcaaggatcagtgcatccccgcaccggtttgtctgaatacgcacccggtcacccactgtcggaaatgcctccccgcccttgtcctgataatacacaccggtctttaacctggcattaagctttgtatctgacgtttcctgttccacaagaatctcataacgttctctgtgtaccgctgtgatcagtgccgtcgctttcgtattttctgttttatttcctgtatgttccatccgttttcctctttcctctcaattttccattcactatttctttccattcctacaatctccattctgtttttctccatttttacattcctcctttattaaaagaatctcgcttgcgagattctccgcgcgcgagcggttcgcaaagcgatattttccttaccgcgagctgcgcatcctcgcggagcgttttttatttcataggaaagttccactttcacacatgaatgtatcacggtatttcctatgaaattaaaaagcattcctaccacattcctgcaccgcaatgcttctgccttcattcattctgttttttgtgccggattgccgtttccagattgtaaaaagcaatcgacggcttgcaacacccatttttcaataagcattgccggcttgcaacatccatttttcaacaagcattgccggcttgcagcctccgggtttttcagcataatcgcagatttataccagacgcttcaccataaagtgatcgtccgcatagctgccgtcccgataccggacactgtgcggctgcgttccccagatctcaaacccgaggctctcgtacagtcggatggcaggtgtgtttgtgctcaccacttcaagttctgcctgctcatatccgcactgcttcgccaccgtaagcaccgtctttagcatttccctgccgattccgagcccgcagtatttctgatagagggcaatcgcaacactgcagcgatgcgcatagcgctcataatttcccagagacatcagggaacagtttccgacatgttctccagcaacggttccgatcaacatcagttcccgcggttcttttacgattccttctataaaatgttcctcctgctccggtgtaagactgatctcatccggctcacgtatcagaaatggcgtctccccggcagtcactttcagataccggatcagatcatttgcatccgacactgctgcactgcgcagaatacagcttcgcccgtcccgacaggtaatttctcttggttcataaatcataattgggtctcctccctgtgatctgtatcactccggcactttattttttccacattttcttccgtgatcgtcaaaaagtcgatctgcacggtatcgctgccgccgcaaatcccggcaaaaacaggtttctctgacacgatgcgtcatgatagtcccggcttttccgctttttgtgcatccaccggaatcggtttttccactttttgtgcatccaccggaacatgcttttcctcttttatgcatccaccggaacatgcttttccggtgtcagaccttacctggctgcgtttgcatgtattacgcatcctttagatcgattcctgcttcccgcagatttcttcgcagttccggcatatcctgatgataaacgcatccccgcattcccaggcgtatccccgcttcaatgtttgccggcgagtcgtccacaaaatagctttcctgcggctcaatcttcattttccggaagaaatccacatacgcttcgcgttccggcttcagatatccacactcacacgaaatccagatgccgtccatataccctacagacggaatattttttgaaaatgcccggaaacggtgtgatgtatttgacatcaaaaacaaatggtacccctgttccttcaactctcccagaagcgcctccatcggcggattcggctcctgcttcatccgaaactccctcacgaaacgctccacaagctcccactcactctgcggaattctcttgcaaatggaacgtaccgcttcctcatcggtcattgttcctctgtccatgcaaatccactccaccgatgcacaaacctgatttttcaacaatgctgcctgcgcttcatcctctgtatatgtcccgatgtaatcgctcagcttatattttgtcagaacatttcccatatcaaatacgatatttttcattttatctccatattccgttgacctgctgcgtcacattgttccggcgcatgcgcgtactcttatctttctatgtcgatccggcgcatgcgcgtacttttatctttctatgttgatctggcacatgcgcattgcgtcgagcgctgtctcgtggcttttcggcgttacccctgcacagcaggatgcatccacgataatcggtgtctccggcaaaaatgctttcaataacaatgcatttgagatcacacaaatgtccgtgcagagtccaaccagcgtaatgtcctcgatctgctcttttctgttctcctcctgcagcaactcgccaagcttctccgaaccgaatgtcaccttatcaatcgcctccgcctcccggagcgcctctagctgcggacagatctcccagcctttcgtgcccttgatgcagtgcggcaccggaagatgttttccctcctgtgtctctaaataccgctctccatgtgtatcccgcgtgaaaatcacttttcccggaaactcgcggattttctgctccacctttggaacaatggcgaccgcctccggtgttccaagcgctccatcgataaaatcattctgcatgtccaccacaatcaatattttctgcatcttttctcctccttctgaaacttcgcgggtctcacgagctctttttcctctctcagacccgcagggcacctctttttcacgaatttcttctgtttttcgctctccgcgggtctcacgagctcttttttctttcctagacccgttttttctcttttttcgggtctcacggtctttttttcccctctcagacccgcagggcacctctttttcacgaatttcttctgttttttcgctcttgttttttcgctcttcgcgggtctcacggcctcttttttctcttctagacccgcaggggaaacctttctaactcggctgcagaccaggtctactcgtccaactcagttgcagaccaagtctacctttccagcccaaccgcacccgcagccgcaacgcctcatcttccaattttttattccagccccgcgaactgcgccatgtaaagatcgtaataagcaccttttttcttcatcaactctgccggacttccctgctctaagatgccgccctggtcgatgacaaaaatgcggtctgcattctggatggtcgaaaggcggtgtgcaatcacgaaactggttctgccggacagcagtgcctcaattcccttttgcacaagaatctcggtgtgtgtatcaatactggacgttgcctcatccagaatcagaatcttcggcatcgagatcatcgtccgcgcaaacgcaatcagctggcgctgtccgatcgaaagtcctgctccgtgttccttcaactccgtgtcataccctttttccattttcataatgaactcgtgcgcattgaccgccttcgccgcggcgatcatctcctcatccgtagcgtcaagctttccatataaaatgttttcgcgcacagtgccgtggaaaataaaattatcctgcgtcatgacacccatctgccgccgcagactttcgatggaaatcttcgtgagatcgtagccatccaccgaaatgacaccatcctcaatgtcatagaatcgactgatcagattcacgatcgtcgtcttgcccgcgcctgtcggtccgacaagcgcaatcgtctctcccggctccaccacaaaactcacatcggaaagcacctttgtctccgccggcgttcccttatcgtatgtgaagctgacatgggaaaattccactcttccctgtacttccggcagttccgtaacgtctgccgcatccacgatatctgcctttgtatccagaatatcaaaaattcgctccgccgccgttaagtttgtcaccagattattgtaaaaattactcagattcataatcgggttccagaacatattgatgtacgtgccgaatgcaaccagaagtccgaccgaaaccttttcaaaaccgagaaagcggacgccgaccagatagagcatcatcgcgccgattccccagcagaaatcaatcaccggtccgaacatatccgcatagcgcaccgcgtccacgaacgactgctgatgctcatcggtcagatttccgaaaatctctcttgtctcctcctcggcaccaaaactctgcaccacattcattcccgcaatgtcctcatgcacataggcattgaggttggatgattttttgcggaaaatctgccagcgcttatgcgaggcagtctgcacaaaccagatgccgccgatcatcagcggaatcgtgctgagtgatgcaagtgccagacgccagtcctttatcagcatgatcaccacaacgccgatgaccgtaatcagttccggaatcaatgttgtcaccacatttaccagcacatcccgcagcgaattcacatcaccgatgattctcgccagaatctttccggtcggtctgctgtcaaaaaaggaaaacgacagcgtctgaatgtgttcgtacagatcctgacggatgcgcagcagaatcttgttcgacaccaccgccatcacatacatacggatcttcaccataatgataaaaataatattcagtcccagcgcaaacagaccgagtcccatcagccccctcatatctttatttgcaatataatggtcgatcgcctcctcaatcagaagcggattgaccagtgaaatggcaaccgtcacagccatgcagagcagcacgccgatcaagattgctttataatccagtaagtaggagaacaaccttcggaaaatcttctttttgtcagtgttctccataaattcatcttcacgataggaattaactgccatgaactctcatccccttttcctctatataaacctttccatccctgccgttcgcctgccctcagcagcacgctgctggtgccggctctcctgcagaggcgcttacagaagttctcattcgctgcgcccgctcgggcggcttcgcctccctcgctgtgcggcattcgccgcatccctgccgttcgcctgccctcagcagcacgctgctggtgccggctctcctgcaggggcgctgctcattgctaacgcaccatactgtgccatgtaggtgtcatagtacaagcctttctttgcgagaagctcctcgtgtgtcccgcgctccgcaatctttccgtctgcaagataaataatctcatccgcatgacgcaccgccgagatgcggtgtgcaatgataatctttgtcgtatcgcgcagagcgtttaacgtctgctggatctcatgttccgtctccatatcaagcgctgaggtcgagtcgtcaagcaccagaatcgggctgtgctttgccagcgcgcgcgcaatgctgatccgctgcttctgtccgcccgaaagtccgacaccgcgctccccgatgacagtctcatactgttcatccatcttctcaatgaacccgcgcgctttggcatcctctgccgcgaggcgcaccgcctccatctgaagttccttgcgctgtcccatcttgatgttctcctcgatcgtatccgagaaaaggaacacatcctgcaaaacaaccgcgatgttgctgcggagctgatgcacatccatctttcgcacatccacaccgtcaatcttcaccgcgccgtccgtcacatcgtaaaaccgctggagcagattgacgatggaggatttgccggagccggtcgcccccatgataccaagcgtctttcctgccggaacggtaacattgatgtcctggagaatcttctgcccgtccatgacaaagcccgcgtggtcaaaacagatctctccccggatttcgtcaagcacctttggatgctcatcgtttttgatcttcggctgctccgcataaatcttgcggatcttcttataagatgccaccgcggacgacacatcgttcgtcagccagcccagcatctccatcggccaggtacagttcctgctgtactccacaaacgccaccagcgcacccagtgtcatctcaccgttcatgacaaaaataccgcccaggatcgtcgaacaaaccggaagcacctttcccacaaacgaaaacagcgggtaatactttgtcagtacctttgcctgtgaaacattcagttcgtaataccggttgttgtgggataaaaatttttcaatctcatgcttttcccttgcaaacgccttgactgtgcgcacgcctgcaagattctcctccgccacggttgtcagcacggcattttcctcactgatgtcctcgtaaatcttgtcgagcttgcgctccatgatgatcgcgaccgtaccgcacaggatcattgtggcaagcggcacaaacgccagcttccagttgagcgaaaacatgcagtacagtaccatggacacatgaatgataacctcgatgacaagcatgcccacatagcccatcgcattccagattttatccacgtcatccttgacacgcgccatcagttctcccgtgttcgtgtcctcgaaatatcccatggacagcgactggatatggtcgaacagatccttgcgcattgccgatccgatcttggatgccagcacgtcgaacgtgaactccttgcagtagccgaaaatactcctgccgattcccacgatcacgattccaaccagaagtttcgtcaaaagctccagttttccgcctatgatgacatcatccacaatctgctgtgtgatcttcggatacagcatatccagaacgatcgccgtcaccatcgaaaataccgcaaacagatacccataccaatagtgtccgatataggtgtataactttttcattccctaatctcctccttcttgtcagttccccggtgtcaccttcctgtaaaacaaaaaagcgaggggacatcctgttacggattctcctcgcttttgcgtaaaaaaatccgtggcatctttcgatcaccacggtctatcatcaggaatggtattgtcacattttcacgccatccgcatcttctcatacggcatgtgcattacttctgaccgttactccccaccgaggcaatcatatgattctgctttttcacttccacgacgttacttgtaattctactcataatgcttacctctctttccttaaaatttagattacatgttgtcttacaaaaaccagtatacgcatacctctttttaaatgtcaagaaaattctcataatttaccattataatatttgatttcgtgcaaataataggattaggaattacagtaattcattattgtactcctaaatcacaccggaagatgttccgggaaaacagacgacaatatggagggaaaaaccatgagtggatctagcaattctaattccggcacaaaccagatggcagtgccgcaggcaaaagaggcaatgaaccgttttaagcaggaagttgcaagtgagatcggtgtaccgttaaaggacggctacaacggcgacttgacttccgcacaggccggaagcatcggcggcgagatggtcaagaaaatgatcatgaagcaggaagagcagatgtccggcaaataaaccggcttcttctgcccattgcacaaaaaacgggactgtcgctttcagcagacagtcccgtttttatgccctgtttttatcgccttttttatttttcgtgcatccagacgcgcatctggtttaagccgcggttgccccatgcaaaataagggatcgcacgaagcgtaaccgcttcttccttcggcggttcctcggtgtagagttcctccgacggcacaagccgtatccccgccacatcaagcagtgtgagaccggaaagcttgccttccgtgcatacgagaggctttgcatccagttctttttttaccgcaagcgcctgcagattggctccgttgtcagcgccctcaaagcagtagaccacaggtccgcgcatcagcgccacgcatccgacgtcctcgcgcacatgcgtactcgcataaattttgcgcaccggcagtggaaaatgaagttccacctgatcgtcgcttccccattctctgctgatgtacaaatagccatcacggatttctccggcagtatcaaacgcctccccgttgaccgtcacgcgcaggtctttcacataagccgggatatgaatggcaagtgtgaagagttcgtcgatcttcgcggacacatggtaggtcacgcttccctcccacgggtatgcgctctccacgcggatgtccgccttgccgagcgccgcctcctgtcccagaaacagatgggagtacaccgccgtctcgtcctcatcccacgcatattttccaagggaggtcaccatgcggaccaggttcggcgggcagcatgcgcacgcataccagcccggacgctccggaatcacatgtttgtaaccgaaaatctcgccggacacacccggattgacctccagcggattgacgtagaaaaaccgcttgccgtcgagctgcataccgctgatgatgccattgtagagcgcccgctccatcacatcggcatatcttccgttcttctccgtctttaacatatttctcgcaaaaaagaccagaccgatcgacgcacaggtctccgcatagttcatatcgttcggcagttcatactcttttgtgaatgcctcgccctccacggtcgaaccgatgcctccagtgatgaacatctttttctgcgtcatattctcccagagccgtctgcacgctgcaaacaacttctcatcgtgatcctccgccgcaagatctgccatcgccgtatacatatatacggcgcgcacactgtgtcccacagcctcatcctgctcgtagattgtcgcatggctctggttgtactttgtgtcgtccgggatcatattgccaaaatgcgtccagcccctgcgctcggtctcctccttaaagaagttcggattctttccacgctcctcgaggaaatagcgcgccatgtccttgtaggcttcctttccggtcgcatggtacatgcgcatcagaccgatctccacctcctggtgtcccggaatgcccggaatcttatcctctccgaaccggttcatgatatgctgcgccatccgctccatcacgccgagcagcttgtcttttcctgtcgcctcgtaatacgccactgccgcctccatcatatggcctgcgcagtagagctcatggcactctagcagattctgccaacggtgctccggctctttgatcgtgaaaaatgtattcagataaccgtccggttgctgtgcctttgcgataatgtcaatgatgtcgtccgcgcgctgctccaacgccgcatccggcttaatcacgagcgagtacgccacgccttccagccattttgccacatcgctgtcctggaataccatcccgtagaactcaccttccatcagtcctgccgcaatgcggaaattatccagcgcatggctcttctccacgccttcttctttatcgtttaataccctctcctgaaacggtatcacagtatctgtgatcttttcctgcataccgctccagaacgggtctttgatccgaatttgctgcaatgcaatctctttgctcatctcttctcccccatcagttccggtattcacgggtcatttccaattctctggcgagatcctccggcgtcctgtacttgcggaataccttctcgagcacatagtttttcaccagtgcaaacactcccggaaacagtacaatcagacactgtgtgtcgttgcacatcagaacgaacagcacaaacacagctgttaaaagcgccgaccatcccagatttgccaccgccatcacaagtgtcttcttcatggactcccgtatggttccctcaaaccgcgccatatacgccgtcaggtaaaactcccacgccagcgccatagcagaaagtacaataaaaaaataatacagcgcaccaagcgccgagccctgtgccagaaactgtctggtcaccacaaggtccgccgcaagaaacgctgccagtattccccacagcagccatgctcctgtggtctgtttcaaatccgctttcagagccgtacaatattcccggaatgcatagccctgtccatgtacaatgcttttattgaccgcatggtacaccgccgctgtggcggctcccatggtaacgaccggaatgctgcatacaatccacagcgcgccgagaatcaggcagtccgccagtcctcccagtacgcggaaaactttgttgttgtaatcaaaaaactgattcatatgccctccattccggtctaagccattcggttattttttcagacggatgcttaccacgctgcatgccggaatctgtacccggatgccgtccgccgtcttctcgtaatctgcaaatgcctgctccgtcaccacttccggtgcctcaaacgtgttgtgtgcattcatcgttcctgccacaacactcgcctcgcatacgccgtatgcagcgccgtcgtccgtcagctggatggtcacattctccgcagcttccagtgaattgttggtcagtgtcaccgtgatcacgccgtccgtgttctccgatacagactcaatcaccttcggcagttcgttcttgcctgctcctacggttcccgcaccgatcagatcgcttctgagaagagttgctccctgatgatgacgatacatatggaatacatgataggtcggtgtcttgatcatcttctcgccgtcggtcagcatgacagactggagtacgttgatgagctgtgcgatacatgccatctttacacggtcggaatgtttgttgaagatgttgagcgtcatacctgccacaagtgcatcacgcatggtgttctgctgatacaaaaatcccgggttggttcccggctctacgtccgtccagattccccactcgtcaacgatcaggccgatcttcttgtccggatcgtactcatccataatcgcaccgtggcggttgatgagttcgtccatgaaataacctctctttaaggtctggtagaaaatctcctccgtgaagtctgttgcgcttcccttcttattccagtcatcctccacctcaggaagtgtataataatgaagggaaagaccatccatcattccatggaaacgcggctcgcagtgatcaaagcaggtctccatcacctttttcgtccactcgtaatcatccacgttcggtccgcagcagatctttgcgatcgggtcatttccagcatagtttctcacatatgtctggtatctgcggtactcatccgcataatgctgtgggcgcatatttccgccgcatccccagttctcattgccgacaccgaagtaatcgatcttccacggctcctcatgaccgttctgcttgcgcaggtctgccatcggggatacgccgttgaacgtaatgtactctacccactcgctcatctcacgaaccgtaccgcttccgaggttgccgttgacataggtcttgcagccaagctgacggcacagttcaaagaactcgtgtgttccgaagctgttgtcctcgacaacgccgccccagtgtgtattgatcattttctttctggatgctttcggtccgataccgtccatccagtgatattcgtctgcaaagcatccgcccggccagcgcagtaccggaatcttcatttcttttaatgcttccaccacatcggtgcgcattccgttgacattcgggatgtcagaatcctctccgacatagagtccctcataaatacatcttcccagatgctccgagaaatgtccatagatttccggagcaatcgtgctcattttcttgtcgttattgatgactaattttgccatagtaacctcccgttatgtatcagtccctttcaggtttttgctgtcattgattcacatcagccctttacagctccggctgtcattccttcgatgatgtacttctggaagatcaggaaaatcaccaggatcggcaggattccgaacatggaaccggcgatcagcacatcatagttgtttccgtacggtgtcagcaatgtattcaatccgatcggaagggtgaacttttctgctcccttcagtaccagaagcggccacaggatcgcattccagcttcccattgcctgcagaattcccatggaggcgaatgccggcttcgtcagcggaagaatgatttttgtcgcaataccgtactctgtcgcaccgtcaatacgcgccgcatccagaagttctctcggaagtcccgacagatactgccggaagaagaaaatcgtcgatgcgttacatagtccgatgataattactccggtgtaggtatcgatcagatgcagtgcaataatttccttatataaaggaagcatcagaatctcaaacggtaccatcattgtcgcaattacaaggaagaagaggaaattcttcagcttgaaattgtacattgtcagtccatatgccacaaagtagcagatgaacaatgtcagaacgaccgacacgatcgtaataaccagagagttcttataccacataaaatatttctgactgtccgcatttccggaaaacaggtacttatagttatccagattcatcgtacggatatcgagatcgatcgacaatccacggcggatcagctctgttcctggtctgaaagaggcaagcagacctgcgaataccgggaagataataatcaggcttaagactgcgaaaaatcctgtgccgagaactgttcccactgtccgttttgtcttgccgctcttcgggcccttatcgccctttctgttcttctcatctgccatgttatttctcctcattcttaaatgttccatttgcaatcaactgaacgatattgatggcaagtgcgatcactaacagcaccacgccgaccgcgcatgcataacccatatcatttttctcgattccacgcttatacaggtatccaacgatggtgagtccgatgttgttcggtgagttgttgcccgcccataacatgtaggattccaggaacattgccagtccggcatagatggaaatcgtgagcacgtagaccgtcgtcggcttcaaaagaggaagcgtcacatagcggaacttctgccatgcagatgcaccgtcaatctcagatgcctcatagagggaggagtcgatcgccttcagtcctgaaaggaagtagagcatattaacacccgtccatctccaacatgcgactaccagaagagccgtcatacctgaccatcccattttcagccatttataggtaccaagacccagtgcggcggtaataatattcatctgtcctgtcgaatattccgtgaacatcagtcggaataacgtaccggaaataaccacggaggtcaatgccggcatatagaggattgccttccacacaccttttgcttttaccagacggctgtccatcagcactgcaaaaagcatcgggaacggaatcaaaagcaccaacgtaaacagcatgtattttgtgctgttccagattgccgtgtggaatacgttatccttcaacagcttctggtaattggcaagacctacccactctgatttgattgctccgatgtcctgaaagctcattgtcacggatgtgatcaacggatagatccagaaaaatgcaaagcttaagataaaaggtatgacaaaaatatatggcgctactttttccgaatacaagaacttttttaacttcaactcaacaccctctccttcttatgaaaacagggatgtcagaggagaaccctccagacatccccattcccaaaacctatgtcctactgctcaagatcgactgcatcctgtaactcctgaagagcatcagatacatccatgccgtcctcaagtacctcatttaatgttgtgttgcatacatactcgttgattgtcgggctgatcgctacaacagagatcttaccgatgttatccataccgatggaatttaatacatcgtacggatagtttctgaagtatgcgttgtactggttgctgtcgtcatgtgcgaaagcatcatctgtccagcatgcagtgttgcatacgtcgaatcctaatgtatcccagatgttctgctcaccctcatcagacatctttgcccagcaaaggaactctgcagccagatctgtattagcagactgctgtgttacaaccgtacctgtaccaccgataccaacggagcacttctgacctgcctcgaataccgggcacttagcaatgtaccagttgccgctctcctcaggcatatagtttgtgaaacggctcatgtaccataatgccttcgggaaagatacgatgttgtgatccagaatgttctggaaaccagcctcaaggtctacatgtccatccggagaaacctctgcgaagccgctgtctaaccaggactgctgcatctctaacattttctgaacggaatcaagctgaacgtttgccggatcatcgaatccgccggtccagtcatcgccgtactcagccattgccagccataaccagtctgtaccgcctgtatctacggatgtgaagtatttgccttcctcaccgattgctgccacatactcatcaccgagtgcctgataatcatcccatgtaacaacggaatcaatcttagcggttacctcatcctcggaaattcccatagcctctgccatagctgccacgttatagtacattacggttgcgcctacatggtacggagctccataataatgtccgtcctctcctgcgtaggtatccatacgtgccttaaccatggtctccatgtacggagctgcgtagtcatccagcggaaccagccactggtcaagacctgcaaccacgttcgggaactgtccaacctctacatcacagatgtccggtgcaccggttcctgcctgaagtgcggtaagaagctttgtgtgcatatcggcgtacggatatgtcgtacatgtgatctcgatcgtctgatccggatgctcctcgttccaaacctcagccatcttgccgtaatgctgtccgtgaagctctacgaatgtccacatctcaagatgtgttccgttcggatcaccaaatgtgttggtaacaacatctgactctgcggattctgttgcatcctctacagcgtcctctgctgctgcctctgtgccatcccctgttgtgcttcctgaatttgaagcagtggtagaagaatcagagcttccacatcctgcaaacagggatgtgaccattgctgcgcacatcagtgcactgaatactttccttctcatataattcttgccctcctccttgaattataggataataaaataagttgctaagatgatctgaaattcacacaagatctcgtcataagctgggctcattagctatttcgacaatttctttgttcgatttcatttatcttatgtagataatatacaacgcattgcctgcggtgtcaatatttattttatgtttttccaaagtatttttgcttttagctaaattatacaaaattatgaccgatatatcatgtgataacgttctcattttgtgcaacttaacatattgttttgtttttattt

SEQ ID NO: 11535 - DNA, 19679 bp, Unknown
  gut microbiota DNA sequence
ctggcgaatgtgccgcatggcatgcttcatatggaatggtaccgggaggaagaaaatggcggataccgcctgtgttatgtgtatacaccggcaggatatgagaagtatgcaaaacagaggtatcctgttcttattgtggagagctttcggtgggagagcgaatgtgtgtggattcatcagggaaaaatcgccaacatggctgaccggcttatcgcagagggaaaaatgacggaaatgattcttgtgatgcagaagtgcagcaagcggaaagaagcgaggattccggaggagatcattcaaaaataccgggtgataccgggagaagaacatcgggcgacgataaaggcacaggatggatctgactggacatcccgcagacatcagctggcagagcagctgaagaactctttccggtaaggagaaggattgaaaatatggaagagattatattttggatggaagatgcggcagattccggggtaaagaagatagcggataaagttgccggcgatgtggagctggtaacggacagacgcccgcaggtgctgtacggcacatcacaggaagaacttgcggatgtggcagaacgggcagagactgtgattgttccggctacggttggaaaaagcagacttctggagcagatggaggaagaaaagagaatcggtctggaacagatccggggaaaacgggagtgttatggctggtttttcctgaacgatccagaatggcacggaacacagattcttctgattgcagggagcgataagcgtggaacaatctacggactgtttcatctgtcagaacttctgggcgtatctccgtttgtcgactggtgtggtatcaggccacctcaccgtgagcatgtggggcttcgtgcatcgatggcgtgtgtggcgggagagccgtctgtaagataccgcggtttttttatcaatgatgaatggccggcatttggaacatggtgcaaccggcgctttgggggatttggaacttcggtttatgagcatgtgtttgaattgctgctaaggctgaaaggaaactatctgtggccggcgatgtggagcgccagatttggggatgacggcccgggacttgcaaacgcaaagctggcagacgaatacggaatcattatgggaatgtcgcatcatgagccgtgtctgagacagggggaggagtataagtacctgcgcggaaaagattcggtatatggcgatgcatggaatttccggacgaaccggaaaggcatcatccggttctggaaagacggactgcttcggagaggaaaatttgaaaatgtgattaccctgggcatgcgtggagaggcggatacggcaattctcggagaaaaagcaacattggaagacaatattgaactgctgcgcgatgtgctaaaaacgcagaatgagctgatccgggagtgtgtggatgaggacgtaaagcgtgtcccgagaatgcttgctctctacaaggaagtggaagcgtttttttatggaaatgatcagacggcggggctgatgggatcggaagaactggaagatgttattttactgctgtgtgatgacaactatggaaacctcaggacactgccgacaaaggagatgaggacgcataagggcggatatgggatgtactatcatctggactatcacggctggcccatttcctatgaatggatcaacagttcgtaccttccgaaaatctgggaacagatgacaacggcatatgaattcggggtgcgggaactttggattgtcaatgtgggggatattgcaacgcaggagttcccactgtcgtattttctggatatggcatatgattttggacgctggggaagtggtgccgtcaatcagaccgcagagtataccagacagtggacgaggcagcagtttggaagctttacggaggaaatacaggaacagattgcggacgttctgcagggatataccagattgatacaaaagagaagacctgaggcaatgcgtgcaatggtgtatcacccggtgcatggaagagaaacgcaggatacactggaggagattaaacggatacttacggaagcggagtgtgtgtatgcgtgggtgaaggaacatgcgccggaatacgaagcggcgtttgtggcgctcatctattaccctgcggcaggaacactgaatctgaccaggatgcatcttctggcagggatgaatcaatacctggcaaagcttggagcactttgcgcgaatgattacggggatgcggtagaacagtgtctgaagcgtgaccgggaactggtgacggcatatcatcagatggatcacgggcgctgggatggcatgggagcatcggagcatatcggatttgtgcactggaatgaggatgaatgtttaaaccctgtgattcaccgggtactgcccgcggataaaccgagactggttgtgacagtggatcagacgatgcagcatgcagagggaagcccgtggcttacggaatccatgaaactgccggactttttagaccctgcgtgcaggagcgccgggatcaccctgtatgggctgagtgaatgtgaggctgcatacgaggtcacagaaaaaccggaatggctttcggtgtgtccgatgcagggcgtgctggacgggaaaaagcacaattatgaaaagctggaacttgtaatgaaccgggagcgttgggcaatgaaccgggatggaaatacagctacgtctgcttgtggagtgcttgaaataaaaacgccttccggctgctgtcggatcgagataccggtgtgtgaaaatctgccggaagtaccggaaggtacctttgtggatacggcaggttatattgtgatggaggcagagcattatgcagaccggaaggatggatatgcagcggatggtaagcgggaaggaaaaaacgaaaaggtacggtttcaatgcatcagggactatggaaaaacgcggtctgccatgaaagcatttccggtcacagcgtatggtgtgccgggagaaaatgcaccgtatctggagtatcatttctgggtatcaaagcccggcgggtatgtacttacgctttatatgcagccctccaatccggtggcgaacgatcagaaactctgctacggtgtgcagaataacggtggtgagatccggatttataacgcggtacctgagggataccggatcggagatcagggagagttctgggcaaaaggtgtattagaccagatacgcagacaggagattccggtttcatgcagaagtggtatcaaccgtctgcgcatttattccgtcacacctgggtttgttctggaaaagctgttgatccgcccggaaggaacggatgtcccggaaagttatctgggacccaaagagacgtatcacacataaaggaaagaggagaaaaggagtagaacgatggcgggagcatttgagacgggaaagtatcgcaatgtgtttgcagagtacgggtatccggaagcggagattcagagaagagtggagcagatatttgagataattttttatgggaatgaggaggagcgtttctatcatgaggtgggagccgacatggcatacatagaggacaccggcaatcatgatgtgcgcacagagggaatgtcctacggaatgatggcatgtgtgcagatgaaccgcagggaagagtttgaccggctgtggaaatggacccggacatatatgtacatcgaggatggaccatgtaagaattattttgcgtggtcctgtgcaacagatggcagtaaaaatgcggaaggtccggctcccgacggagaagaatattttgccatggcactgttttttgcggcaaaccgctggggaaatggaaccggaatattccactatgcagatgaggcgcgggcaattctgcgggaatgcatccacaagggagaaccggggcatccgggggaaccgatgtgggacacatccaggcatctgatcaagtttattacaaattgtaatttcagcgatccgtcttaccatctgccacatttttatgaattatttgccagatgggcggacgaagatgaccgggagttctggagagacgcggcagaagcgagcagagcgtatctgcatctggcatgtcatccagacaccggtttgtcggcggagtatgcggagtatgacgggactccgcatgagggacatcaggagattttcggcaggcatgactggtattacagtgatgcgtaccggacgattgcgaatattgccatggactggctgtggtttgggagagatccctggcagcaggagattgcgggaaaattacagggcttttactgcgaaaagcagagcggacactgggatggtgtgtttctgacggacggcacgcttcttagagagcgggcgctgcacccggttgcggtgatagcggtaaatgcagaggcttcgctggctgcgaagggagaaaatgcaaaggagtgcatcagaaggttctgggagacgccgcttcggacaggggaacgccgttattacgacaatttcctgtatctgtttgccatgctggcactgtccgggaattatcgtatttactgaacaaagttaggtcatgaatctgatattttaatgtcgtatctggtattctgattttcaaaggaaggttatatttaatgcagaaaaccttagaaaatcaaaacaggagaaagcatatatgaaatatggatattttgacgagacgaagaaagagtatgtaattacaagaccggatacaccggcaccgtgggttaattatctcggttccccggaatatggcgcgattatttcaaacaatgcaggcggatacagttttgcaaaatccggagctaacggaagaattttaagatacatctttaaccagtttgacgaacccggaagatatatttatatcagggataataaaagcaaagactactggtcggcttcctggcagccggtgggaaaggatctgaaaacttaccggagtgaatgccgccatggaactgcttatacaaaaatgctggcggattacagcggtattcactcagaagtgagatattatgtgccgctagaccgggcatatgaggtgtggaatgtatgcattgccaacacatctgcggaagaaagagaactgacggttaccgggtacgctgaatttacaaacaacagcaactatgagcaggatcaggtgaatttacagtactcgcagtttattacgcgcacggttttctgcggggatcatgtgcggcagatgattcatgcgaatctggatcagatcgaggaaggcaggaatgtcgatgataaaatcgttgtcagccgtttctttgcactgaagggagcgaaagtgacatcctggtgcggcgacagagagaagttcctcggaagatatcatggatatggcaatccggcaggtgtggcagagggaacattgtgcaacgagggaaatgagaacggcaacagctgcggagcactcagcacggtggtgcggcttgcaccgggagagcactgtgagttcgcatttctggttggaatgaaagaggaacctgaggtggcagagattttggcctcctatgcgctgccggagcaggtctgtggaaaggaattgcagcagctgacagattactggcatggaaagcttgcacattttcagataaagacaccgagtgaagaattcaatgccatgataaatacatggaacgcctataactgctttatgacatttatctggtcgcgtgcagcgtcgtttgtctactgtggactgcgcaatggatacggttatcgtgatacggtacaggatatacagggagtcattcaccttgcaccggagatggcagttgaaaaaatcaggtttatgctttccgcacaggtggataacggaggcggactgccactggtaaagtttacacacaatccgggacatgaagatacgccggatgatgcatcttatgtaaaggagaccgggcatccggcatatcgtgcagacgatgcgctctggctgtttccaaccgtctacaagtatatagcggagaccggacatctggaatttatggatgaagtgattccgtatgccaaccggggagaggcaactgtttatgagcatctgaagcgtgccatcgatttttccatgaatcatctgggaaaacacggtatgccggcggggctgtatgccgactggaatgactgcttaagactgggcaaagaaggggaatccacatttgttgccatgcagctttattatgcgatgaatatattgcgaaagtttgcagaatacaagcaggataaagaaacggctgcctatcttgatgaaaaacaggaggaactggggaaattgctgcaggaactctgctggaatgaggaccgctttatccgtggatttacagaagcaggcgaagtgatcggaaagcgcacagatccggaggcaaatatgtggctgaatccgcagagctgggcggtgatcagcgggctggcaaaagcggatcaggcggatatggcgcttgagagggtatatgagaaattaaacacgccgtatggtgcaatattgatggacccgccgtatcatgcgcacgcctttgacggagcactggctgtcatctataatccgggtgcaaaagaaaatgcaggtattttttcacagtcgcagggatggattatcctggcggaggcattgcggggacatggagacagagcatttacttattttatggaaaatgcaccggctgcacagaatgaccgtgcacagatccgcgtgattgaaccttattgctatggacagttcacggagggaaaggcaagtccgaatttcggaaggtcacatgtgcactggctcacgggaactgcttccacggttatggtcggctgtgtggagggaattctgggtatgcgtccggatttctatggactgcatcttacgcctgcaattccgcatgaatgggaggagtttgaagtaaataaagttttcagaggctgccagttacatattgttgtgaaaaatccgggacatgtgcagtcgggatgcgacagactacttgtaaatggagttaggatgcagggagattatattccgcaggaagtattgaaaaagcagacagaaatcgtattgtatatgtcataagatgggaggaaagattcgtgggaaagatagaatttttggatcagcagggaagcttccgggtgtatcagccggaagactacagtggattgtattttcctcttgcaggagacggtgggttaaaatcctgcattacaccgacactcggcggcgacagcaaaagggatcagaaccatttcctgatggagccggtcagtattgaaaatctccataacaataaaaatacaagaaatttctggtgccgtatcaaaaaccggggatactggtcagcctgcggttcgtcggcagaggcagaatttctgcggtttaccggagaacaggagaaaagcgtactggaagccggatttatgtggcagaaattgacgcggacatccgcagtccatggactaaaagcagagattacttcttttgtgacggtagacggagcgatggaagtgatgatgacggaacttaccaatataacagaggaaccgcttgaaatgacaccgattgcagtgatgccggtctatggaagaagtgcggacaatatcagggatcaccgacatgtgacttccctgttgcaccggatctgtaccacggattatggggtggaggtgacgcctgcgatgtcgtttgatgagcgggggcatcagaagaattatacaacgtattttgtatatggttccaccggagagggagaggcaccggcagctttttacccgaccgtcggggagtttatcggggagggaggttcctatctcataccggaggcagtccggacagaaaagccgggagctgtggcaggaagtaaggcagagggaaaagaagcagtgggagctcttaagtttgcggagattttattaaaaccacatgagacagtctgctatctgactctgggcggaatgaccgacgagagatcacagatcgaacctcttacagcatctctcagacaaagaagccaggtaaaggaagcttatgatgaagtaaaacggtactggacaaagaaagtaaacatcacatttaaaacgggtaatccggatgcagacaattatcttaagtggattacgttccagccaattctgcggagaatttacggctgttcgttcctgccgtatcatgattacggaaaaggaggacgtggctggcgggatctgtggcaggattgtctggcattgcttctcatggacccttccgcagtccggcagatgatcatcgacaattacggcggtgtccgggtggacggaaccaatgccacaattatcggaaatgcgcagggggagtttattgcggaccggaatcatattacccgtgtgtggatggatcatgcgttctggccgtttgtgacgacaaaattttatattgaccagacaggagatctcgagattctttttgagaaggttccgtattttaaggatctgcagtccaaaagaggcacaggtcacgataccggatgggacgagacatatggaaaatgccagcgcacagagggtggcgtcgtctatttcggaagtgtgctggaacatctgcttcttcagaatctctgtgcattctacgatgtcggcgcgcacaatgagatgcggctgcacggggcagactggaatgacgcgctggatatggcatgggaaaatggagaaagcgtggcatttacaagtgcttatgcgggaaatttaaaagagattgcgcactgtatccggctgttagagcaggagaccggctgcaagcgttttgagattgcagaagagatgggaatgctgtttgcaggtggcagggaactgtatgagaatgtggaaaagaaacgagggatactggacgcctatctggaggaatgtgcacataatctcagtggtcagaccatgatcgtaaaagcagagcagatctgcagcaatctggaggaaaaagcagactggctgatggagcatataagggtgcaggagtggattgctgaggatgaggcacacggatggtttaatggctattatgacgatcataagaatccggtggagggctgtaaagacggaaaggtacggatgatgctgacgagtcaggtctttgcgattatgagcggcacggcaacaccggatcagatccgcaaaatctgccagagtgccgataaatatctgtatgatgagaaggcgggcggctaccgtctgaatacggatttcggtgaagaaaaaatggatctgggaagaatgttcggatttgcttacggggagaaggaaaacggagcagtattttcccatatggctgtcatgtacgccaatgcactgtaccggagaggatttgcgagggagggaaataaagccctgcaggctcttcttaacgcggcaatgaattttgacaacagcaggatgtacccgggactgccggaatattatgatctgtcaggaagaggcatgtatgcatacctgacgggtgcggcaagttggtatctccttacgatggttacggaagtattcggcgtaaagggggtcatgggagatctggtaattgcgccggcattcatgccggaacagtttgatgcgcagggaaatgcagaagtaacgctgatttttgcgggaaagaaattcaacatccggttctcaaatccagaaaagtgcgagtgtaaaaaagagtggataaaaagtgtcctctgcgatgaaaagcaactggaaccggaagcgggggcagcatatgccgtgcggatcaaaaaggagtggatcaaacagctggatgcagagaaagagcatgtcataaaaatcttgtttggaagataggaagcagatagtggtcttcacaggaggcatacacggttcttcgggggtaaacaatattgcaggaagcacagcatgccagattcctggagaaaagcagctggagcattcgtcgggaaaaaatgcgcgtatttcttccagccagagctttgcagctgattccgtgtctcttccacgtttggacacactggcgggcacatgtccgacacaccggagacaatgggcggattttctggcagcactaactgtgctccctcatagacaatattaaaccgcgcgaaccgaaactcgatgctatcagctattgaaatcagggcagatagcagctcagacatcggcttcgcgcggttatgtttttttcgggagcacaggtaagtgctgcacaaaagtcctacaaattgtctcgcggagtgcggacatgccccgccggagtgctccaaacttggaaagacacggatcatcgcagctgcaaatcacggctggttagaaataccgtattttttgtaccgaatgctccagctgtctttctccgggaatcgcaggacatatactctctgcaatattgcttaccgccaaaggggaaccgtgcctgtctcctccggcggcttcttcgcggggagttaccacatggatttgtaatatttattgcggtatttttttggagtcataccggtaaagttctcgaacgtctggataaagtggctctgcgaagaaaaggaaaggtaattggcaatgtctatgatggacttgtcagagtagcgcaggagatgcgttgccttttctatttttttctcgcggatatagtcactgatggaaatgccgaggttctgcttgaatacccgggagagatagctctcggataatccggtatattctgccagcatggcgacggtaatgcgttctttgatatgactgtaaatataatccacacactgtacgaccggcttggataagatggaactttttttctgaagaaccatcttgccggtaaagtctttagccatttcatggtgaagatccgcaatctgccggacggttgtgcaggtgtccattttcagaatgtaaaagtcactcagacgataggcctgttccggctccaaaccgccgtcaatgcagtagcgtgtaagcatggcggcagtgactacaaaatgatattttatgttggtaagtgtattgcgcgagagcacaccggttccctccagatggataaatgcatcctctttgcagttggcgacaacagtttccatatcgcctgttttgactgccgtataaaaggaatattccacggttggcggtcggtgaagggtctcaagttcactgctttttaattcggtctcgtaccattcttctgaaaaggccattggctgttccctccgtaaaataagaatatggttattatgacatgaatctgatatttttacaattgatttagtatattccagtcataaaattcagtacaattctacctgtaatcaagaagacggcagacattatagggaaagggtctgacgttgaaaaactaaaatacagggaggaattgaagtatgaaacagcgggttatcagcttaatgctgacagtggctatgggggctactttacttgcaggatgtggaagcagtgccacagacagtgccaatgccggagcagacagcggcaaggagagtgcagcggctgcaggcacagagtcggacgagaaagatttcagtggtgagggaaaggtaattaacatctattcctggaacgatgagttccgtacacgtcttgaggcagtatatccggaggtggaatctacttcctcagacggaacggtaacaacgctgaaggatggaacagagattcactgggtgatcaatccgaatcaggatggtgtttatcagcagaagctggatgaagcgcttatgaatcaggcagatgctgcggcagatgacaaggtagatatcttcctgtccgagacggattatgtatttaaatataccgataaggatgcggatgttgccatgcctctgacagatcttggaattgatcctgagacggatctggcggatcagtatgattttacgagaactacggcttctgattctgacggtgtgcagagaggatctacctggcagtgctgtccgggacttttagtataccgccgcgatattgcaaaggatgtatttggaacagatgatcctgaggcagtcggcgagaaggtgaaggactgggcaaccatcaaggacaccgcggcagagttaaaggcaaaaggatattatacctttgcatcctatgcggatacgttccgtctgtacggcaacagtattgatgaatcctgggttcagccgggagataccaccgtcaaagtagatcagaaaatcattaactgggtgaatgattctaaggaatggctggatgccggttatctggacagcaacatcaagggtcagtggaatgatgactggaataagtccatgggctcccagtccaaggtttttgcattcctgcttccggcatggggcattgactttgtgctgaatccgaactgggatggagagtccggcaactgggcagttacgaacccgccacaggaatataactggggtggttcctacatccatgcggcaacaggaacagataatgtaaaatatgcgaaggatattattcttgcaatgacaagcaatcaggacaacctgttaaagatttcacaggattactctgatttcacgaatacgaagtccggaatggcagaggcagcaaaggatgatgcagacttctcgtcagaattccttggcggacagaatccgtttgtctactttgcaccggtagctgagaatatcaagattgctccgttatctgcatacgatcagggatgcgtggaactgattcagaattcgttcagcgattatctgcagggaaatgtagattttgataaggcaaaggcaaactttgagacagcaatcaaagagcgttatccggatatcacagaagttcagtggccggaataagaccatgactgcggagcaattttgctccgcagaactattatggcagagagggcaaaggaatgaaaaaaaagaaaaaaagtatcagctatggaaaatggggacagatatttattcttccgttttttattatctattttattttttcgctgattccgttggcagataccgtcagatacagtttttatgaatattaccgttccggaattaaggaggtcggacctaatttcgttggaatggcaaattatatcagtctgctgaaatccgatatgctggcatatggaaaaaacacattgattctgtggctgatcggttttatcccgcagattgtgatcgcacttgttcttgcgagctggtttacggatgccagattaaagatacatcacaaacaattttttaaggttgtcatttatctgcccaatctgatcatggcatctgcatttgcacttttattttttacactgttttccacgagtggaccggtcaattccattctgatgtctctgggctggatcaatagcccgattgattttatgggatctgtttttggcacgcgttccctgattggacttatgaatttcctgatgtggtttggcaatacgacgattatgctgatggcagcaatcatgggaatcagcgtggaggtatttgaggcctgcgagatcgatgggtgcaacagtctgcagagatttttctatattacgcttccgatgatccggccgattcttgcatatacactgattacctcgattatcggcggattgcagatgtttgatgtgccacagatcttaacgaacggtcagggaaatccggaccggacatccatgacactgatcatgttcttaaataatcatttaaagagcaagaactatggtatggcaggggcattatctgtttatctgttcatcatcagtgcgatcttatgttttatcgtgtataagatgacaaatgataatgatccggacggatcgaaggcagcggcgaaaaaagctgccagagaagaaagaagaaggaggagataaaacatgaaatcaaaatcaggaaacagtttgcggagtgttctggcgcatattgtgttgattgtactgtcatttatgtgtctgttcttcttttatattctgattatcaatgcaacccgttctcatgcggagctgcaaaaggggttttcggcattgccgggcacccatctgctggaaaatttaaagaatgtggcaaatgacggaagcttcccgatgttccgcggaattataaacagtatctgtatctcgactgcctgtgcgggtttgtgtacttacttttccgcgttgacggcatatggtctgtatgcttatgaatttaagaccagaaaaatagcatttgcctttatcatggcaattttggtcatgccgactcaggtaacggcaatgggatttttgcggctgatcacgaaaatggggttatatgatacctggtatccgctcattattccaagcatcgcgtcgcctgcggtattctattttatgtacagctacctgcagtcatcactgcccctgtccttagtggaggcggcaagaatcgacggctcaggcgaattcaggacgtttaactgtattgtgctgccgattatgaagccggcgctcgcggtacaggcgattttcacttttgtcggttcctggaataactactttgttccggcactgattcttcagaccaagagcaaaatgacagtgccgatcttaattgcgacattgcgtggagcagactatatgaactttgacatgggaaaagtttacatgatgattacggtggcgattgtgccgatcattgtggtatatcttttattatcaaaatatattatcgccggtgtgacacttggtggagtgaaagagtaaacacgatctggacagagaatcatatggaagaaaattctgtatggttctttctgtcattttgaagggaaaagcagagaatatggaaaaaagagaatggagatatagtggaaccatagaggaaagaacgtccatccgggagcaggtgcatgatgttctggcaagaaaagtggcagaagaggcaatggttttattaaaaaatgaatcgcttctgccactgcctttggatgttcctatggcgctgtttggaagcggggcaaaaaagacggtaaaaggcggaatcggctcgggggatgtcaacaaccggaagacaatttctgtctatcaggggctgctggaagcgggcgcaatgatcacaagtgaagcgtggctgtgcgactatgaaaagcggtatgagcaggcgagagaggaatggaaaaaactggttctcgaagaaacaaaacgggttgagaatccgtttgacgcatactccaatcatccgttctgtttcccggagggaagagcggttacagaacaggacattgccggggcaggggtggcagtttatgtgctaagccgcatttcaggtgagggaagtgaccgcagaaaagagcgcggcgactatgaattaagccgcagggaacaggaagacctgttatttttgaatgagaaaaagattccggtagtgctcctgttgaacaccggtggtccggtagaactgacagacattttagagcaggcaaaaaatatacgggctgtgttaaatatttcccagccgggacaggcaggtggttatgcggtggcggacatcctgtttggaaaggtggttccaagcggaaaacttacggcgacatgggcgagacattacggggattatccgtcagcggacacttatggatacaggaacggagatctggaaaaggaagaataccgggagggaattttcgttggataccgtcattttgaccgggaaaatctgccggtattatttccgttcgggtacggactttcctacacatcattccacatccgccagcggtctgtacgcgaggaaacgaattccctggaacttgcagtgtctgtgcagaatacgggtggaacctatgccgggaaggagacagtgcaggtctatgcgacactcccgcagaccggaatggaaaaagaaaaaaagcggctggtgggatttgccaaaacaaaatgtctgctgccgggggaaatacagcagctggagattaaaataccaaaaaacatgcttgcaagtttttcggaagaacagagtgcctggtatctggaagccggaacgtatggcatatggatcggtgccgattcacaaaagttagaacaggcaggggaatttgatgtgtacgaacggacgatcacagagcacacatgccggctggaggcagcagagagcgatgcaggaaagctttctgccgctgaagagcaaaaagtgcatctgaccggaaaaataccggcagaggaactgattccgctcttatatggtcatgtggaacaaaacagcagtacactcggcgcggcgggaatccgtgtcccgggatcagcgggagagacaacacatgcgctggaacagccctatggaataagggcgttaatcatggcggacggaccggcaggaatccggctgcatcagtcgtatgaggtagacgcagattcggggaaagtctatggaaaaagtgtactgggagcactggaaaatggctatctggagccgatgcaaaagcatgagaatgccaggacctactatcagttctgtacggcgtttccggggggaacggcaatggcgcagacctggaatgaggaactgctgcagtctttcggaagagcggtatcacatgaaatgaaagaattccatattgatctgtggctggcaccgggaatgaatatccagagaaacccgctgtgcgggcggaattttgaatactattcggaagatccatttctctcaggaaagatggctgctgcggttgtccgaggtgtacaggaggagggaacctgtggagctgtgatcaagcattttgcatgcaacaatcaggaagacaaccgtatgggggtcgatgtgcatatttcagagagagccctaagggagatctatcttaggggatttgagattgcagtcaaagaaagcgcaccggttgcaatcatgacatcctacaaccgggtcaatggagttcacgcggcaaacagcagagcgctatgcactgtaattgccagagaagagtggggatttgacggtgtactcatgtcggactggagtacaacagcgccggaagacggcagtattccatggaagtgtatcgaagccggaaatgatctgattatgccgggaagtgagaaagatgatgcggatatccggcaggcgtatgcagacggaaggctgtcggaaaaggaaatccgtctctgtgcgggaagaattatctcactgataaataaattagataaaaagacaaaaaagtgacattggaaagacaagaaacaggtagtctccatgactgtctcctgttatactctgcttataaggtacacttatggaaaggagcacaaacaggggggaatcatggagatttattcaattaaagacgaaaagttccgcaggtatgggaaagtctggagcggctttgactgcacgagactgatccgcgagatggaacacacgccgctgccggaggatgtcatttatgtgccatccatggaggaactggaggtgctgccggaggcgggagagtttgccagacggatctacggcggacttccgattcagatcggttattgtaacggcagcaatcacagattaaatgcgttggagtatcaccgcaattcggagatcaatattgcggtgaccaatatggtgctgctgttaggatggctgccggatgtgaccgatgcgtttacttatgacacatccagggtggaagcattttttgtcccggcgggaacggttgttgagatgtatggaacgacacttcactatgcgccgtgcaatgacggggaggaaggatttaaatgtattgtgattcttccgaaaggaacgaatacagagattgattttgccttgcccaaaagcggagaggatgcgcttatgactgcgaagaacaagtggctgatcgcacatgaggaagcaggaatccgtggtgcttttaacggacttttgggggtcaatattgaggtgtaagaaagatacagggaaaacggaacaggaaggtttctatttttgaaacggaaaggagatttttatgaacaaagaaaatatgccggagattaagatcggagttgtggcagtcagcagagactgcttcccggagagcctgtcggtgaaccggagaaaggcgttaatggacgcttacacgaaaaagtacggaaaggatcacatctatgaatgtccgatctgcattgtggagagcgaaatacatatggtgcaggcactggaggatgtgaaggcggccgggtgtgatgcacttgtcgtatacctcggcaattttggaccggagatcgccgagacactgctggcaaagcattttgacggaccgaaaatgtttattgctgcggcggaagaatccggggacagtctgctggatggcagaggggatgcttactgtggaatgttaaatgccagctataacttaaagcttcgcaatatcagggcatacattccggagtatccggttggaacggcagaggaatgtgcggacatgattcatgaatttgagccgatcgcccgcgcggtagttgcgctttccaatttaaagatcataagcttcggaccaagaccgttaaatttccttgcctgcaacgcaccgataaagcagctttacaatctgggtgtggagattgaggaaaattcagagcttgatttattcgaggcgttccataaacatgatggggatgagagaatcccggcggttgtggcagagatggaggcggagcttggagccgggaataaaaagccggaagtgcttgcaaagctggcgcagtatgaactgaccttaaaagactgggtgcgcgatcacaagggctaccgcaagtatgtggcgattgccggtaagtgctggccggcattccagacacagttcggttttgtcccgtgttacgtcaacagccgtctgaccggacagggaattccggtgtcctgcgaggtggatatttacggctgtttaagcgagttcatcggcaccgtggtgagcgaagatgccgtgacactgcttgacatcaataactcggtgccggcagacatgtatgaggaagagatcgagggaaaatatccatatacgttaaaggatacctttatgggattccactgtggaaataccacttccggaaagcttgcgttctgtgagatgcgcaatcagaagatcatggcgagaagccttccggtcgaggtgacaaacggaacccttgagggggacatcatgccgggggacattacgtttttccgtctgcagagcaccgcagactgcgagctccgcgcttatatcgcacatggggaggtgcttccggtggcgacaagatcttttggatcgatcggtgttttcgccatcccggagatgggaagattttaccgccatgtgctgattgagaagaatttcccgcaccacggcgcggtggcattcggacattacggcaaggcgctgtacgaagtatttaagtatatcggtgtgccggtggaggagatcggttataaccagccggcaggcgtgcgctatccgacggaaaatccgtttgcatagaaaagtcttgcagtgcatagcgaagtcttgcaatgataagaaaaggggagagtatgttatatataggaattgatcttggcacatcagcagtaaaattgctgctgatggatgtcgatggtaaaataaaaaaaattgcatcgcgcacctacgatctttcatttccacatccgggctggtcggaacagaatccggcagactggtatgaacagtcgatcgacggcttaaaagaacttctggcggaatgtgataaaagccgggtggcggggatcagtttcggggggcagatgcatggtctggtgacattggatgagcgggatgaag

SEQ ID NO: 11536 - DNA, 8566 bp, Unknown
  gut microbiota DNA sequence
gacacctgcaagcccgttatgataagccggctgcctctgtgtcagtccctttgatctgtcagtcttctgtctcagtgttccatcttccagaaggctgcggagtaaggcgggagcgtactgccacctccaaagtcgtgcgtctccccggtgagcaggtcaacagctgtgccgcagcctgcgtcgaaatgcgccgtgaagctttcggaatctgcgttgatggcgactagcacacgctcattggcgcttttccgctcaaagatggactgcttattcgtgagcaggacagagcggaaatcgccgtagtttaacgcctcggaagactttttcgcggcggcaaggcggctgatgaaatccgtgagtgtggtccattccggtgcgtcaaagcaggcgcgcaatgcgggatcgccgtcctcttttcgcgctttggtgccccattcacttccgtagtacacgcatggaatgcccggcatgccgaactgcatggcatagattaacggaaggtgcgcctcgtttgagaggatgcttgccacacgggtgacgtcatggttgtcgacgaaggagagcaggtgctttcccttgtacagagtccagttgtccgggccgaactggcgcagcagagagtgattgatctcgaacatgttcatggagttaaaactggaatacagccccttgtagcactcatagtttgtcacagagtgcagcatggcatcgttcatgatctggttgtaatcgccgtgtacgacctcgccgaccaggaagaaatccggctttaaggtgtcacagtaggcgcgcagcctgcggataaaatcatggtcaaggcagtaagccacatccagccgcagtccgtcgatgtcaaactcatccacccaacccttgatgcaggaaaagaggtgcgcgatgacatcctcgttgtgcagattcagctttacgagatcataattcccttcccagccctcataccacagcccgtcgttataattggaattcccgtcaaaactgatatgaaaccagtccttgtagggagagtcccatcgcttctctaaaacgtcctggaatgcccagaaaccgcggccgacgtgattgaagacgccgtctaagacgactttgatgccggcggcgtggaggttgtcacacacttccttaaaatccgcgttggtgccaagtcttgtgtcgatctttgtgtaatctctggtattgtagccgtgggtgtccgattcaaagagcggtgaaaaatatacggcgtttgcgccaagcttctgaatatgaggaatccagtcgtttaccttttggatgcggtgggtgagaaccccgtcattttcaaaaggtgcgccgcagaatccaagcggatagatctgataaaatacactttcatatgcccacataatgcattgcctcctgtgattgctgttttattttgctgtgctcatgtcatgtgattttttggagcaggcgcgctgtgcggtgatcacggtatcacgcagaccgccccgttccaatgcggcgacagcctcgatcgtcgttccgcccggagagcacacggcgtcttttagttcgccggggtgtctgccggtctctaataccattttggctgcgccgtagacggactgggcggcaaatttgtaagcctgtgcccgcggcatgccgtcagcaacggcggcgtctgccattgcctcgataaacagatagacataggcaggagaggaaccggacacgcccacaacggcgtcgataaggctttccggcacgacttctgcttttccgaaggagttgaaaatcgcctgcacttcggaaagctcggcttcggtaacgtgtgcattgacgcacagggcgctcattgcctcgccgacgagggcaggtgtgtttggcatggcgcgaacgagcttgatctctttgccaaacgctttttcgatggcagcaatggtcttgccagcagcgatggagacgatgatgcagctgctctttacatgcggggcgagctgcggaatcacctcatcgaacttgttcggcttgacggcgagaaacagaatatcgctgcgttcggcgacggtctcattggagagtgtcgtctcgatggagaaccggctgtgaatggtgtcaagcgtctccttggagtgtgcactggcgattacctgccccgtggttaccagggaggcgtttaagatgccgccgatcatggcgctgcccatgttgccggcaccgatgaaaccaatgattttgtcaaacatatcaaaaaccacctttctatgtattgtatgctgataccagaacagccggctaaagatagccggctgtctttctataaaatatggtagcgtttttagaaccaaacgtcaagtcctggtgtacgatgtttagaaatctgtcagattggcagctctcttctcaaggaatgcgcccattccctctttcttgtcatgtgtgtcgttgacaacaccaaagaggtttgcttccatctcaacggcattcttgatgtccatgtcgtagccgttgttgattgctgccttggcaacggagactgcgtagcttcccttggagatgatctttgcagccatagcctttgcggtagccatcagttcttcttttgcgacaaccttatttacaagaccgatgcggtatgcttcgttggcatcgatattgtcacaggtaaagatcatttctttggcacgtcccataccaacaagacgggcaagtctctgggtaccgccgaatccagggatgataccaagaccgcactccggctgtccgaaaacagcattgtcggatgcgatacggatatcacacgccatagcaatctcacatccgccgccgagagcaaaaccgttgacagcagcgatggtaacctgacgcatattcattaacttgaaaaatggaacagaagccttgatgccgaatgctcttgcttccggagcggtgaagttcaccatctcggagatatcagcgcctgcaacgaaagacttgaactcgttgcccttcttgtccggaccgccggttaagatgacaaccttgacatcgtccatagcttcgatctcagtcagagccgtgtttaactcgtcaagagtctcactgtttaatgcgttaagagctgctggtctggaaatggaaagaacagcagtctggtcagcgatttccaatttcaaattgttaaattcactcattctaaaaccctcctgaatagtttgataaaaaattaacaaattactaatattagagtacagcgttttctaaaatttgtcaatagaaaacagtattttcatttggaaagaaagggggtataataaatcctaaaatgagtacgttactaaggagtcatacatatgagcacaaagagatcttatctgtcaaaagttgttgtggagatgccggattccggtattaaggattttttcgatattgccaataccatggacggggctctgtctctgggcgtcggggagccggacttccagacgccggagcatgtcagggaggcggcggtcgcttccatccggcgcgccgagacaaagtatactgacaaccgcggtaccgtggagctgcgtgcggcagcagcggagtatctggaaaagttcgatctgcactatgaccgggcggatgagatccttatcacaatgggggcaagcgaggggattgatctggcgttgcgtgcgctggtggatccgggagacgaggttctggtggttgagcctgcctatgtgtcctacatcccctgcgtggaactgtgcggaggaattccggtgtcaattccgctgcaggcgaagaaccggttccgtctgacggcggaggaactggaggagaagatcacagagcggacaaaagtgcttctcatctctttcccgaataatccgacgggtgccatcatggaaaaggcggatctggaggcgatccgcgaggtagtgctcgcccatgacctctttgtgattacggacgagatctatgcggagctcacctacggcaagaagcatgtgtcgatcgcggcactgccggatatgtatgagcgctgcgtggttctaaacggtttttccaaggcgtttgcaatgaccggatggcgtatgggtatcgcggcggggccggcggaggtcattttccatatgaacaagatccatcagttcacgacgatgtcagcgggaacgacgtcccagtatgcggcgttagaagcactcacgagtccggtgcgggacgaggagatcgatgtgatgcgccgggagtatgacgagagacgccacctgatggtggacggattccgggcaatgggacttaaggtggttgagccggagggagcattttatgtgttcccttcgatcaaagagaccgggctcacctcaatggagttctgcagaagacttttgcaggagcagaaggtggcggtgataccgggagatgcctttggaagctgcggcgagggatacatccggtgttcctatgcatattccaaggatgtgataaagaaatgtctggaaaaaattgcggcgtttgtggcgcagtttgacctggatttaaacgcttgacagtagagacggagaagagaatgctggataattatcatctgaaccagttggcagagcctctgcttgcgtggtttgtagatcacgcgcgggtgctcccgtggcgtgagagaccggagccttaccgcgtgtgggtctcggaaatcatgctgcagcagaccagagtggaggcagtaaagccgtattatgagcgctttttaaaagcattgccggatgtggcggcgcttgcagcctgtccggaggatcaattgatgaagctctgggaggggcttggttattacaaccgcgtgagaaatatgcagaaagccgcagtcaccgtgacggaggagtatgatggagtgcttccggcggattatgggaagcttttggaattgaaagggatcggttcctacacagcgggtgccattgcatcgatcgcctatgggataccggtgcctgcggtagacggaaatgtgctgcggatcttgacgcgtgtggcggcggacgataccgacatcatgaaacagtcgttccgcagtgcggtggaagcgcagctgggagagatgatgcgggaacttacggttcctgaggagcttcggcgtgtccttcgcgatgaaaatgttcccggcgcgctcaaccaggcgatgatggagcttggggcgacggtctgtgtgccgaacggcgcacctctctgtgaggaatgtccgtggagtaagatgtgtcttgcgagagcacaggggcgcatgatggattttccggtaaaaagcaaggcgaaggcacggcggattgaggagcgcacggtgcttgtcattcgggatggagaaaaggtggcaatccgcaagcgcccgaagaaggggctgctcgccgggctgtatgaactgccgaatctgtccggtgcattaagtgcggaggaagtcctttcctatgtaaaggaacagcagtttgctccgctgcgaatcgagaagcttgcggatgcaaagcacatattttcccatatcgagtggaggatgagtggatatgtcattctggtggaggaagccggatttgccacagaaaaggaaccggagtcaggaaaagggcgcaccccggaagagaaagcggacggggaaggcggactgatttttgtggatgcatgggatgcgagagagcgttatgccattccgtcggcattttcagcatatgcgggttatttaaaaaaggaatttgattaagatcaagaaagataaaaaagtttgtaaaaaagagggagccggtgcatcgcaccggcttttcatatgaaaaagattgtgtgtatggaaagtgaaataaattcactatctgctgggaggaaccttgcctatttctaagcaaggtgacctgacaagcacttgtcaggaatgaaaaagttctatgaaaaatttaacttgctgtcttaactttatctatactataaaatggaaatatgaccagcgtatgccaagtttattagtattttgtaaataaaatatgaacaaataaatgacagggatttttgtttagaaaaccttaaggaaaaaataaattggcgtactgtggaaaatcctgtataatgaaacaggtcaatgttaagacaatgcgggcagtaccgcagaacggaggagacatgtacgattgtattgtcattggagccggaattgccggagcggtggcagcgcgaaagctggcagaggaaaaaggaaagcgtgtccttgtcatggaacgccgaccgcatatcgggggaaactgttacgatgagaaagatgcccacggcattttaattcataattacggaccgcatatttttcacacaggtctggaggaagtgtttgcatatttatcgcgttttacggactggtacctgttcgggcacgaggtggtcgcaaaggtcggggatcagttgattccggtgccgtttaacttaaatacgttacatatggtatacgggaaggagaaagccgaccagctggagcaaaagctgatcgaaacctacggcgagggttcgcgtgtgccgatcatgaagctgcgcgagaacgaggatgcggatatccgcgagattgcacagtatgtgtatgagaatgtatttttatattacacgatgaagcagtgggggcagaagccggaggagatcagtccggaggtcacagggcgtgtcccggtgttaatctcctatgataaccgctattttcaggataagtatcagggagtgccggcgaacggatttacggaaatgtttgagaagatgctttcccatccggggatcacggtggagtgcggcacggactgcttaagccgcatgcgctttgcggacaatgagatttattttgacggcgaaaaattcgacggcgacgtgatctacaccggcgcgctggatgaattgtttgcatgcaggtatggaagactgccgtaccgctcgctggatttccggtttgagcattacgacggggcgtcttaccagggacacagtgtggtcaactacacggtgagcgaggattttacccgtatcacggaattcaagtttttgaccgggcagaaggatacggacggcaccacgatcgtgaaggagtatccgtttgcgtatacgggagcagagggagagattccgtactatgcgattttgaatgaggaaaatcaggcgctgtacgaaaaataccgggcactcacggctggcatggagcattttcatctgctcggacggctggcggagtaccgctattacaacatcgacgcgatggtgaagcgcgccatggaactggcagacagattgtaagagtgtgacggaaaatctgccttttgggaagaaagccgggttttcttttgcggagataaaggagagattagaaaatgaaattgttgacatttgcgattccgtgctacaattcggaagcatatatggaaaagtgtatcgagtcgctgcttctgggcggggatgatgtggagattttgatcgtggatgacggatcgcatgaccgcacggcagagattgcggatgcgtatgagaaaaagtatccggggattatccgggcgattcatcaggagaacggcggccacggcgaggcggtcaatgcaggtatccgcaatgccaccggactttattttaaggtagtggacagtgatgactgggtggatctggatgcttaccgcaagattctggataagttacgggagatttccggcggtgacagagtgctggatatgtttattgctaattatgtatatgagaaagagggagtgaagcataaaaaagtcatgcgctgctccaatctcccgaaagaccggatatttacatggaaggaagcaggacatttccataagggacagtatattctcatgcattccgtgatctaccgcacgaagcttctggtggaatgtggactggaactgccgaagcacaccttctatgtggataacatctatgtatacaagccgcttccgagtgtgcggacgctctattatatggatgtggatttttaccggtattttatcggaagagacgatcagtccgtcaatgagagagtgatgatttcccgcattgaccagcagatccgtgtgaataagattatggtcgatgcgtttgacctgtggaaaattccaaaccgcaagctcagacattatatgttcaactatctggagatcatcacagtcatctcgacgatcatgctgatccgctccggcacggaggagaatctggagaagaagagagaactctggaaatatattaaagaaaaagatatccgcctgttccaccatctgcgtgcgggcatcctcggcaatacgatgaatctgccgggaaaaggcggaagaaagatctccgttgcggcatataagctttcacagaaggtggtcggcttcaactagcgggaatccctgcactgtatccgggagatagttttgagaaaatacatgatcttaaagttccagatgtaaccggcggcagcattctgaccgcaaaatccggtatttctaaccacaccgcgtccggcatctttgatgatccgtgtctttccaagctttgagcactccgcaggatgtgtccgcaagccggcagacaattttaggacttttgtgtggcattagcgccactagaaagtccg

SEQ ID NO: 11537 - DNA, 41897 bp, Unknown
  gut microbiota DNA sequence
caggctttcggcattttaatctgttattcaaactcaatcgttcccggtggcttactggtcagatcatagaatactctattcaccccgcgcacctcattgataatccggctcattaccgtctgcagcacctcgaacgggatctccgccgcctccgcggtcatgaaatccaccgtattcacggcgcgcagtgcaactgcataatcataggttctctcgtctcccatgacgccgacgcttctcatattggtgagcgccgcaaaatactgaccgatcgaacggtccagtccggcttttgcaatctcctcgcggtagatggcatcagcgtcctgcacaatgcggactttgtctgccgtcacctcgccgatgatgcggatgccgagtcccggtcccgggaacggttggcggaataccaggttctccggaatgccaagctcaagacccgccttgcgcacctcatccttgaacagattgcgcagcggctcgatgatctccttgaaatcaacatagtccggcagacctccgacattgtggtgcgacttgataactgcggattccccgccaagaccgctctccacgacgtccggataaatggttccctgtgccaggaaatccactgcaccgatcttcttcgcctcttcctcaaagacacggatgaactcctcgccgatgatcttgcgcttctgctccggctccgtcacgcctgccagcttcgcatagtagcgctcctgtgcgttgacgcggataaaattcaggtcaaactgaccgtccgggccaaatacgctctccacctcatcgccctcattcttgcgcagaagaccatgatccacgaacacgcaggtgagctgcttgccgatcgctctggataaaagtcctgctgcgactgaggaatccacaccgccggacagtgcaaggagcaccttgccgtcaccgaccttctcgcggatcgcctcgatcgtgtgctccacaaaatgatccatgcgccaggttccggcacaaccgcagacaccgcgcacgaaattgtgcagcatcttggttccctcctgggtgtgaagcacttccggatggaactggattgcaaaaagcttcttctcgcggttctccgctgccgccaccggacagtctgccgtgtgcgccgcaatggaaaatcccggagcaacttttgaaatataatcaaaatggctcatccagcagatcgtcttctccgacacatcgccgaaaagcggcgatgtcgtatcgacaaacacctctgtcttgccatactcacgcaccggtgccttttcaacctttccgcccagcacatgcatcataagctgcgcaccgtagcagagtcccaaaaccggaattccaagttcaaacagttccttcgtgtacgtcggagaatccggctcgtagcagctgttcggaccgccggttaaaatgatacccttcggattcatcgccttgatctgctcgatgtctgtacggtaggaatagatctcacagtaaacattgcactctctgacacgtctggcaaccagctggttgtactgaccgccaaagtcgatgacaatgactttttcctgtgaaaaattgttgttcatttccacactcttttcctcctgatgtttttccgccgcaaagggcggtttgctcaattgctactattataagatacgctcccgcaatttacaaggcgcatttctatattttccaccatttcacaattcaataattttcaatgttccggttatactatctccatgaaaaaacatgaccgtcttccggatttttctaaactctgcgcaccggagcagactcctatatcgtttttcctctcccaacagatttatttcttctttctcggctcgatcggcgggtttctctgggaggttgccatctttctgtatcggaacaaaacctttgccaaccgcggcttcttctacgggccgtggcttccggtctacggcatcggcgcagtgcttttctatctgctgctgggctgccggcgaaaaaaaatccacccggctggcgtctttttcctcagtgccgccatcggcaccggtctggaactcctgatcggatggtttctggataccttctgggacctgcgctactgggattacagcggctatcctttacattttcatggctatatctgtctgtacgcgacggtcggtttcggcatcgcgggcgtgctctggatctgtgtgttggaggcaccgctcaccaggctctggaaacgtctctcccccaaagtgcgccttggattaaacaccctgcttctgctgctctttgccgcagactgcgcggctgcgctcatttttccaaaccgcggagcaggcattaccttcccttaagatagcgctccatctccgcccgaagttctgcgaactgcgcgtttgtcacagcgttgcggctctcaaaatgcagcagtttttccagataaccctgctcttttacaatccgcacactctccggaaataccagttcaaacaccagcgagatatgtcctaccacatgatccaccggcgtgcgcttgatactgcgcagcgtcgcatgatgtccataaaagctatccatcactgctggtgtgacggctgcgttgcgcagttcctccgtcgtggtattgtaaatctcctccagcggcacatccacattgacccgcagaatatcgatcttgtcggcgtcccgcaggatatggcacagcttttccgtgcgcggcgcaagcccctccggaatccggtaggcactgtgcactcttatggcagtctcaatcacctcatcctccgccgcatcgtccacatacgtgcggatcagaccttccccttcccggagcactccgccaaacaaaatgtctgctccgagcgctgcatgatcgatggaatccgcatcgctgaatgtcccgtatctccggagttgttcaaatcttcccacatcgtgcagcattccaaggagccatgccagatcaacctctgtcttctccatctgctctgccttcgcgatccgctcgcacagttccgccacccgataagtgtggtcaattttcagttttattttctcatcggtcgcatcataggcatccgtatactcccggaatgtttctctgacccgttcacgctcgattttcatctgccggtatctccttctcactttcttattcttttcccctgcccggttggaagccttttcatccagcttaggtgcggttcgcttttttcgcggtcttctcctcgtacatgatggcatccgcctcgcgcacgtagtcgtccagattgcacccagtcgtcatatccgtgtggacacatcccgcactgaccgtcagcggaaatggcagtttcatctctgccgaacgttcccggatatccttccggatctctccgatgatcttcccgatctctgcatccgcggtctgctccagtacaacaaggaactcatccccgccgctccggaccgcgaccgctccctccggaatatattttaaaatcgccgacgcaatcgtcttgatcgcccagtccccatagatatgcccgaattcatcgttgatgcttttgagcctgtccatatccatgaaaataattgaaagattctcccccgtcagcttctttttctcaaacatacgacacgccagcttctggtaaccgagccggttgtacattcccgtcatggcgtccttcacgtacagttctgacagcacctgattcagataggcaaggcgctccttcttatgcagattctccatcgcagacgtcagcacgttgataacctggaacagatactgcttctccatcagatacacagcattccggatgacaaaatatcccaccgtgtgttcccggaaatgaagcggcagaaacagaaaatcttttccgccctccgcgtaatcgaaggtcgggaaaatcccctccacgaccgtctcctcgctctcttttaccacaccgtcctcataggcgaactccatctgcattttctccggataaccgtgcacgcagaactcttcatcctcaatcagatgtctgtcataataatcgctcaattcccggaaatcattcatgtgctcatccatgatcagatacatcgcgtcacaccgcatggccggaatacatttcggaatccagcgcgacatctcccgcaccgtctcgcactgcagcaattcatactccagagaaagcacctgctcctcaaattcatccgtctcgattccgtagacaatctgagccctggaatgttctgcctgatccactgcaatgccggcgtcacagccgcagctttcccagaaaatacactggtgccccgtataattaaaccgcggtaccgtctcgcctctccacagccgcagaagaatatccgcacaacggtatcccacctgctcgcggatatgtccgaccgttgtgatgtgcggggaataatagctcgctttgtcaaaattatcgaatccggtcaccagaaaatcgtcgggtgccttgtagccgtgagcttccgcggtctcacacacgccgacggcaatgttatcgttggcacagataatggcatccggaagtttcccgtgcagcgtgagcaatttttcaaatccatgcactccacacttgtattcataactctcgcagtagagatccctggcatcccacaaaatcccgtgtgtctctgaaaaatcgcgcagcgcagccacacgccggttgctctcgtaattatcgtccggtcccatgacataccagaagcgtctgcaattatgcacctcatagagatgcgccgctatttcctgcatggcggaatagttgtcaataccgacatagtaaaaatccgcaatctcatttgcaatagaaatcaccggcttcccggtggcctttgccgaggagatcacatactcccgcacctcggaatagcggatattgttcagatctacaataatgccgtcgaaatcgtttaagtccggcagccgatagatgttgtactctccgatattgtaatcctcatccctgctccagtctccggaactgttgaaaatatacagattcacgtcctcattcgtctctctgatacgctccaacactccggcgggccatgcatatgtgaagaatcgcttccatccgtccatgatcaacgctatcttcttcatctgcgcttatcctccatctatcctgccgttatcttctcctattatataaaaacgttttcatgccgtcaaatgcttctgcgttttcacacatgctgatgcagatacttctcctttgtcgccatcccgccgcggatgtgccgctcggacttgttgatgtccagcaccttgcgcgtctccgccgcgagcggcgggttgacctgcgcgaggcgctcggtgacgtccttatgtaccgtactcttgctgatcccgaaatgctttgccgcctgccgcacggtcgtgttattgtcaatgatatatctggcaatctccatggctctttcctcaatataacctttcaaaccaaaacccctgcaatacttatttttacattgtatgcaggcttattttcgtatatactatctttatcagatgtaaaggaggatattgccgtgccatttatcaatacgaaaaccaccgtttccctgagcaaatccaaaaaggattccctgaccgcagagatctgccgcattaccagggagtgtctcggcaagggagagaactgggttatgactggttttgaggacaatgccagcctgttctttcagggggattctgccgccgttgcctatgtggaggtcaaaaccttcggcacgccgtccgctgcaggcaccagccagatgaccggaaagctctgccatctgctctccggcgaactttccattcctgccgaccacatctacgtggcatacttcccgactgacaactggggctggaacggaagcaacttctgactacaacagaaaaaatgcgggaattcccgcattttttcattttctctcttccgccttgatcgctctctttttcttgtacatcttcacatccgcacggttccttgtctcttccatatttttatcatactgctcgtcaaagatcgcgtagccgtatgctatccgcatcgggacgtccgttttcccttcattatatttccgctcgagatattccagtctgcgcagacattcctcgacccactcacttctggcatggcggatcacggcgcagaattcatccccgccgatccggtagcacaccccggcaggttcaaacacttccgagatcagctttgccgcatcctgaatatacttatcgcccgccgcatgtccgaacgtgtcattgcagtacttcaggtcattcagatcgaacgttacaatcgccgtctctcggtctctggcattttccgacgcccactcatcataagcgttgcggttgtacagtccggtcggcatatcatgctccgccagttcccggtagatctccgccttgcgtccctcatcaatcttctctatcgacaccgcagtcgcctctctcgccagcaggcagataaacagcaggaatccaaacctgccgatcacatccgttcttctccatccgatgtagtacgccgacatgtcgaccgcgtaagacaatagcaaaattacaagtccccagatacagacacacacccgccggtccattccgcgcacccggtaacgctgccagatcacatagagcagatagagcaggtcacatgccatcagaaaatgtgtgcaaaataccgtatttttaaactcgcagatccccgtcatgtggagtacggtacaaactatagcattcgcaaatgaacagatgcagataatatttgatatatacttctcctccacctcggagaactcctgcaaaaatgctgcaaacggcgcaatcatcagcataatcatcatatagccggtgtacgaggccgccgtccggctttttaccatgtaggcaaccagctccgcctcattcatggaccacattcccatcatcagggtaaaaatgccaaaatacagaatgcccggtcccatctttactttgcgtcttgcaattgcataataaatgagcagcataataccgatcgctccgtcaactgtgctgaccatgatctccggaaccgatcctctcatcgtctgatagaccatctgtccgtcattctcctgatagaacctcgtcacatgatcccgcactgccgggtacaccgcctcgatccgcacactgaaactcttcacgccctcctgcagctggatcgtattccatccggttccgggcgtcctcccgaacaccgtactgctcttttccagcgaataaatctgctcgccgtccgcatacacttccacgcactgatgtacgctaaaaaatgtcagttccgaaaactccgactgcatctgattgctgtcgaaataatactccctgacatcttcacccacttccaccacgcgatcgggctgcagttcgattcgtctggaatcctccgcaaagcttgtattctttttacctgcaaacgcaaagctcaacgccatcagaataaatccgatgacaagcagcactccataaacgatcgatactgattttttcatttatcctcacctgtggaaaattctggcaaacaaagattttttcgtattctctgcactggttgttatctccgcagcggcaagtgcctcttttcctgcctcttccttcatctccggcagagcctcctcgaggaagaactcgtcaaacacatcgtccctcttgttgatcttctcgcacatatccttggtgacctccatcatggtctccatcatatgtcttgcattctgccccatgcggtcttcaaaagtcatcccctgatccggtgcctcctcgccccagatacagtcatcccccagcacacgcagcttattcagccggtcgcgctgctccttgcggacgacgctcagaaaacggctcaccatcacgttgtgctcgttttcgtccgtataacacaaaaactcttccagcgaagcgttccccggatagccgatttgataatatgtattatagatacgacagatccgctctgttgtctggcgcagaatgatgccgcattcctgcggttttctccaataataatgctccgcgcgctccagttcctgcagaacattgtcatacatcgcctgaagctcgtccgactccagcctgcactctcttataaactcaaaattcatctcccgctgcccctcttatgatctgtcttctaccgctttcaggatctcctcactgatggcatccacgtccttgccgtccgtgtccacgcagatatccgccaccgcttcgtagcgcggccggcgcttctccatgagttcccggatatattccacattcatattcccgtttaaaatcgggcggttcgtactgtccttgactctttcgtagatcgtctccggcgtcgcccgaaggaacacgatacaaccgttctccttcatcagcgccgcattctcatccctgagtacactgcctccgccgcaggataccacatatcctgtgctctccgaaaaagaccgcaacaactctgtctccaggtcgcggaaataattctccccatgtgcggcaaaaatatctgtgattgccatcccctgttgttcctcgatgagctgatccatctcgattcgcttcgacggacattttttcgcaagcgctctcgcaatggtacttttcccggcgcccataaagccgatcagatataaattcttcatgccgcagtttcacctttctagctaaaaaaacgctctttgacttcctcgaccggcatatcttttccggtatacagtttaaaggcagccacgccctgccacagcagcattcccttgccgccgatacaggttgctccggcttccttcgcctcccggagcaatctcgtctcctccgggttgtagacggcatccgccaccactaaccccggtcggaatgcagaagtgtcctttaccacactctcattttccatcggcttcatgcctacaatcgttgcatttgcaaaaatatcgctggacgcgatctccgcagtcatccgcgcagtatccgcaatatcatagacatttaccacgcacgacggaaccgccgcacggatcttctccgccgttttcagcgttctctcaaaaaaagcatccttgatattaaaaatggaaatctcccttgcaccgtcaagcgcgcactgcacctgaatggcagtagcggcaccgcctccgcctgcaaccgtgatcttcttgcccttaatatcgatcccgtgatccttcagattatgcacaaatccctcgccgtcagtaatatgaccggtcagcctgccgttgtcatttacaatcgtattgaccgctccgatgatctgtgccgccggagacagctcatccatgtatctgacaacctccgtcttgcacggcatggtgacattgcagccgcgcatcttaaatgtgcgcatggcggcaatggcgtctgccacttcctccaccttgatatcaaaagcaacatacacataatccagtcccagccgctcgaagctgtaattatacattgccggcgaacccgaatgtccgaccggcgaaccaatcaatgccaataatcctgtgtgtcctgaaattctgctgtccatatttcctcccgctccggcgtccgttttttctctgcgccaataacagtatcatagctgttttttcttatcatttcaatacactaaagcaaaaaagcatcccttttctactctgtaagtatcggcttaaaatcttccgtatcgccgcagaatatgccgccgcattcctgtaagatgtgccgcattacaggcagtaccttttcatattcctccgcagaaaatgtcaccagatacactctgtcgcagtcatgttcctctgcaaatgccgcagtcacctgatccttaggatggatcgtcccctcctccatatccatggaagattctccaccgtacataatttcaagcacgcctgcttcctgccagatctccaactcgcaggttccatcgagcacatctgcaatctgccgcacatccactgcctccggtgcaaaataaagccattcgcccggcacatctgcctttttctttttctcctgcgcggtcttgttcgccggaaccgctgcttttcccagcgctccgtgccccgccttcttcatcgaagctgcttttcccgttgctccttgtcccgctttctttcccagctttttcatcctgcctcctgcttaccagcaaagaacctcgtggccgtcctccgtcacaagcaccataatctcccactgtgcagacggaagtccgtcctccgtgtagacctcccagtcgtttgcatcatcgacatagatgtccacttttcccatgttgaccatcggctcgatcgtaaaaatcatacccggcaccatcagcatctcctgaccgcgcttgctgttatagccgacccacggctcctcatggaactccagtcccacgccgtgtccgccgatctcacgcacaaccgtataaccgtttgcgaaggcgtgatcgtgaaccgcctgacccatatcgcctaagaatccccacggttttacttccgcgagacctttttccacacactccttcgtgacatccacgagacgtttcttctccgggctgacgtcgccgatgcagaacattctggaagaatcggaaaaataaccgttcaaaatcgtggaaacatccacattgataatatctcccgacttcaaaatgacatcctttgacgggaatccatggcacacctgatcgttcaccgaagtgcacacgctgtacgggtagccctgataatgcagcggcgccggaataccacccatactggtcgtcatgtcgtagacaatcttgtcgatttccgccgtattcataccctcatgaatgtgctcctgaatgtaatcgagcaccgcgatattgatcttgcagctctccttaatccctgcaatctgatctgcattcttgataatgtcatgggtcgggacgatatgtccctgcgcagcgatcgctgcaatcttctcgtcaaatgcctgatggcatgccttgtatttccggccgcttttgcaccagcacggatcatttcttccaatttttactgacatattcttcttctcttctctattttattttttatattatattctgcctgccgcaaatgctttcttcacatatcggcgcatatcctgcttcacgcaatggaaaatctctgtctttccctctttgttcaatgatctaccgtgatgctgccgaacggcacgcggccccaggtagtctcgtctaactcacaggtatgctgtgccagaagtttttcgtattccgtgccgccgatggaataatcctcgtaatcgacctgttccatctccgcaagaatactctgatatttctgcgccagcgccatttttcgcatggatgcatcaatcgtttcctcatcgacacccaggcgcgctctctgttcctcggtaaggtcactccaaaaatcctgctgatcattggcaagatactgttcctcctcctctgagagcgtgattttctctgctgttgccatctggtaaaacagcgtatcatgaatggtcatatccaccactgtctgtttcgcctgctcccgcaggaacgtatgattgatatacagctgccagtattcatccgtattatccggattatagatgatggccgcatcttccatgctgccttcctcatatgcgatataaaatgtcatctcccgcagagtcacctgctccccgtccactgccaccaccacaagatccagcgattccgggaatgacagcttctgccgctttccctgttcgcggtaggatgctgtccccagaatgatgagcagaacgaccagaacagcggtaaatcttaatttctgtctcatgcctgacaaagctttgctaccacctgattgatcacgctgccctccgccttgcctttcagttccggcataacagccttcatgatctgtcctttgttgtggcttgctaccacgtccgcgaacttctctgtgataaacgcctccacctcgtcagccgacatcattttcggcgcatattccataaaaatatcgtaacgcgtcttatattctgcaagcagatcttctctggatgccgggcaggtatcgatctgttccttcacggacttgatctcctttaaaatgacccggtccacaagttcttcccgaatgtcatcgcggcagccctcatcgattgccaccttcttcgcagccgacaccagtgtggagattgcatccttgcgcaccttgtctcttgccttcattgctgcgatcatatcatcctgtaactgtttgaactgcattttctattcctccatctcttatttcatttctatccagattatagcattttacttttgaaaatacaaacctacaacacacgccgaaccgaagtgatcgtacggtaagttgcatttccgtagcagataccggttctcgggttggacgcatggataatccgtcctcctccaatatagattgccacatgtcccggatagcagataatatcgccgggctgtgcattttcatagctgactgcctgtccacagccgctctgcgaataggaagatcgcggcagggaaatgccaaaatgctggtagaccgccatgacaaaataggagcaatccgttccggatgtcaggctggtacctccaaggacatagggattccccagaaactggctcgcataggacacgacgtcactgccgctgactccggtcgtgtaggacggatttagtccgccgtccgtcagacctgtggaagagctgccggaggtactgctgcccgaagtcgaggtatccgtcccggtcgaagcggtatttccggtcgtattcgaggtcgttccggtgccggctgtcgaggcatccgttccggtggtgctgccggtcgttcctgccgcagcagccgcctgcgccgcctttttcttcgccgcctccgcagccgcctgttttgccttctccgtcgcgatgatctggttctgctgcttgatcgtctgcgcatactggcttgcaagactctgtgcattggcaagctggctgtcaaaatccgccatctccgaacgctttgtcgcaatcacctgctccagagagctctgctgctcctgatagctgatctgaagctcctccatctccgccatctcactctcaagctgtgccgtcagatcttccacctgctgcaccacttcctgatagttcgtcagcatatcgcggtcatactggtagacgtccgagacatattccacccggttcaaaagatccgtaatgctgtccgcgccgactaacgccgtcaaaaaggactggtctccattctcatacatatactgaatccgctgcttcatggcgtcatactgctgctgttcctctgctttcgcattttccagatccgcgtttgcctgttcgatctcctgctcctgcgtatccatatcgctctgcaagatgtccatatcggtaagcaggctcatgagttgattgtcataattattcatctctgcctgaaggctgttctgcgccgactggatattctgaatctgctggttcacctgattcagttcctgctgtgcctcatcctttttatcctgtgcatccttgattgccgaagcagacacagacgcatagtttccgattccgactgctcccgccagaagcagtgccagaacgcgtttcttaaaatgtctcatgcgatatctccatcccaaatatctgaattatctttcattgcgtacaaaaaacgggtatgactctgttatcatacccgttgattatatcatacttccttataaaattgtcacagtttccataatttttcgatttttcggaaatcagatcaatcccatccgatatacatcagttccagatcgctcagctcgccatcatagaacgttacggaaatggagttttcatccatatcttcgtagatgtcgctgtggctgtaccactgataagactggtagtcgccggtatccgactcatactcataatccggctcgccgtaagcagtcataaagtcgtcgttgaccgcatcctttgtcagaccgttcggaagaaggatctccagatcgtcattgtagtccatgctggtgaacgagaaaccgaacacgattccgtctgcaagtgtctgcggatcgtcggttacatttccaatgtacacctctcccagctcatttccctgtgcatcgtagaaggtcggatagtagtattcgttcttgttggatacatactcctcatcctcggagtcgatggaaaaaccaagtgccttgaactcactgtagctcatcggaagctgcaccagaataccattcacggtaatgtctccactgtcaaacgcatcccctgctgtcacgtcaagcggcgctgccgttttggcatcctctgtatcctcgctgtcatcggtgaggaaatcgtcggtgtcgtactcttcatcaccggaatcacccatgaaatcatccgtgtcgtaatcatcgcttacacctgcggcctcgttatatccttccatgaacgcatcctcgatgtcgttgctgtaaagtacgctgaaaataatgctgaagaccagccataccagtgcgatcgcaaaaccgatccacaggcagatcgtcgccgacttgctgttgcgcttatactcctgcacatctccggacttgtaggcactgttcgccttgctcgtgaatacgcatccgataatacccataatcatggtaatcaggttgcatccgcagcagcacagaatctcaaggatggagaatgtaatcttcattccgaacgagttcttcaccggctgaccgttctcgtcgttgagcaccgtcgcctcgccatagtttacgccggcatatgcatttcccgcatactggccgttcgcctgaccatacgcctgctgaccgttcgtctgctgtccataggcattattctgtccgtaagcgttattctgtccataggcgttattctgtccataggcgttattctgtccgtaagaatactctccctggccgttcgtgctctgctctccgtaattctgctgaccgtaaggctggctcacattcccctggccgttcgcattttctgcctgaccgtagttctgaccgtaaggctggcctgcattctcctgtccataaggctgacctgcgctttcctgtccataaccgtttcccggctggccgtaagcattcgctcccggctgggcgtccggctgcgtcattccgctattcgctgccacgtccggctgaccgtatgcaccctgtgctcccggctgaccgtacacatcctgcgttccctgctgattctctgcccccgcagatcccggctgtgtctgtcccgggtcgttctctaaattgtaatttttgttctcattctgatccatcttttgtctccctgttttcaaaattcttttcaaaaaataacactcataaccactttagtataacagagcgtcttctattactcaagcaaatctgtgcaaatagtacctttatcctatctgtttgacgatcagcaccgcatctcccggctgcagatttttttccgtccagccgttggtttccagaatatcctgtatggtcgtatgattctccttggcaatcgtccacagatcatcgcccgcctttgcaatatagcccaccagaccggggcggttctgtaattcttccatatctaaaggctcttctgtaatctcttcgatgttctgtattttctgcggtaaaaacgccatcaggtttaactggatcaccgctttgatctcaatatgttcctgatccatcatcaccgcggacagctgctctaatccgcagtccatctgcgcctccacgtccggctgcatatcgggaatctcaaggatctgggaaaacggatagatttcccttgccgactggatcggcatattgtcatccgttgtgatatagagaagttccgccgtgatcgttccctccgcccggattccgttctccacaggctcgtatttttccaggcgcaccgttccctcgcaggcacagatctgcaggattttctcctggctttccggaatttccagctgttccgtcacccggcattttgccgcattttttacaagaagtctctcaccgatccgctccctgactaccggaacagctttttcccggagcgagtagagatcggtcagaagttccatctcttcttcccgccacacgcggacatcaaccgagacggagagttcaagcacaagaatgcgctcctccccgtcgtaatccggcttgatctccagttccgccgacagcgggacagccgatattttaaaaatgcaattctccccggcagcgtcacagtcggccgcacattccagaggaaccgtcgtctcataccactgcaggcgctcgctctcctcttcctcactgtagagcaccgccgccagaatctcacctgtgacgaccgccttcccatcctccacatggctttcgacgttgcggagttctacactgcgccacagaatttcccgcacattgggtttgttcgacggcagaacaatctcactcttctgccggcagacatcccggcaggatgcgagcagattgagcgctccccaggttcccgtcttctgctggtaatcccccggcagttccagtctggacgtaaactcctccaacacctgttcctccgccgaggcacgcagcacaaccaccgcacggatgctcaattttctcgaattgattacgccgactgtcagatcctcgatctctccggcggcatgtacctccccgttctcctgcagcccgtctatattgagtttctcctgaaacggaatctctcctttgaggcagctgatttttccatcactctgctcacaccggtaaaggatgtgaaacaccaggcttccttttacccacaccgccttgtttgccgccttcacctcgtcaaaccgcagttcgccattttctttcaaaaccttcatgatgtccggccggtagtccgggacattatagtcatcatccagcgtgatctggctgaccgccgtgccattctgctgtattctatgtatctttactttttcgagttccaaaaaaatatcccccatatccgaatctttgaaacatcttattcgaatacggggaatattatacctgataccttatgttaacataatttcatccgaatatctcttgtaatgatatccgaataactgaatgaaagtaactgaggcggattttcttcctgctcgtcattcaccagtattgtaaaaacactcggatatgcgttctgaatgactccttcctggatgtcgaccttgttgcgtcctctgtcaagctgaatcagtaccttccgtccgcactgctgatacacggaagcgcgtaccttatggatgtctgcctgttgcattgtctacctccctgttccggcttcttatcgtcctaacaccgaataccattccgctttagtttatcactgcactaaatttttgtcaaacaaaccggagaattttttaaaaatattaagaaaattcactcaaatatggtactttcgtcacgtttttcggtctttattacaatataaggataactcggtccgctgcttacctgttctccctttctcggtcccacaagttccgtatcgaacaaaatcgcattcgacgtcagatacagatcccggatgcagatgctgtaacctcccgtctcctgttctccatacccgcgcactatgtacagatccccgtcgagttcataggtcgttttaaaatcagccgcctttttttcctctatcacagccttcacttcctccggtatctgcgcctcctccacgatctcatagtcaagatcggcaaccttcgctccgtttgtcgtctcaatgctgcacccggcagcaagcagggccgccgctgccaaaaagaccagacaccccttcttccatctcttcccataccaaaacatctgacagtcccccaaattttcggttctatccaaagtatatgccgcatcttttttaaatatgcctgtgaattctcttttccgcgtcttgtgtttcctcttttcaggctttataataaaaactatgtaaaaatctatgggcgcttgcccggaaaggatctttttatgttacgagccatccttgctctgctgtttgccattctatatctgatcatcggaattcccgttctcggaatcgaatggatcatcagcaagttcaaccgtaaggctgccgacatcagccagctgcgcatggtgcagtgggcgtttcgcgtcattctgttcatctgcggaaccaaagtcaccgttatcggtgaagaaaatgtaccaaaggacgaagccgttctgtatatcggcaatcacaaaagctacttcgacattatcatcacctatgccagatgcccgggtctgaccggctacgtcgccaagaatgacatggcaaaagttccgcttctttccctgtggatgaagcgtctctactgcctgttcatcaaccgtgatgacgtcaaggaagccttaaagaccattcttgccggcatcgatcacatcaagaacggcatctcgatgtgcattttcccggagggaacacgcaacaaaactgacgatctgatgcttccttttaaggagggaagtttcaagatggcagaaaagaccggctgtgcgatcgtccctatggcaatcaccggttccgccgatattttagagaatcattttccgaaggtaacggcaacacacgtcatcttagagtacggcaagccgatctatccgaacgagctggataaagagacgaagaagaaaatcggtgcccactgccagggcatcatcgaagagatgctcgtaaagaacgaaaagctgcggtaatgtcagacatgcagcaggagacagcggttcgtcggatcgctgttgctcgttaaagggcataacgcgagcgttccagcgaaaaacaggcgggaggattctttggaacaaaatacgagaatttcttctctgccgtttttgccagttccttccgtgtcttggccacgttttgacactccgcgaggatgtgtccgacaagccgcagacaatgagcggactttctggtgcccctagcggcaccgcttcacagacaatataaaaccgcgcgaaccgaaactcgttggcatctgctattgaaaacagggcagatgccaattcaaacatcggcttcgcgcggttatgttttgtttagcggtgccaacaaggggcactcacaaaagtccttaaattgtctgcggcttgcggacacgcctccggagtgttcaaaacttggaaagacacggatcatcacatctggcaaaagtggcagagttagaaattccgtattttgtgatcagaatcctcccgcctgttttcgctggaacaccggagttacgctctttaacgaggatcaccggtacagccaatcttcgctgtctcctgccgcaatatctgtcattaccgcagcttttcttctattccgtcgcactctccgtgacgttctcagtctccgtatcctccaccgttgtggtgaacaggttatcaaacgttaccttcgcccacacggaatccttcacgatccagtcgtgctcatcttcccagcctttgagcgtctcgtcgtacagatcgctctggcgctggctgataatgttctgtctggtcgtctcggttgcatccgcatccgtcttctcatccagacgaactacatagtaatcggtatctgtgtcgatgacatccgacacctccccttcgtccagtccctgcagtgccgtaagaactgtctcgtcgaggttgctgtcgtcggcagtaaaagttccgctgctcaccgtgtagtcatactgctctgccgcatcctccagcgtacctgccttcgcgtccgtgtcaaacatgccgaccgtcttgccgagcagagtaagctcggtgtcggtgtactccacggtattgccgtcctcatccgtatgggactgcttggacaccttgacatagctgtaggagcttgtgttggcttcctcgtccgtcacattggtatcggcatccgcaatgatcgccgtatgcatccggttctggatcgtcgccagtgtcagataacgctccacgatctcctcgtccgcaccgagtgcattcagcgcgtccttgctgttgtctgcaataaacgcagccgctgtgtctgcgatctccgccttgtcatcctccgtcagctccacatcgtactctgccatgtgcgcttccagtgtatacatatcgaacagtgactgcatcacgctgtccttgatattgtcctgcatcgtcgtgccgttgttgtacagatcggatgaccatacgtcctcgccaaaatatgccacatagaaatcatcgtatgttgcctgcagaaatctcgctgcaaaatttgctactccaagcggcacttccgtctcatcaaaagttgccactgtctcatttttattcattccacatcctgttaacatggatgctgccataacaccgctaagaagcagtgcgctccatctctttgctctcataggttcctcctggtatatgccatgacagcttgccatggcagtcttgctctattatagtgcaattttctccgggtcgcaatatttttcatacttttttcaagcttttccgacgccggagagccggtccaccggtgcccgaaaattggctttctacacctttttacccttcctttggtgcttcccgctccgtcagaagtcctccggcatcgctaaggaactgctccaccaccgatttgatgtccacattcttgtccctcgaattctttttcaggtgatatgtgaaatacgggtttttcggatcagcggtaaacgtcaccttctgaccgtatgcagccaccagttccggaatcttcgccacatcaatccgtgctttctcatagagagtaaaacggacactctcacccttctgcgccacttccgtaaaataaagccggtgcgccattgatttgatttttgcaatgtaaagcagattttccacagacttcggcggatctccgaaacgatcgatcagttcctccgtcatctcctccgtctcctcctgcgtctcaatatctgcgatgcgtttgtagatgtccagtttctgcagttcgttcggaatataacccatcgggatataagcgtcgatcacaatatcaatcgacgtgtcaaagctttcctccaccgcgatgcccttcgcttccttgaccgcttcgtttagcatcttgcagtacagatcatagccgaccgcttccatatgaccgtgctgccgctcgccgagcaggctgcccgctccgcggatctcaagatcgcgcatggcaatcttaaagccgcttccaagctccgtgtactctttgattgcggcaagccgcttctctgcgacctccttcaacatcttatcccgcttatacatcaaaaaggcatacgctgtgcggttcgatctgcccacacgcccgcggagctgatacagctgggaaagccccatattgtccgcatcctgaataatcatcgtattcacgtttgaaatatccagtcccgtctcaatgatcgtcgtggaaacgagcacgtcgatctcgccgttgataaaccggtacatgatattttccagttcggtctccttcatctgcccgtgcgcatacgccacgttcgcctccggtacaagttccgcaatcttcgtcgcaacatcagcgatctcgcgcactctgttgtatacaaaatacgcctgcccgccgcgcgccagttccctggagattgcctcccgcaccagttcctcattgtactccatcacatatgtctggatgggcacacggtccatcggcggctcttccagcacgctcatatcccggatgccaatgaggctcatgtgcagcgtccgcggaatcggcgtcgcggtcagtgtgagaacatcgatgttggtcttcagctgcttgattttctccttgtgtgccacgccgaagcgctgctcctcgtcgatgattaaaagtcccagatctttgtagaccacatctttggacagcagccggtgcgtgccgatgatgatgtccacctgcccctttttcagcttctcgatcgtctttttctgctccgcgctgcttctgaaccggcagagcagatcaatattgaccggaaaatctttcatccgctgcacaaagttgttgtaatgctgctgggcgaggatcgtcgtcggcaccagaaatgccacctgcttgccatcctgcaccgccttaaacgccgcacggatcgcaatttccgtctttccgtatccgacgtcgccacagatcagacgatccataatcttcgtgctctccatgtcggccttggtcgccgcaatggcaagatcctggtcttccgtctcctcaaacgggaacatctcctcgaactctttctgccacacagtgtccggtccgaacgcaaatccctgttcattctggcgcaccgcgtatagcttcacgaggtcttcggcgatctccttgaccgctcccctgactctcgacttggtcttgttccactcctgtccgccaagcttgtttaacttcggctttttcgcccccgcgcccgcatatttctggatctgctccagctgcgtcgccagaatgtagagattgcccccgcctgcatactcgatcttgatgtaatccttctcggtcctatccacctcgatcttctcaataccgcggtagatgcccagtccatggctctcatgcaccacgtagtcaccgatgttcagatccgtaaagcttgcgatcttctctccctcatagatgcgcttgcgcttctttttcttcttctcaccgccaaaaatgtcgctctcggagatcacgacaaacttcagcatcggatactcatatcctttttttatcttgccgtaacccgtcatgatctcgccgggctttacctcgtgatcgtagtcttccgaataaaaagcattcagcccctccgccatcagatcatccgccagacgcttcgcgcgcgttctcgatcccgacagcaggatcacctgatagccgttctttttgtaacgctccagatcctttaccagaagttcaaagctgttgttgtacggattgaccgtcttagactggatattcagatgtgtcccgatctccagatgcggattcttaaggtcgagtgccaccagcgagatgcatctgcgccccgcaagttttccaagaatctccttgcaggtaaaaagttcccgcatctgccccggcagaatatagcctttttccaggcgctgcttcatgctctccgaaaattcggtctccgtcgccattccgcgctcaatgctccgcggcgtctcatccaggaacaccagcgtatcctgttttccaaaataatcgagcaaagagacgcgttcctcgcaaaaataggacaggtaggcgtccagcccggcagagaggcccagctccccggcttcctccgccacctggtccgccgcagacttgacgcggtacgcctcctcggtcttcatctccccgcggagcttttccgaaacctgctttgcttctgccagaatgcgcgcaataccggcgtcgcgctcctctttggtcagcaccagttcgcacgccggatagatgtggacctcatccagattctcgatcgaccgctggctttccgcatcgaatgagcggattgaatcgacctcatcatcccacagttcaatccggaacggattctcctccgtcagcgggaaaatgtcaatgattccgccgcgcacggagaattcaccgcttgtctgcacctgataattcttctcgtagcccagttccgccaggtgccttgtaaactgctccagatcgatcacgtccccgaccgccactttccgcaccgcactgataaactgatccggcgacggcatcggattcatcagtccgtcaaacgtcgttacaattgtgcacgagcgcttttccgccatcatcttgagggcattgatacgctccgctgtcagcacatttccccggatatccgactggtaaaacagaatatcctttgccggataataggcagcgttcggatcaaaaaagcggtattcctccgccagttccttcgctttttgttcctgaaacgtaacaatgattctgtttccagaaccattgccaatgctgtacatcatatgtggtttagctgcatcgatacagccggaaatctgaatgacgccggatagcttcggcagtgccgcttccaggtcttcaaattctttcagcccctgcatgggctgtgtgaatgtcttcatgactgactctcccgctttttcctgttaaaatcattcattgcctgatcaatctcatcctccaggatcatctccgtagccttcacggattccttcaccgcttcctcaaatgccgcgcggtcttcctcactcatgcgtccgagcacatgatccgccagatcccatcccgccggtttttcgccgacgcccaccttaatccgcttaaagttctccgtcccggtcattgcaataatattcttgattccattatgcccgccggcgctcccttttttgcggatacggatgttccccggtgccaggctgatgtcgtcaaaaatgacgagaagctcctcctcgggatcgatcttataataatgtagaagttccgccacgctctcgccgcttaagttcataaatgtctgcggttttgccagaatcaccttctgtccgccgatcatccctttgccgaaaagcgccttgtgtccactttcgctgatactgatattatatttttccgcaagggcatccatgacatcaaatcccgcattatggcgtgtatgctcatactgcctgcccggattccccagacctacgatcaagaacatcgctatctcctattctttgctttgttgcctgcaattctccgccggatcacgactgctgcagccgcaagctgctcctgatcgttgacccctgtgatatcctccgggtcatccagcgcatacgcatccaccttcagtcccttttccttaataattgtgagcgtatccggcagatagtattcaccctgcgcattattcggcaaaatcagatccagcgcctcacgcagctccttcgtatcaaaaatatacatacctgagttgatctcgtgggatgccagttccgcttccgtcgcatccttgtgctccacgctcttcacaaaattgccgtctgcgtcgcggataattctgccgtatccggtcggatcctcgaccatcgctgagagcactgtcactgtatttccactcgcaatgtgatgctcccttaatttctttaaggtctctgccgtgataagaggggtatctccaaacagaatcagtgtctgtccttcctccccgagaaagtcctttgcacaccgcaccgcatgaccggttcccagctgctgctcctgtaatacaaactttacgtccttgtgcgaaatgctctcccgcacgatctcgtatttgtagccgaccacaaggcagatctcaccggcgccggctccctctgccgcctcaatcgcataatccaccagacattttccctctatggtatgaaccaccttcggcagatccgacttcattcgtgtcccttttcccgctgcaagtatcactgcttttaactgactcatcatactcctcctgccatctattgtaattgacgattcctgctgtcttttgtttgatcttgtcacagttcacgtttcattttaccttagtttgcggattttacaagagttttctgcaccactgcctgatccctgcgcgtataaacgaatgcgcacaggctttaccttcccgtaaaacctgtgcgcatttattttcctgggtaagctgccatccggcttcctcccggtattattcctcagcagccattgtctcctggtatttctgaaggatcagagtctgtatccgctctcttgtgtccgaattgatcggatgagcgatgtcgcggtattccccgtccgcggcctttctgctcggcattgcaatgaacaatcccttgtctccctcgatcaccttgatgtcgtgtaccacgaactcttcatcgatggtgatggacaccaccgctttcatcttgccttccttctcgacttttctgattctcacgtccgtaatctgcatagattctgtccccctttagtcccttctctacagtacatacctttcgttgttctcggatacaatcctaataccgttgtcgccgcagtaataggtgttcgccttgagtgtatcacggctctcgacaatgcagttctcaatatgtgtgttgtcgccgatataaacatcattcagaatgatggaattcttaatcacacaattcttcccgacaaataccttcttgaacaggatcgaattctccaccttgctgttgacgatgcatccgctggcgattaagctgttgcgcacatcggaaccgatattgtattttgcaggcgggagatcatccactttggagtaaatcttcggctcatcatggaaaaagtatttccgcacctccggttttaagaaatccatgttcgtctgatagtaggattctacggtcgcaatattgctccagtattccttcatcttataaccatagatctgtttcatattcttatagcggatcagaatatccgtcacaaaatcccagcgttcttccgctgcgctgcgctccagcatctcaatgagctgtcttctgcgcacgatatagattccggtcgataccgtgttcgacttggataccatcggtttttcctcgaactctacaatcttggaatcttcattcatccggaccacgccgtatctgctgacatcctctcccggtgccatatccttgcataccaccgtaatgtctgccttcttctcaatgtggtaatcaagtaccttattataatccagcttgtaaatgcagtcaccgctcgtgataatgacatatggctcgtggcgcttcttcaagaaattgatgttctgatacatggcatccgctgttccgcggtaccaccagctgttatccacggttactgtaggattgaatacaaacaatccgccctgtttgcgcccgaaatcccaccacttggaggagctcagatgctcgtttaacgatctcgcactgtactgtgtcagaaccgcaacagtctgcacatgggagttgctcatgttgctgagtgcgaaatcaatgcttcgatagcttccgccgatcggcattgccgcaatcgccctcttgttggataattcctgcatacggctgttattaccaccagctaaaataattcctattgccttcataccgagtcacctgccttaatgattacttcaccgctctcaagaattccgttcgggtaatcttccttgtccgtcgtaccggaaattgccgtgttctttcctatcttaacaccgtccggtatcacactgtcttctccgaccgtcaccagaccaaaggaatagatgctcgcattgagcttattcggtgcctcttctccaatgccaagctcggtgttcgctcccacctggcagttctctgctataattgatttatcgatgatagcattctcgccaatcgttgttcctttcatcacaatggaatcccggatcactgcccccctgccgatcgtgacgcccggtccgatcacggaactatgtacctcgccgtatacctcggttccttcaccgatgatgctcttctccacaacggaatccgcggagagatactgtggctcgataatatcactcttcgtgtagatcttccagtattcctcgtacagattgaactccggaatcaggtcgatgagctccatatttgcttcccagtaagagccgagtgtaccgacatccttccagtagccgttgtattcatatgcaaagagacgttttccattctcgtggcaatacgggatgatatgcttaccaaaatcacatccgctctgatccttcatggcatagagcgcttcttttaaggtatcccagctgaaaatatagatacccatggacgccagattgctgcgcggcttttccggcttctcttcaaaatccatgatcttcttgttctcatctgcgatcacgataccaaaacggcttgcctcctcaatcggcaccggcatcgtggcaatcgtcacatccgcatgattctccttatgaaaatcaagcataacctcataatccatcttataaatatgatccccggataagatcagcacatactccggatgatactgctccatataattcatgttctggaatattgcgtttgccgttccggaataccactcgctgttatcgctcttctcataaggcggtaacaccgtcactcccccgctgttacggtccagatcccacggaataccgattccgatatgggtattcagacgcaatggctgatactgggtcagaactccaaccgtatcaattccggaattgatgcagttactcagagggaaatcgataatgcggtactttcctccgaacgcaactgcaggtttggcaaccttcgctgtaagcactcccaggcggctgccctggcctccagctaatagcatggctatcatttcttttcgaatcacgtcaatcacctctcgtctttctagtcagtctatttctctttgcacttataattataacataatcgtccacccatgtacatcatttttcacaaatttaccagcgcatttttctattttttgacattttcgccaaatcttttttctttctacactcttctttcactttctgtcgaaaatattttatcccaaaagaatttgcaaatcagtaagataaggttataatgaactttatcatagaaagaaaaacaggcaggtagaattataatgtataaaatcaattttaaagaacccatacatatccattttatcgggatcggtggcatcagcatgagcgggcttgccgagattctctccgaagagcattttacggtatccggatccgacgcaaaggaatccgatctgaccagacacttagagcatcttggcatcaaggtttactacggtcagacagccgcaaacatcacggatgatattgatcttgtcgtctacaccgccgccatccacgaggacaatccggaattcgcctgtgcgcgcgaaaaggaaattccgatgatgccgcgcgcagagttgctcggacagatcatggacaattaccgcaactccatcgcggtggcaggcacccacggcaagacgaccacgacttccatgatcagccagatccttcttgcagccaagtgcgacccgaccatcacagtcggcggtattttaaaagcgctcgacggcaacctgcgggtaggcaagtccgatttcttcctgtcggaagcgtgcgaatacacgaacagcttcctgcatttttatccgaaatacagcatcattctgaatatcgaagcagaacatctcgacttctttaaagatattcaggacatccgccattcattccaccaatttgcatccaacacccgggaggacggcgcgatcattataaacggcgatattccggattatacggagattaccgccggattaaagccgcaggtgatcaccttcggtcttggcgacagctgcacgttccatctggcagacatcacattcgatgagaaagcctgtgcaagcttcaccgccatgaaaggacaggagcctctgatgaaagtcacgcttcacgttccgggcatgcacaacgtatccaacgcactggctgccattgcgctggcagatgatcttggtctttccaccgatgcggtcgcaaagggattatccgacttcggcggtgccgaccggcgtttccagtacaagggctgtgtggacggcgtcaccatcatcgacgactatgcgcatcacccgacggagatccgcgcgacgttgaccgctgccaggaactatccgcacaaacggctggttctctgcttccagccgcacacctactcgcgcaccaaggcatttttagaggattttgccgatgtgctctccctcgctgatgtggttgtccttgccgacatctacgccgccagagagaaaaatacctacggcgtctcctcccgcgatatcctctccaagctcagggaacgcggcacggaatgctattattttccgtcatttgaggagatcgaaaaatttttattaaaaaattgtgtaaacggagacttgttgataactatgggcgccggagacattgtaaatgttggcgaacatcttctcggcaaataagttatccactttatccacattcaattggggaaaacttcaacttttgaatgtggatttttttgtttacataatccttatgcacgtttcctgcgcttttgccgcctttgccgtcttttgcgccaaacctttcgtttccataatccggtttccaccggattcgttttctttatccacattatccacatttccgcggtcgattgtctgtgccggatgtgttccggaaaagatacttctcattccagttttcctgtgctataatgcatcagggaatgtcggcggctgccgtacatttcgcttgttacgtttgagaaagaggagtcggtttcaatggccaatattaagctacacagtgacagtccagtctctgcaaccagtgtttccaacacgtttatcgatgaatatatgtctgatgccaacggggaattcgtcaagatttacctctacttgctgcgccttatgaatgcgccgcaggcgtctttttccatttcttccatcgcggacaagttcgagcacacggagaaggatgtcaagcgtgcccttgcctattgggagcgcatgcacctgctgcagcttgaatatgacaatgataagaatctgaccggtatccgcatgctggattcttcgtccagagatgccgccccgtctgatccgggtacttccgggacacagacagagccagccggcgcaccggcacagaacgcccctgcttccgccgctttgacagaaacaccggcaccggcgcagacagttcctgccaaaaagagctattctgcggacgatattttgaatttccgccagaatgaatccgtcgcagagctgttcttcatcgcagagcgttatctcggccgcaccttaagcgccaccgacatcaatacgcttctctatttttatgatgtgctcggattttccaccgagctgatcgtatacctgattgagagctgtgtgagcaacaatcacaccagcatccgatacatagaaaaagtcgcacttggctgggcagatcagcatatcacaaccgtcgaggaggccaaacagggttccccggttcttggcaaaatgtactacgccgtgatgaacgcgttcggcattaccggacgcaagctggtttccaccgagatcgcttatatcagccgctggacgaacgagtacggttttgactccgacatcatccttgaggcatgcaagcgcaccatggaaagtctgcatcagccgaacttcaaatacacggattccattctttccgactggaacaaaaagcaggttcaccatctgtccgacattgcaaaactggatgcggcgcaccaggaacgcaaaaaaagttccgcttccgctgccgccaatacagcatccaaaaacaagttcaacaatttcacgcagcgctcctacgactacgacgaactggagcagatgcttttgaccacgaacgtacactgatttaaaggggaaacagatgccgctaagcaattcacagtatgacgagatattccgcaaatatgacgaaaaacagttagccagccagcaccagctcgagcgccgcacaaaggacgtctacgcccggattccggcacttaaagagatcgatgacgcgatcgctacctgttctgtcgagcaggcacgccggctgttagacggagatgaggccgctctggccacgctccgtgaaaagctctcggactaccgcaggcagaaggagcagctgttgcaggagcacgggcttgcttctgattatctgaagccggtgtaccactgcccggactgcaaggataccggttatgtgaacggcagacgctgtcactgttttgaacaggcagccatcaatctggtctatacccagtccaacttaaaagagattctggaacgtgagaatttttccacgttttcctttgattactattctgcggatgacatcaatccggcaaccggacgctcgtcccttgagacagcaaaggatgccgtcgcaaaatgccacgattttatcgatcatttcgacagcaccttctccaatctttacctctacggagataccggcatcggtaagacctttttgtccaactgtattgccaaggagctgttagaccgcggtcattccgtcatttactttaccgcattccaattatttgatatattaagcaagggcgtgttcaaacgggacgaggaggcactgctttcccaccggaatattttcgactgcgatctgctgatcattgatgatctcggcacggaactatccaattcctttacgacctcgcagttatttttatgtatcaacgaacgcattctgcggcagaaatccacgatcatctccacaaacctcgggatgaaccagcttgccgatatttattcagagcgcgttttatccagaatatccagcaattatacattattaaagctcttcggcgcggacatccgtatcttaaagcgtcaccgttaacatttttatccctgtatttcattagagcaatctattgaaaataaaacctatgtaactattctttaatggaggaaccattcatgccaaacgatgaaagaaacttagaaaccatgcctgacggagcattgggtctcatcccactggaaagctgcaaagaactcggtcttaaggtagaccagtaccttgtcggctggcgcgaaaagagacagcaccagcaccagaacgaccctgcgttcaagggctatcgcagagattcttatatcatctcaactgcagtgccgcgtttcggaaccggcgaagcaaagggtgtcatcaaagagtctgtccgcggctatgacctgtatctgatggtcgacgttaccaattacagcctcacctactctgtatgcggttacgagaatcacatgtctccggatgaccactatgcagatttgaagcgtatcattgctgctgtcggcggaaaagcaagacgtattaccgcgatcatcccgttcttatatgagagccgtcagcacaagcgcaccgcccgcgaatccttagactgcgcacttgccttacaggagctcaccgctatgggtgtcgacaacatcatcacttttgacgcgcatgacccacgtgtacagaacgccattccgctcaagggattcgagactgtacagcctgcttatcagttcatcaagggtatcttaagagaagtcaaagacttaaagatcgattccgaacatatgatgattatcagcccggatgagggtggtaccaaccgcgccgtatatcttgccaacgtgctcggtctggatatgggtatgttctacaagcgccgcgactacagcaagatcgtagacggccgcaacccgatcgttgcacatgagttcttaggttcctccgtcgagggtaaggatgtgattatcatcgacgatatgatctcctccggtgagagtatgattgatgttgctaccgagttaaagaagagaaaggcaaaccgtatcttcgttgttgcaaccttcggtctgtttaccaacggcctggagcgttttgacgaggcggttgcagacggcacaatctacaaggtcgtaaccacgaacctgacctatcagacaccggaactgcttgcaaagccatattatatcaactgcgacatgagcaaatacattgcttatatcattgatacgttaaatcacgacagctcgatcagcgatctcttaaatccgtatgaccgcatccagcgtctggttgcaaagtacaaagcagagcagaactaaacaaaatccaaaaagggactgcccgctaaaagcgtcagtccctttattatgcctatgtattaaaacaagtctactctgccagcaattttctgattgatcacataatacgctgcgttctcttccggctttaagtagagctgaagtgatttgatcgtggatgctctgtgaccttctgccacaaactgctctgtcactttcttaatggcatcctctaccacgccttcacgtccctgatactggatatacacttcaggcttaagctcttcctttgctgccttcttcgctgtctttgttcttggttttcttttctttgcggtctcagctgctgtcttcttcggttcttctacctttgtagccgcctttacctctgtctctttggctgcgttcttcgtctcctcgacttttgccacaacctttgcagttgcttccttcgctgctgtcttggtctcctcaaccttcgccgcaacttttgcttctgctgcctttactgctgccttagtctcatcaagtttcgctgtcgtctttttttccattatgagagccctcctcctcatcaaaaaaactactcacatactaaaaacttttccattgctactaatgcttcctcttcatcactgccctcggcaacgatgttcaccgtcattcctttggacgggttaaatgccatgattcccataatactcttcgcatttatccggcggttgttactctcaagtgtaatatcactgtcaaatctgcaggcaacctgaaccagttctgcaatcggattactatgttcctctgagacattcgatacaacaatctcttttctgctcataatctctccatttcctcttttcaagtactacgtctcaaaatataacccatctatttccaatttgcaatagaagaacatgaaatctgttaaacttacacgaataatttcctactttaaaagcttttttatgcactttcatttcaccagatatgtgaaaaatacatttcctgccgccgtaaacatctcatccgcctcggtcagcgtcttccggtatgtcgttcccagtgcaggatcaaatatcacgacgctgttgctgtcatatccgataatcagtaccgcatccgtgcttcctgtcatggaaaataccggactgccgcagctgacatagtagagaacctcctcgatattgcatccggtcagatccagcacctgcatatccttcatcgtattgttcaggatgcttttcggcgtctctccgccctcaatgagtgcgctcacgctgatattgattccttctttttccagcatggcattgatgcactgcgcaatgcttcctgctccggcatcctccgcaccgaccgcaatatcaggcagtgccggctgtgcggactttctggagcgtttccacacatactggaggttatctccaatcacgactcccatactgtcatttgccgccgtgacggcctctgtgacatcgtctgtcgccagcaccacattccccttcacgtatacataataatgctttgtgctgccctcttccttgattgccaccgtgcgctcctcttctaaaatcgtctccttcggggtgagaagcttcggcgccttttccgcggatgccccggcaatcgtaagctgtacctgggtctccttttccgcagaactgctcgttgcaatattgacaagctttccagaatctccctcacggttcatgatcatatcctgatccgccgggacatatgccgtgccgttatactggatgcggttcaagtgcatcgtgtagtcctcgatggacacgctgcttacaaaatagccgctcttttcatatgttttctgcacagtaagatcttttgtcgagacatccacaatccggatctggtgcatcggaaatgtcacatttccggcggcgtcctcgaaaatatccgactgtctggcaatgccatacacaaaatcctcatccatgaagccaagcggcttgatggcttccccggtgcccgccgcaatctcctgcgtgctctgatccgacagattcatcacgtggatcacactgctgcccatctgggaatccccctccgtctccatccatgcaaaatagcggttggacgcggacaccgcaaaatcctgtacgttcagattcgtcaccagttcccgcaccgagagggtattcaaatcgattccgtagacacacccgtccagcatcaggaaaagctctccgccctcatttacatacatgagctgcccgagttccgacttcatcacctcatacgacttatccgacggaatgaagaccagttcctcatcggtattcgccaggctgtcgtaatgatagaccgcaattccgacttccccctcatgaattccgcggttcatgtaaccgtacacgatataatccacgcttccggcttcgtccacaccgacgatcttgatgtcgtgttctccgtagttctcgcggctgtcaattccctcgtaaccgcggaaactgaacatttttgcaagcgtattttccaccgtattgtagctccagagttctccctcctgcacgaacgccacactggttcccgcctcattcgccttgtattcaacgttcgcttcgcggattccaagctggatatactgattgtaaacgctgtcattttctccgcggaaaatctggttcatggtgcgctcgaaattcagcagatagatgcggcttgtggtgtagcgcaccctgtaatattcttctatattatagtattcaatctgaccgctctcgttgacactggataccacataatcgagcacgatcacgttgtaggtcggtgtgatctccttgattgacggaaccggctctgtcagacgctctcccttaaaatccgcccagctcacctgctttagagaagaatttaacgacacatactgcagtgtcgtgttatccccggtcgtccgctccatgtaagtcgccagtgttccggaggtctcatcgttgaacgtcttatcgttaaaatccttgacgaatgcgacgcactcgctcacatagcagtcgactggctccgcgatcctggtatagtaacagatcgaacggtctccgctcccgaggcggataatcatcagatactcttcgccctcttccagcagattctggatctgcagatctgccgtgatcttcccgctgcgctcctcataggaagtgacatccgcattcgcaatcaggcgtgtggcatcgagactgcggatctcataggaaatcgtgtcgaccgccgtctgattcgtctgtatcacaatcggaagcttccggtcttcccccaccggcgtaatggtatcgcgcatatatgcggcatccatctccgtcacgtacccgtgtagttcattcagctcctgatcgccctgatacatggtgatgaccggcagcgtcgcctccttcatctccgtcgtcagatcctcgttggtatcattcataaatcttccaaatataagcactgctccgatgaacactgccgccaagactgctgcctttatggttcccttccgcaacggtcattcctcctatataacgcaaaataactaccgcgcataaaaacgtgatagttctattaacacaaaataactatcgcataaaaacgcgatagttatattgtatgcattttaaaataaatccgcaatgactttctctgatttttaagaattgttttcgatcttatccggggcttcgcacccccgttaccaccagcgtctgcagcggcggtgacggcagcgtctccggtacatttcgttgtttaaaatcacaccgatcagctcccgcagatggtcattctgtccatgcggtggcggcggtggcggcggtctgtgtccgggcggcggctgcatgcctccgtgaaactgctctgcctccagcccgccgtcttctcctgtgactttcttctggatgcggtctaccaccatctcaatcatcaggcggtccggatactcatcgaacatcaggctaccctcgtattccattctgtcacattcatcttccacacactccacaatcctgccaacctctttgggatacagctccttcatgcggtccatatccttctcatactccatctcggtcagatacagattctgcatggggtagctcatataaaaaggcatcttgggcacatcaaactgcgcgtggaaaaactgctcctgattatagtccactctatactccctatagataacttcgctatatcatatgcagtgcgcgcgcaccgggttactgcgccagattctttaactcgtccaataaatccagatccgactggagcaccttcatattggtcgtgatcggctcctcgcccggcttggtgacggtgatttcaattaccgttccctccgtaatgcccgcagaaaataccgcatttaaaaacgccgcaaacttcggatggttctcaacgaacttgtttctcgcattcataatcttcataagtgaagccggattcatcataatatcatactccctttcttctgttgtgtcgttctgtctcccagtatagcacaactgccgcggcacttgccagcattcttcatccatttctgatcatggcactcgttgtatttctgattgtaaaggcattaaaccgtgcaaccgcaaagttcgttcccgcggaggagaaaaaagaagaagcaccaacgagcaaactctgtccgatgtgtaagaccgagattgccattgatgcctgccgctgcccgcattgcacttccattctcgatgcagttgccatgcacgagcgggaagcagggctaccgcgaattcgccgataaattattcttaaacaccatgcttcacaaccgcacgagacatagtctctacaccgcattttccagggaggagcagaatatcatcaacacgtttttatgcgtcacctccgtcaatatttaccggcagtgggtggcagacaaaaaaagagtgccgcttgagaggctgattgcgctctccggcaccctgttaagcaatggtgttatttctttattttaaatctgtctcttccttttcgcgcaggctcaccacaagctcatagacctccggtcttctctgctttaagtgctcatccagcacatgtctgcgctccttgaagcgctccgcaagctccggatgttctgttgcaatgcggtcatgcacctccctgcggtgttcctccagacgtcttgcgagtgtcttctcatcctttccggagatgttcacaatctcctttaagtgttcttccagatgttccagccactcgtcttcatccatcgcttccatgtgcgaccatctgccgtgcagcagattttccacatccccgctctccttcagctgttcaatctgcaaaagaatctgtttttcaatctgctcctccgtctccgcgccgaacgcccagacaaattcctgcacacggttgtccgcgcgctttctcgaggcactgcgatcatcattgtccacaccgccctccaacggatacgggcgcttgattcccatatcttttaacgcgatatgaatcgttctgcgcacgcttccctcttcgatcatgtagccaagccccagtttccggagctgttcgtttaaatcggcgatgtgctctgtcatgtaaaagcggatgcctttttctttcagcgactgatataacattcccagtccgtccgccgcggtgatatccatactgccgatgccgctcgcatccagaatgaccgctctcgtctgatcggtcacgtgatcttcaatatcctgttttaatacctgtatgttggcaaaaaacaggttgctgctgaaccggtagatgagtactccctcaaccgcgtggatctggctgccctctttcaggtcgcggaaatgccggtgtcccggctgaattcccagaaaacagcgcgccggctttgccgtgcggataatcatctcggaaaacgagaggatgatgccgatcagtacgccgttgatcgtcccgagcatcagcactccgaagaatgcgccggcaaagatcagacattccgtgcggctgactttccacagccggaccgccagctcaaactccgtcgcgccaagcagagcggagatcacgattgccgtcagcaccggcaccggaagatagccgataaacccggtgccgccaagcaggagcacgatcattgaaagtcccgccacaatcccggtcagctgtgtctttgcctgatactgctctcccatcgccgtccgggagaccgagccgttgatcgggcagcatccggtcagcgccgcggcaagattgcccatcgcaaatgccaggatctcctgattatcgttgatccggtatccgtttttctgcgcaaaattattttctgcgagcagcgtctccgccatgatgacgaccgccaccgacaggctgatcgcaaccgcctcccttaccggcaccgccgtaaaatccggcaggctccagaccggaagtcccggctccacggcatccagcgtcttgatgccccaggcgcgcatgggcagatactttgtcatcagagcacccgctgccatcaaaagcaccgccatcgggaatttcgggatgagcttttttgcaatcagcagtatcacaagcgcagccacgccaagtgccagggacggcagattgatctctcccaccgtctccgcgatatgctccgcaagctcaaagaattctcccgtccctgcggtgccgcccagaagcttcggcacctgcatcagaataatagtcgtgcagatgccggtgataaagccgcccatcaccggcgccgagatatagttgaccagctttcccgcccgcatcacgtaaaacgcgaaaagccacaacgccacaaacgcggtcagcaccggcactgccgccagcgcctccttcgatccactctcgatatgcagatctaaaagcgccgctccgatcagcgcggcaggcgctgcatccacgccaaaaataaactgcggtgatgtcgagaacagcgcgaacagaagaatcgggaacaccgatccgtacagtccgtatactgccggcagtcccgcgatctgcgcgtatcccatggagatcggaattgagactgccatgatgatgagtccggcgaccagatcttttccaagattcttccggtcataatttctgattgtctgtgcaaacttgatcttcatctgtcacacttcctttgctgcttttgtgttattttaccactttaggaaaataatgtcagcaaaagggattcggtgtttttatggctgcagttcaaaatgctgcaccagttcattaagcagtgtcgcctgggatgcaagttcttcggaggttgcggagctctcctcggcaatcgccgaattgtcctgtactccctgcgagatctcctcgattcccacgcggatctgctccatgctctgtgcctgatccgccgcatttcccgccgttttctggatcattccattaacgttgtccactgcttccactgccgtctttaacgaatccatcacatgatctgcaatctgattgcctttattgatctcttccatcgagacaccaatcagttcccgtgtcatatttgccgcttttgaactttcctgcgcaagctttccgatctcatccgccacaaccgcaaagccttttccggcctcgcccgcacgcgccgcctctatggatgcatttaaagacagcaggttggtctggtctgcaatttcctcaatggtcgcaataattccaaccacctgcttggaggtctcgtggatcttctgtactgcttccatcatctcctgcatcttatcctggctctgttccatcatagccgttactttttgggtctcttccgcggattgcagggcgtctttcttgctctcttccacctgctccgccacggatgttgccgttgcgaccagctcctccactgctgccgcctgcgtgccgcttccctctgccagctgctgcgccgcatttgccagatcgccggcactcgaagtcaccgtctgggaacttgcgctgatatttctcataacatcgttcatcgaacttgagatgtgcagaagtgcttcctttaattgaccaaattctccaacatactcctgctccagatgaatctcaagttttccatctgcaatccggtccaatgcaccggaagcttcctttaagtaagcgatatattctttcaggcgtgcgaccgttgccccgatcgattctgccagttctccgatctcattctttgccatgacgttcagctcgacatccagatctccctctgccagcctgcttgccgtctcatttaattctgctattggttttgataaagcatatgcgctcttgtcgatactgcgcattaccagaataatcccc

SEQ ID NO: 11538 - DNA, 4593 bp, Unknown
  gut microbiota DNA sequence
aaacggcagggcgacgttgcttgccatgttgcggaatcttatgtattatagtgaaaaaaggttgacagtcccggcataaagctgtatcatacttaagtggattcacactgcaacgcgttgcagtgtgaaaatataagaagataccatatgcagcagtgcgtatgacagaaaggatcaatagatatggaaatggagatggaatttttgcggaagctgcctactccgcaggagttaaaggagcagcatccggtcagtgcacagattgtagctaccaagacgaagagggatgacgagatcaggaatatttttgaaggaaaatcggacaagctgattcttgtgattggcccatgctcagcagataatgaggatgctgtgatcgactatatttcaagactccgcacggtgcaggagaaggtggcggataagatttttatgattccgcgcatttataccaacaagccgcgcacgaccggaatcggttacaagggcatgctgcatcagccggatccggagcgggaatcagatatgctaaaagggatcattgcgattcgtcacatgcatatgcgggcggtggaagagaccggctttacctgtgcggacgagatgctctacccggagaatcaccgctatctttcggatctgctgtcgtatgtggcgattggagcacgctcggtagagaaccagcagcacagactgacggcaagcggcgtgggaattccggcaggaatgaagaatccgaccggcggagatatttccgttatgatgaactcgatcattgcggcacagcacggacatacgtttttataccgtggctgggaggtcaagacgaccggcaatccgtatgcacatgccattttgcgcggatatgtggacaagtttggcagaaatattccgaattatcattatgaggatctgcagaatctgctggagcattatgaagaggcgaaggaagccggacacgagctggcacatccggcggtcatcatagacacgaaccactccaattccagcaagcagtttatggagcagatccgcatcagcaaggatgtcctgcacagctgtaaggtgtcaggagagataagaaagctggtgaagggactgatgatcgagagttatatagaagacggagcacagaaggtcggtgacggctgttacggaaagtcgatcacggatccgtgcctgggctgggagaagaccgagaagctgatctacgaattggcggaactgtggtaaaggagagagaatgtaccggatattgatcgtggaggacgatgagatcattgcgcgaagcttaaaaaagcatctggaaagctgggattatgatgtggtctgcgtggaggatttttccgatattatgaaggagttcgcgggggcggcgccccagctggtgctgatggacatcaagcttcccttttacaacgggtaccactggtgtagcaggatcagggagatgtcgaaggttccggtaatcttcgtgtcgtcggcgtcggataatatgaatatcgtcatggcggtcaatatgggcggcgatgatttcattgccaagccgttcgatctggatgtgctgaccgcgaagattcaggcgcttctgcgccgcacctatgattttgccgggcagaatacggtgctggagcatagaggcgcactcttaaatctgggcgatgcgacactcacctgcggggagacgcgggtggacttaacgaaaaacgaacttaagatactgcaggtgctgatggagaacaaggagaagatcgtgtcccgcgatacgttgatgacgaagctgtgggaaagcgacagctttgtggatgagaacaccctttccgtcaacgtgggaagactgcggaaaaagctggatgcagcaggacttccggattttattttgacgaagaaaggaatcgggtaccatatcgggtaggggattttgatgaagcagaaaataggaagatcctacataaaatgccgtctgaaatggattgccgcagtgactggctgcgggatcgtgatgacggcagtcttatttttaaatgaagtgcctgccggggagattgcctacggcatgctgttgtgtctgggaattctgctgcttgcagtgacgatggataggataagttacggcagacggcacagggaactgctggcattgcggcagtcaataacggtatcgctggagaatcttccggaacccggcgaaatcctggaggaggattatcaacggctgcttgggcttttggcggaggagaaaatgcgtatctggaatatggcagtcagcgaaaagcgcgatctgatggaatactataccatgtgggtgcaccagatcaagacgccgattgcggcgctaaagcttttaatcgaggaggaagcggatattcccggtgcagaggagcctttgggagcggacagggaaaggctgcagcggcagagggagaagcgcaaggatgaagaactacagcagctgtttgcgattgagcagtatgtgaacatggcgctttcgtatatgcgtctcggatcggagaccacggactttgtgctgcggcagacagatctcgacgaagtgatccggatggcggtgcgccgctatgcgagacatttcatcagcaagaagatcgtactgcactacgaggagacgggggcacgggtgctcaccgatgaaaaatggctcggctttgtcatcgaacagctgttgtcgaatgcgctcaagtacacgcatgaggggagcattacgattgggatggaggagggacgccttaccattaccgatacggggatcggaatacgcgcggaggatctgccgagagtctgcgaaaaaggctataccggatataacggtcatgccaaccagaaatcgaccggaatcgggctgtatctttgcagcacaatttaaaaaaagctggggcacagctttacgatcacatcgcaggaaggaacgggaacccgggtgatgatcggcttcccggaagagtcatagaagaatcttacaaaaacgtaagaaacagcagagaaatgtaatccaaagaaatggcttgcatttctctgttttgttatactgggtacagtcaaggaaaggagagagacacatggctattctggaagttcataatttgaaaaaaatatatacaacaaggtttgggggaaatcaggtgcaggcgcttgcagatctgaatttttccgtggaaaaaggggagtatgtcgcaattatgggagagtccggttcaggaaagacgacactgcttaatattctggcggcgttagacaaaccgaccgcgggggaagtgctgttgaataataagaacattgtgacactcggcgagagggagatttccaaattcagaagggagaacctgggctttgtttttcaagattttaatttgctggatcatttttcattaaaagataacattcttctgccacttgtcctggcagatgcaccggtgcaggagatggaggagcggctttggccgattgccgaaaagcttgggatcgatgtgctgcttgagaaatatccttatgaggtttccggcggacagaagcagagggcggcggttgcccgcgcactgatcacccgtccgcagctgattctggcagatgaaccgacgggggcgctggattccagggcgaccgacggactgttgaagctgtttggcacgatcaacggggaaggacagacgattcttatggtgacacattccacgaaagcggcgagccatgccaaccggattctttttatcaaggacggcgaagtatttcatcagctgtaccgcgggaatatgacgaatgaggagctgtatgtgcggatttcggatacgctgacggttcttaccaccggcaaagggggaggctatcatgcgtaagttatatgtcaaactggcagcagtcaatatccgcaataacagacagctttacctgccgtaccttctggcgggggtgttctcggcagcgatgttctatctggtaatgtccattcaggataacccggggctggagcagatgagaggcggcgcctatgtggcggtaacgctgctgctcggagtgagcattgtcggactgttcgcggcgattttcctgttttataccaacagcttcatcatgaagcggcgcaagcgggaattgagcgtatacaatatacttgggatggagaagaaacatatcgccagggtgctttttctggaaatgctgtttacggcggcggttacgatcggcggaggcctgttgttcggcattgcattcggcaagctgatgacgatgcttttgtaccgcatgacaggattcaaccagagcgttccgtttaccatttcgctgacgggatgccgccacacgctggtgcttttcggctgtatatacgcggtcacacttttctataactttatgcagataaagctttccaatccgatggaactgctgcacagcgccaatacgggagagcgggagccgaagacgaaagtgctgctggcggtgatcggagcggcggcactcggcggcggctattatctggcgcttacggtggcggacgcagtctctgccattaccatgttttttgtggcggtgctgcttgtgattctgggaacgtattgtctgtttactgcgggcagtattgcc

SEQ ID NO: 11539 - DNA, 12081 bp, Unknown
  gut microbiota DNA sequence
tgaactcgtcagagttcattatatcatattttttcatatccactctttacatttctgttatccttccgcaactatcccatttatatcttcacgcaaagatgttgacttatcaacatctttgcgctataatccgagatattgatttatcaacatctcacaaaggagcgcccatggatcatcgttttgaaaccttttcactctccatcctggagttgaaccggtacttacagaaaatcaaagagctggaaatgaagcagttcgggctgaaggccagtcacaccatgtgtctctattaccttggacaacacccggaggggctgaccgcaacgcagctcacagaactctgtaaggaagacaaagctgccgtctcccgctgtctctcacagcttagcgaccggcagctcgtcgtctgcgagcagccggcagatcacaagcggtcctaccgctcgcgctacatgcttaccgttcaggggcgctccgttgtaagcggcatccagacacgcatcaaagaagcgctctcctacggcgggcgcgggctgacggaggaaagacgccgggatttctatggcactcttgcaatcatcagtgaaaacctgtctgactatctgaccgaacacagtcagcaaaaataaaaatatatggagaatcttatggaaaaaatcagaattatcacagactcagcatccgatctctctgcttctaccagagaagacctcactattctgccgcttgcgatacgcttcggcgatacggaatacctcgacggcgtcacaatcagtcatcacgaattctacgaaaagctgattgagagcgacactctgcccacgaccagtctggtatcccccgccgcttttgaagagacatatgccaggtcggtggcggacggggagaccgtcattgcaatcacgatctctagccgtctctccggcacttaccagagtgccacgatcgcggcagaagattttgcaggaaaagtttttgtcatcgacagctataacgccaccatcggcgagggcattctggtcaagtatgcgcttctgttaaaagatcagggattatcagccaaagaaattgtcggaatcttagaagcctccaaggagcagatccacactctcggtgtcctagatacgctggaatatttgaaaaaaggcggccgcatctccgctgccaccgcatttctcggcggcgccatggcgatcaagccggtcgttgccgtatcggaaggtgagatcatcatgctcggcaaggcgcgtggctccaaaaacgggaataattttctcatgaaggaaatagaaaaggcagacggaatcgattttacccgacccttctgcctcggttacaccggactcagcgatgagatgctgcaaaaatatatcaaagacagcgaagcactctggagcggacacacggaccagctcccggtctgctccctcggtgcgacgatcggaacccatgtcggtcccggcgccatcgccgtcgcatttttctcaccgcaatcttaattctgtccgttctgccagctcacctgaccttcctcgatcatcggatagcaggtgagcgttgttccgtcgagatcttccgcgtgcatgtccacgcccatgatccggtgattgtcataggtcgtgtaatagtagattcctctggtcgcattacagcaggacgtataaatcgtaatctcgtattttccttccgccacttcgcagcatcctctctgctgatccaccgatcctaaaatatggaaaaactgactgacactctccgtctccgaatcgccggaaaccgcattcatcctcgtgaacgccacgcgcgcaaaacgggacgcggaagagagatctcccggaagtcccagcgcacccattccgcggctgtaggtgctaagcggaacatcttttgcgaaagaattctccggctgcttcggggacagtccgatatagttgttgagcataaacatctgctgtgcaaacggtggattgtttgtaagaacgcccaccggattctcgtagacgtgcagaccatccgccaccgactccaccgtgattgcctcattttcgtctgcgatgatccagtgcagctgtgacgccgggaactgctcggcgaacggggttccgaccagatttatttttgcaaggagcgcccgcacctcatccatcgtcgcgcattggcggagcacccacgggatgaactcaaatgaagccacattctcttttccctcagtcacctctgcgtagacggcatttccaacgaagttcagtcctgccatgccaattcccttctcgttgatagcatcataatacagcggatagtcccccgccacatgcgccatgccgatgatggcataatgctcttttgcctgtcccatatgccggaagtgaaattcataattccgcggtgtgatgacgatctcctcaccgtaggaaaattcataatccagtgttcttccaaaatagaaatccttcgtccgataggttgctgctgtacacataatcgcttctccctctctaaaatagaaattgtgatataccgcctttttgtcataagagacagcatatcacaaaacagatgtaacatcaatgcatagtgtgcaccgaaacatttcttttcaaacataccgccgaccgttttcgcatgtcagcggatatgatatttttcaccggatatcttttactgaattcccgtcgttgatgctgaccggaaaacggtaggaataattcttgttctgccagtccggatcatccatcatgcgcagcagatttttcccggtaatcctgcctagattgtacttcgggtgaaccaccgacagcaccttgaccctcgcatcctgctgcagctcctcatcgtcaaaggacaccagcgatacatcttccggcacgtgcagtccacgttcctcaagaaactccatgtaatagccggcgacctcatcgttgtatacaatcatcgccgtgcagtctttcgtgcggcggtacatccggagaagtccctttttgctgagtttctcctccatatccttcgtggagtaccagcggatccagtcgtcgtcaaactttaccccgtaatccgacagacattccacaaaccctttatagcgctcgattccctgcatatcatcatacttgaaaattcccgcgatcctgcggtgtccgttctgaatcagaatttcggtcagcttgtaggcggcgcgggcgtccgacatctccacactgtcaaaacgctgattggaataatgattgtgaataaacagcgtcggaatgttcctcttccggatctcctcgtagagacggatattcggattcgggaaaaaggagcgtgttccttcaataataaatcctgccacattgccgttgagcagaccttccagataaatcgcctcatcgttcagccggttctttgtgacggctacatcgatgtcatatccggcttccttcataacagaatcgattccatcataaacgcgggggaacagatagtcagaaaaatagcttaaaatcaagccgatgcgcggtctctctccgtttctcaagttgccttcatacgatacatatgtgccgctccccttgactctcttgatcagaccctctgcttcaagctgatttagcgcagtgcgcaccgtctgtctggaatacccgaactttttctgcagaatgttctccgacggaaatttgtcctcattctgaatcactccgctcgtgattaaagttctgccccagttgtacaatttctcatattttaacagactctgctcaccgattttttttgacatttctgttcccccgcttcctgctgcaactctgctgtccgattgtctctccaagcccctgcggtgttacttgattacctgcaatgactggcgatccgcgaatactgccacgaatatcaggaatacgacaccctgaatcaactgcatcatctgtgtcgtgaatcccatcatggtcagtccgctgctgagcacgatgtagagcagtgaccctacgatgatattctcaaaccggacttttgctccgccggagatcggcataccgccgagtaccagtgcaatgaggatctgtgtctccaactggttaccgccggaagatgttaccgatccgactttgatgacgttgataaatgccgcaaatccggtgatcgctcctgccagaacgtagatcaaaaacttcatgcggtcggtgcggatacccgaaaacattgccgctttttctcctgctccgattgcctttaaataggttccgaacttcgtgaagcggaatgcgatgaatccgattaccaccacaataatcgtgagcgtcattttaagcgctgtgctgtcgtagttaatgagctttgcggaacctgccacggatgcattggtggtcagatatttgataaatccacggaataagaacatggtacagatcgtaacgataaacgacttgatcttgcggtatacataaaagtaaccgttcaatgctccgatcgccgcgcctgccgcgattcctcccacgattgctaacggaatgctgatcttggaaagcatacacacaacgatggatgcaattcccaaaatcgatccctgtgaaaaatcgagaccgcccattgtcataataaagaaaacgcctgttgccgctatcatcgtcacatatacctgggaaagtaccagtgacagatttccaaccattctgaaattcgtcagtacattgaacagaaggaagatcacgaccagtcccaccaccggcagaagtgaacgaatcaacgacatcttggataattttttgagctgctgctctttttgttctgtgttcgtctttgcttgattctccatgactgcctccttataccatcatcgtaatcagactgttctcattaagatcctgattacgctccagttcgccgttgatcttgccatctttcataataatgatacggtcgcacataccgatcagctccatcagctcctccgagatcatgatgatggatttgccctcttttctcatctggttcatgagctggtagatgtcctgctttaccttgatatcaatgcctcgcgtcgggctgtctaagacgatgatgtccgaatccttaccgatccagcgcgccagtaccaccttctgcttgttaccgccggagagatccgacacgaactgatccgtattgaccatctttaccgacatctgcttggcatatttgtttgcaaatttcttttttttcttatcgctgatgaaatgtgccttgttcgacagttcatccagggacggcaggcagatattgtcgccgatgctctggttcatgaccacggactcgttgtcacgatccttggacgtgtaagcaatgctgtgcttgattgctgtcggaatatcgttgatctgtgttccgtccgccagcgtcaccgtgccctctctgtcgtaggatgcgccgaaaatcgcttttccgacctcgtgcattccggattcggacaatccgccgaaaccaagcatctcacctttgtgaagatcaaagctgatatcgctgatgatgcccggcaccgtcacgtttttcacggaaagcacaacctcatccgagactttctctccgtaatcggcacgatagtaatcaccggtcacctcacgtccaaccatcagacgcttgagatcatcctcggtcacatccgcactctttacggtatcaatgtagatgccgtcgcgcaggatcgtgatggtatcggatttctccagaacctccggcaggtcatgtgaaatgaaaattacggagtttccgctgttgcggatacggtccatgtgcttgtagagttcatcgcgtccctcctgggacaatgcggtcgtcgtctcgtccacgacaacgatcttcggatcgaagtatgtcgcttttacgatctctaccagcttgcggtcctcgaaattataattatcgatgatgtcggatgccttgatccggtcaaatccgtatttcttaagtaattccgttgccttgcggttcatggctttggtatttttgattccgaaatgtacgaactgttcctcgtgtcccaggaaaatattttccgcgaccgtaagtccggacaaggttcccagctcctgtacgataatggaaacgccctcattgttcgcttccacctgattctttggatgaatctcttttccgtcgagaataaaggttccgcttccgatgctgtaaataccggtcagcatgttggtcagcgttgattttccggaaccgttctccccgatcagcgcgtgaacctctcccttgttgacattaaaggaaacattctgtactgccttcgtaataccgaaggacttgcaaagattttttacctgtaatctgacttcactcattgcattctcctcctcgattacttgacaatttcaccttttgtgactttggtggtcacggtgatgatgataagcagtgccagacctgtgatgacgtcctgaatcgcggtcggggcgccaagtgcgatgaatccgaagaaaatgatgttgatgacgaactcaccgatcacaatcgcctgcagcggcataccgtatttcttgaacgccagtccgaagaagcatcccatcgtcggtacgaagttacgactcatggacgccataccggttaccgccaccatggaggaaccgtagctgatggttaagatcgccataactcccaagaacgcgccgcttaacacaaatgcaagcaccttgtatttattgacattgatacccatgttcttggcaacgaactcgttgcttccgattgcataggtgtaagttccgattttcgtataattcaaaaagatatatgctacaatgcacgcaacaatcgccaggataatatcccacggcatctgaccgaatgcgcgcagatttgacggaagcgtctgctccacgccgcctgcgatatagttcgcaagtgactcataaatcaatgcgagacccgttgtaacaatcatcgacggaattctcaattttacataaaacagaccgtttaacagaccgacgatcgtgccggtgagcacacagcccaagatcagtccgaggtaccccatgttaaaccgggtggcaaacacgcatcccacgattgcagaaagcatgatgttggcaccaatggagaagtcgaacattcccataaccatgacgaaatagaatccgaccgcacccacagttgcaatcaggctggcctgaaagtagttgagcatattggccggcgagccaaaattatgcggtgtcagtattttaaagattacccaggaaaccacaaccagcgacagaagaatcagatagccctttgcgcttcccgacagcttttttgaacccatattatctacctctttttcttactcgaatcaacggatgtcacgctgtgtgagccatcctttcatacaaaaggccggtatcgccacgcgacaccgaccttttgaagtaacgctcagtctttggaactaattccctgcacgtgatgctgcatcttcaatagaaatattctttgctgcttctttcagagcgcttaagtcaagattggacatctcaacaagctcatcggatgtgtacggaagctggtctacgaaatacttctcatatgcctgatagtcttctgcagaggatacatacaggtacgggaaggaaacgtcctcgaagttgcctgcaaatcctgtgtagttgccctttattgcgttgtaaaccatcatgaatgcaattaacggatcacagtaatgtccgccagactcaccagccatggagccgttctccagtctgtctccaagatccggaaggaaatctgtagatacgatatcgatatcctgggtcttgcctgcacgctctactgctgcgattgcaccctgaagaggatcaccgccgccgcctgccgggatgagtgcatccaggttcggatctgctgccataagagcctctgctgccttggaaccaccttcggaagttgtacctgcgtactgcggctcagaaagctgtgccggatcatccggatgtgcctcgttccacttgtcaacccctgctttgtagccttcccatcttccaagccaggttgcatctccctgctcccagccgatcagaccgatgtcacggtcacccttatcaagaaggatgtttacaagagcttcaccgtttgccggctcatcctcatgtactgctccgatgtaataagcagaatcttttgctgcctgataaatgtctgcgctgttcgtctcgctgataatacggaagaactgtgccagatatacgccgttgtcgttacatgtcttaattgcggatgtcatctctgtatcggatgagttacaaatgataataccctggcatcctgctgctaccagctgctccacagatgctgtaaccttctcggatacgtgcccctgatccacgtactgaacctccaccccaagagcatcagccgctgcatcaagaatcaacttacactgggaaccgagaacgtcggtggatgaccagatggaaactccgatcttaatcttggagttgtctgtcactgccggtgttgccgctgcctccgtaccggatgaagacgctgccgagtcagaactgctcgtcgtctcggaacccgatccacaggccgccatacccacaaccatggtcgctgccagcgcggcagctgtcaccttcttgaaaattgttttcaatttcatgctttttcctccctatacattttatttgggttgtgtaaaaaccttttgtgattttattatagatactccctgcttttttctcaagaaaatacaaccaagttttttctaaaagttgtattgttttgtgtgtattttgtcatacttttttgcagttattttgtatctattgtgcgttttaccatatatcgcgccatatttccactgttttatccggctgttttgtaccttatttccacttccgccacaatgtttgtctactttctatcacagttacaatacaactttcgcctgtatggcacttgtactttttaagtaccaaaaaaggacaacaccggatttattgctccgatgatgtcctttttcttatgccctgactgcccagcgcattttggtggaacgcgcccttccgtttgcagcgcactcctgcgccgacggacggatgacgtccttcgcatagtcgctgtaaatcccactcttatatccctctttgagcgcctgcttcacaagcttgtcctctcccgagtgaaaggtgagaattgccacgcgcccgcccggtcttaatgctcccggaagcttttccatgaattcatacagcacctcaaactcctggttcacatcgatgcgcagtgcctggaatgtgcgttggcaggtctttttgattgtgtcctttttctccttctccggcagaaaatccagcgtatcctcgatcaccctgcgcagctttgtcgtcgtgtcgatgcggctgcccctgcggatctcgtccgtgatcgcttttgccagctcctcacagtacggctcgtcggagttctcatagagcatcccggcaagttcctcccgcgtgatcgtatccagccgctccgccgcgctgatccccgtctcctgattgagcctgagatccagcggtccatccaccttaaacgagaagccgcgcttcggattgtcgatctgcatggacgacacgccaagatccgccagaataaaatcgaagccgccgacctctcttgcgatctcatcgatcgtgcagaaattctgaaagcgcaccgtcaaaagatcctccccgaatcccagatcctccagacgctttttcgtcttggcggactcctccgggtccacatcggtcgcccagatatgtccctgtcccctcagacattccagcatggcacgcgtgtgcccgccgtagccgagcgtcgcatcaaatccatgctcacccggtttaatctgtaaaaaatccagtatttcctgtaccataatcgagatatgcattcccgccggcgtatttcccttccggatcacatgctcgatcgtatcctgatacttctccggctgcagttccttatatttttcctcaaacttcttcggatattttcccttgtaacgcacccgccgcttgtgcggtgtctgtgtctcctgttccatccttctctcctactcccagtcttttaccagttctgtattgtactccgactgaatattttcgacggcttctcccgccgccctccggtaaaaatagatcctgtcgtcatcactgtcatttttccagaattgatatccatagatgtagctttcaaaaatctcctcaaagcttccatattccttctgcagtctctgcgcaatcggcagacactggtcgaggcactcctcgaggctgatgtagccgcactgatagcacagtcccgtgatgcgcataatacggacataatcccaggcatccacaccgcgcgtgtccagatgtccatacgcatcatagcatacccatgtccggcactgctcatcctccgggatctcactgatgcttataatatcgacataaccattctcatccatcgacagatacccttttttcaggtaagtttcaaacgcatgacggtaggacgctctggttccttttttcagcatctggctgatcgtgcgggtcgccgttgcccggctcgtaatgccccaccagtcagacagatattccttcacctgctcctgatcccagtcttctctggaatgaccgcccagttcgccatattctccgttctcaaacggtacatagatcgcgtaggcgtctatgatccagcgcacagtcgggtcgtccttcacgtcctcaaacgtcagatccgactccgccttttgggaatcataagagatcagcagactgtcggcatcctggttgtaagccacatagtgggttcctgcatacacaaacatgagagcgaccacaaccactgccgccgcagtacccgcaatcaaattccgaagcttcatctggatatccggcactccgtctttttctgaaaatgcatatggaagatgcgcaccatcaaaccagatatctgcttttccgccaaccatatcctgcacatttcccacatttgcctgccgtaccggatacatggcacgcacctcacacctacgccccagttcatccatgaactcatacagataatatttggtcgcgccatttttcccggttgttatgacacggacaattttagcgtgataacgctttgcccgcgcttttgctttcttcagatagcggtactccatcaccttgctcaaaagggcgagcaatgtcatataaagccccgcctctcccatcagaagcatcgtgcgtgcagtgtcatgggacgtgttaaaccggtacgcaatggcgtacaaaaatataattccccccagtgcaagtgccgcaagtgggattgcctgcaggcggctgtaacgccggtacgcctccgacaggtgccactccgccacccagacccgctcttccggttcttccatctccaccgaaccggcaatgtcttctcctgcgtatgctgcgtccccggcatatgccgcgtcttctgcatatgccgtccgtccccaggtctggtttgctgtgcgctgcgcgacacccgcatatgccccgttcctatttcccggcgcattgatgatccgcgtcatgagaaaatagcggagcgttttatccgccttccgctgtatcagccagattctaagcccaagtatcgcggcaatcacggtaagtatcagcaccagctgcagatcgtcctgcggatttaacgaggttaagctgtagcggagtcccgcaaaaataatccccaacagcggaagcaacagcagcagaagcacaatctgtgtcacattgggcgcactctttgcattcaccgcatcttccttcacttccacgcggtacgtcttgcgcgctcttccttcctccctgcttttgagccggatcagataacggtccgccgcttccgtctgtaccgtctgcacccatttccatccggggctgtccggcatatttacattctcactgtactgcagatttctgcagaccgcctttttgtcgctgtgacataatccaaccgccatgtttctctccttatcaagtcattccccgcttttccggaaatgccctgtttctttcgtgtatgtcatcctaagatgacccacataaaattgtaattgattgccacacattttgcaacgtgttggtt

SEQ ID NO: 11540 - DNA, 10032 bp, Unknown
  gut microbiota DNA sequence
aaagttagagagataattatataaatttcagtttgtcaactacaagtggcattgaaagagtcagcccattcaaggtgctggctctttcaaaaattccattctaataaattgcatgataacttagagtaaaaatgaatacccattagccggaaatgaatagaaaatgaataaaagtgtggtgtttcgtataattatgagttagtatgcatcagacacacttttgtaaaaagggagttattaaaaaacgattacggggtggaactgtcgtaataagcataccgtgcttttgagtgataagtaatattatcagaacatcacaccgtgggatttcagatgaaaatgcaatccccaagtatgttttttctaagtattacttatcacccttctgctttcaactcctatttgataaatcccacctgtttgctgatcttctcgatctgctcgtccttgcgcttgttgaactcaatcttgtttttctcaaaaagattattgccctttgtatcgatggacacgatcagcggaccgaactctttgacacggcagttccaaagtgtttccggcattccgagatctctccactcggccgccacaatctcctcgacctccgttgcagccacaaccgcatttcctgccgggaaaacacagtggatggcaccgaattccttgcaggcacgctccgtattttccttcattccgcccttgccgatgatgacacgcacgccggtctcttttacaaactcatactcaaatttttccatgcgcatgctcgtggtcggtccgacagagaccatctcaaacttgtcgttctccagcggacggatgatcggtcctgcatggaaaatcgcgttgtttctgacatctaccggaagttctcttccctcctcaaccagacggcggtgtgcaacatcgcggcaggttgtcatgcttccgttcagataaataatatctccggccttaatatctgcaagatcctccgcagaaatcggagttgttaaaattttctttccatctttcatctctaccattataattccacccccgaatgtgttgtgatcgtatagttcagatccttatcaaagataatgtgtcctcttctgtggctccagcagccgacattgactgccacaccgatcgtggacggatgacgcgccgtgttctcgatgttaacgcccataacggaatatttgccacccatgccctgcggtccaagtccgattgcattgattccatcttcaagcagacgctccatttttgccgcgcgctcattgtcattgtgggaaccgatcggacgcatcagcgctttcttggaaagcagtgccgctgtctccacggaggttgctacgccaacgcccacaagaagcggaggacatgcattgattccataggaagtcatgacatcgagtacgaacttggtaacaccctcataaccttcgcccggcattaagaccatcgccttgcccggaagcgtacatccgccgcctgccatgtaggtgtaaatctcacactgatcactgtccggaacaatatcccagaagaccgtcggtgttccttttccgacatttttgcctgtgttgtactcatcgaatgtctcaacactgttgtggcggagcggagcctcaaacgttgcttttacaacggcttcttttaagagtgcctccagttctccgatcagcggaaagtttgtgccgcattttacccagaattgcagcacgccggtatcctggcagctcggacgattcagctttaccgcaagttcctgattctggaacatggtatcgtagatcgtcttggacagcgggctgtcctcctgtgctctcagctctgttaattttgcaatgacatcatccggcagcttctttgccacatgtgcaataaattttgccatgtaatcggtaagctgctcaacctgtgcttcttttgacatttttttgtcctccttttatctataactatccagtacaccgcagctgtgcggcaaaaactgattttacgggaaaaacggatacaataccggaagcaggatcatgctgacaacggttgccaccagaatcagcggaattcccgcttttgcgtaatctttaaaggtataacctccggcagtaacgaccatggtgttcgccggcataccgatcggtgtcgcataggcacatgaaccgccgatcacacaagccatcagaacagcacttggatcagctcccatacggttcgcaatggatacacagatcggaaccataagtgcagtcgttgccgtgttcgacataaagttggtcagtacacagcagagcatgaataccacgaaggtcagaagatacggtgacgggttcgctcccagaagaccaatgaccttgtccgcaatcatctcacctgcacctgtctcctcaagcgctgacgccagggaaagcgtacctccgaagaggaagattgtctttaagtcgatggactttaaggcatctttctcactgatgacaccggttaagatcaatgccagtgcgccgaccgcaccagtcacacagagcttgatgccgatctgtttttcaaaaatcattccgatcagtgtcagtaccagtatgatgagggaaagattctgcttccacttcggtacatggtcgaaatcctttgtctcatcatagattccattctctccgcccttgtgctccggcagaagcttgtaaccaaacagtgcaaagaaaatagttcctgtaatcaggatcggcagacccactttggcgtactcgaaaaatccaaatgctttccccatgtcttccatcgccgactgggcgatgaggttgcccggcgctccgatgagagaaaggtttcctcccatagccgccgcaaatacaagcggcatcagaagtcttgatctggaataaccggattttgcggcgattccgatgactaccgggatcagcactgctgcggtaccggtatttgaaagtacgccgctcatcacaccggtgatgatcataatggcgataatcagctgtttctctgatttggcgaagtgtgtgaccacgcctccgattttatttgccatccctgtctcaaacagcgcacccccgacaatgaacatcgccacaaacaggatgacattgctgtccacaaatcctgcaaacgccgtcttccagtcaagcacgccggtgacgacgagaccgatacagacgaccatggatgttacgccgagcggaatcttctcccagacaaacatcacgacggcaaacaacaaaaataatagtgttattactgatgcttccataaaaccctcctttgttttgcgaagcaaaatgcaaccgccacgtaaaaacccttcccatcatggctcattgaattttctcccttgttgcttgtttgatatttgatattgtatccaatttttgagtttagaatataaaaaaaggccgaaaatgtcaatacccttttgacactttcggcacttgtgttcaatttatctctttatttttgtgcaatacacacaattacacttccacataaggattctctttgaaatattccagaatgagttccaccatctccgtattgatttcacggacaagttcacattccgtatatacttcatatccgcccgctccgctgtaacggtaattgttaaggcacagcgtaaaagaatctgtctccgttaccgtctttccctggtaagtcagatttttaatcctgtttccgaccggtgcagccgggtcaatctcatatgctgcccccatatagtagtcatagttatagtgctccaccttcggcacaaggaagctttccgcaacctgcaccgttccatccgtggcgacggcaaaatactccgcgctccgctccatcacctgctttaactgttttccgctgatcctgcatacgatgagcgtattcggatacggataggttgctataatgtcgcggacactcacctcgctgcgaaatccggcgatctcattggcaagaccgaccgctgacagctgtgcgccggaaaaatgtaactgtatccggtttaaaaaatcggcaatcggcgaaccgtgcagcgccatttccgctttttctccgggaagaagcgcccggcttaaatgcccgatcggctgatccagccagctctgtacccgctcttcctctgcggcatacttttcgcataatgcaccgacagcatttgctccgtcggcgacacgcttctcggagcggacaacaagtccgtcttttgtccgctccgcttccagatagtgatactctttggcattctcaagcggctgtaccacgtaagttccatgcacatactgcccgtcgacggacatatgctggtgcccggtcagcagaatgtcaaaatccagttccttacagatgcggtatccgacattctccgtcgtcttctgcaggcgctctccggtctttaaatcacactcaaatccgccgtggtagatgcaaagcgtaatgtccacctcttttttcagatgcaaaagcgcctcttttgccgcctcaaatgggtctgtaatgcaaattcccgcgagattttccttccgctcccacacattcacatagtctgtcacaataccgacaatcccgacccggagtccgtttccaagcgtgtggatcacatacggatggcatgctcttcccgcctcatctacaacattctggcagacacacgcgccgtgatgagcctctatgtaagcgttctgatagtccatcccataattaaaatcatggttgccgagcgtataataatcgtagccgcagtcgttcatgatatccgcaatggcctgcggcgatcctgacttctgcctgcaatagtaggcaaaggcggagccctgcaatatatctccgccatcgattaccagtgtattctcatcttttttgaaatcccgggcaaacgagaacagccccagatcttttcgtttcaaatccccgtaagtcgttgggtaaaaatacccgtgaacatccgaggtaaaatatatctttaacgtttgttccatcttatccctcagtcgtattatagttatccccgcgtcagcttcacacggatctttgtggagattacctccacaatcagaatcagcacaatcagtcctgcaaggattgcacccacctgattccatttgtacgcgctcattgcaaaaataagcggcgcaccaataccgccggcacctaccagaccaagcacagtcgcatcacgaagattcatgtcaaaacgatagattaacgttgacataaagtccgggaataactgtgacagaatgccataacggatcttctggaacatcgtgcatcccgctgcatcaagcgattccagtatcttggtgtcaaggtcttcgatactctcgataaacatcttgctgatcataccgatcgagcacagggacatcgtcagaagtcccgcaaatggtcccggtcccgtcacacggatgaacatcaatccatatacaaatgccggtattgtgcggatcgccataataaacacacggaaaatcagtgcaatcggcttcggaacaaggttggctgccgccagaaaagacagcgggatcgagagcactgctcccacaatcgtacccagaaatgcgatacacattgtctccaacagcagatacgccacgccggaggttgtaaaattaaataagagcgctgtgtccggatgaaaaatgccgctgataatctttcccgctaccgtaagcccatcgccgcctgttgttccgctttgcaccgtggacatcgaccatgccagaagtgctgcaacgatgagtgccacaagaatcttcgcataccacgtcttcggctcctgctcatacattttatctatttcttttttcattctgccttgtcccctcctaggtaagcttcttacgaatataatggctgagtgcctcgatcaggagcaccgttccgaataataccacgaggatcatgcccacgctgtcgtactctctccagccgatcttctcgtttaagatcagaccgagtcctccggcacctacatatcccaggattgccgcatagcggacatttccctcaaaacagaacaggcagacggaaagatatgccggaagcacctgcggctggatcgctgccagaaatgcctgtgccctgccagctcccatcgcttccattgcttcgtaagctcccatgtcaaccgtctcaatcagctcgtaaagctgcttgccgacataagcaaatgtaaagacggcaattgccacggttcctgccattgttccaagtccccagatataagtcgcaatcagtgctgccaccagggtcggaatcgtacgcacgatacttaagaagatacgcaccacgcccagaacgaccttatttttgaccagattgctggatgccaggatggcaaatggaattgccagaaccccaccgatgaaggagccgagcagcgacatcttgatcgtatctaaaagcggtccccagatactgcttaaatatcccgtctttggcggaaacatctgtcctaatatgacaaaaaactgatttccgcgtgtgagaatcgtattgagcgaaaaaccggtaatccggacggaaatgacggtcgcaatcagaagcagaagaagtacaagcggtgtgcgcgtgcgtttttcctccactacttttccgtcggataacaccagtttcttcggcttgaaaattttatcatatattcccatcaggcttcctccacctcatccggtatctttccggcatagatcatgtttaacacatcctctgtcacatccgcggaaggtccgtcatagacgatctttccggcgcggataccgataatccggtccgcataggcgagtgccagttctacatgatgaatattgatcaatatggtaatattcatttcctgattgattttcttaaaatcgctcattacctgctttgccgttaccggatcaagcgccgccaccggctcatccgcaagaataatcttcggattctgtgcgagcgtgcgcgcaagcgccacacgctgctgctgtccgccggagagctgatccgcacggatatatgccttatctaaaatgcccactttgtcgagtgcctccaaagcgttcaacttgtcttcttttttaaatataccgagtaatacacgccagaacggcatctccggcacttttgccatcaatacgttacggataaccgtggtgcgtgtcacaagattaaaggactgaaaaatcattccgatattgcggcggaattttcgcagttgttttcctttgaggttcttaacctcctgtccgtccactgtaagcgtaccggaagtaatgtcatgcatacggttgatcgtgcgaagcagtgtcgattttcctgctcccgaaagaccgatgattcccacaaactcgccctgctcaatcgtaagattgacatcgtcgagtccaaccacgccgttgggatataccttggatacgtttgaaaactctatcataaatgctccttccacattgccttaaaaaatgtgcagcacagcggagtgatgtctctttccaagatcactccgctgacactgcaccctttgtctgcccgtttctgattagttggctgcgttcagttcctgaatcagcttctgtgcttctctttccttatcgtagtcagaagactgtgccggctcatatccgttgtggctgtagattgcgataaccgccttgccctcttcggtattgccgatgttgatcagtgctgtctgaatggctgtctttaagttctcatccatgtacggagaggtcttgctcacacagacggtatcgttgtagatcggatctgtcacaccgatgacgttcgtctcctcccagatggaagcagagcgtccatactcgctggtccagttttcctcgtagtcacgtcttgcgtctgcgtaggttaccaatacatctacctgtccggatgcaagtcttgcgaatgcacttgcataggaatcagactgtactgcattggaaagatctgtgatgcccttgccgtatcgatcctgcatccataatgccgggtaaatgtagcctgccggtgaagaagaagacatcacgctccagtttgcgctatccagatcatcccaggtaagctcctctccggaatttaccttgtctgcaagctcctgtcctttctcagaaggacctgcgatgaacagagcacggtaagatactgcctgcttgtcagatgcctctgtcggctgtccgtcattccagtccgccggattgtcggagtccttgttcagaccatctctggttgcggtcaggatcacatcacatccgtcatcatagagcacgtaagtaccgcccggaataaatccaacatccgctgttccggcggaaagtgcctcgcctactgcctcgtatgtcgtacctacggaaatatttacactgtctacatcatatcccagccccgcaagctcgttctttaacagatcgctcaacggctctgttgcagttacgatctcttccggatctctggacggtacaaaatatacgtttaacgcatccagatgcacattctcagcggaagccgtctggctctccgtagtagcagctgctgtctcgcctgctgctgcacctgcattgctgttatctgttgtctcttctgtgttacttccacagcctgcaaatgtacccatgcacattgctgctgccagtaaagtagctgtcaatctcttcataattgcaaatttctcctctctgcagtgaaacaattattcatgcactgtcgcccagttccaattttgtcggcaggtaaaccttcatactgtccacgcgcttgtcgatgattcgttccagcaaaagcttgattgctgttgaccatacaatatccggcagcatccgaagactggtatatgtcggatatttcgtctgcagcgtctcaatatcacggtaaatgacaaccgcaacatccttcggaatccggtattttaattcttttaccgcttccagggcaccttccgccacctcatcatttccaagcaccagaacttccggtacatcatctgtctccagaagttctctggtcagacggtagccgctctctctgctgatttcacccacacagaaatagtgctccttatagcaccctctctgcgcaaggatctccgtcagtcccattaagcggtgggtaccgatccgtacaccatccttctcatagataccgccgatataaccgatactccggtattccttgacatccagaagatagtgtaccatatcctttaagccctgctcatagtccatgataatccggtcaaactcataatctttctgatccgaattgacaaacaggatcgcatcactctgttttcgcaggaaatttatctcttcctccgaaaaagatccaaatgcgagaatcccgtcgacatctgcatcttccctgcaggcaatccgtaaaaagctgacgtccgctttctgcggcatcgccgctgcaatgtggtctaacgatgcgagtcgtatatcatgccggtcccctcttaccagatgccagtctgccacaccgatcgtaacatgggtcttattctgcgcatgacgcatcttaggcggaatatagtttaattcgtgggcaatctttaaaatctggttcctgacttctgctgtgacggtcaatgtttcatcctgattcagtaccctcgatacagtcgccggtgatacctttgctaactctgcaatttctttgattgttgccatataatcacgcctttcttctgcattatatttcacgattttttaaatttcaatagcgtcggtaaacttttactaaatttttaccggattttacacgacctatacattaggcttataaatcgacggtttttgacttataaaaaagaccggaaatgccattttctgacatctccggttcgtccgcccgtttcttctcaacggtaatttgtcagcatatcgtccctgcttcgcatgatatgacgatacatttcttcctttgcagccgctccgtttctctcacgaatcgccttcatgatgcgctcatgctcctcgatcgacacctttgcataatccgcttccgtaatcatgctgcccatcgacaacccgttccacaattcagcaatcatattttccatacggctattacccgccg

SEQ ID NO: 11541 - DNA, 5153 bp, Unknown
  gut microbiota DNA sequence
tctgcggcacactcgtaggactcctcaatccgggtaatatccacctccggcgcacagcacatctctgccgcagcactctctaagatcgcgcgcagctggtaatgctctctgatatatgtctcgttaatccctaaaacgaccgctcccttgttgcgctgaagcttaatcagtccgtcacgcgcaagaatctggaacgcctcacgcaccggcatgaccgacacctccagctgattcgccacactctctaacgtgacagcctccccttcctgcagctggcgggagagaatcgccttccgaagttccgctgccaccttttcttttgccgacggcatcttaatcggatgtaaaccattcattgatgttttcctctctctgttaccactcgtgcggcaagttcctcataatacggctccatctgcgctgccgccccgcgcagttcgtctgcactgagctgtctgctttttacttcctgtttctgccagaagccgtcctgccattccgttcctttgcggtactctgcatctgcgcttcccgtctcctgccgcggcaggctgatcgcaaaacgcacatagcactccaccgcattcttcaggatattccgcacataagcattgtctgtcatcccatagattttgcggtgaaattccagttccgtcagcgtctcctccacaaaaataccgggattctctccctgctgctccgatgctgcaagatcgcagagcacacggcgttcaatatcgccgatgataccgtagatctcccggatatgtgcatctgaaaaatctgccgtcaccacatgtctggtcgcaaggcgcacggcaagtccctgatgctcaatgatctgcaacgcctcgcgcaccggaattcttgatgcgccgagaagccccgagagttcctcctgcttcaatggcgtaccgccccggatcgctcccgacaagatctgatcggccagctgatctgcgatataatctgctgttctcttgttcatctgtatctccatactgcagccgtactcctctatcctcttaacagaagttctttctccacaactttgccatttctgatatagatgcgcggcacacgtttgctcaccgcacaggtaagctcgtatggaatcgtcccggcaagtgccgcaagatcattgatggagttctgttttccgaacacctcaacctcacttccaacatccacacccattttccctgtcagatcgatcatacacatgtccatgcagatcttcccgcgctgcggagccggtccctcttttgtcatcagcgcgcagcggttggaaaggcagcggaaaaagccatccgcgtagccatagggaaccacaccgatccgcgtggtgtgctctgtcttaaaaatgccgccgtagctgatcgccgtccctgccggatagatcttgatggtgctgaccgtcgtctttaacgtcatgaccggcaaaagccccagctcgtccgcaaactccccgtagccgtacagaagcagtcccgggcgcaccatatcaagaaaggtctccggatatcttgcaaccgcgccggtgttcgcgcagtgacggagcgcgaactttcttcccaggcgcttttccacttcctcaatcacacgcataaacaggtcgaactgatgctccgtgtattttttgcagtcctcgccgggctcgtccgataccgcgaaatgcgtaaagataccctccgcatccagtcctggcagcgagcagccgtgacagattcccgccacgcccgtctcaaaataatctccgtcgcacagataccccagacgcgacattccggtatccaccttgatgtgaatctttagggtgccgccgcatttgaccgcctcttcgctgtactcaagcgctttcgcctcgcagctgaccgcctgtgtaatgtgatactcgatcagcctcgacacctgctccttcggtgtgtggccgagaattaaaatcggcatcgtaacatcgtttaaacgcagctcgaccgcctcatcaatactgctgaccgccagataatccgcaccaagttcctgcagcagatgcgatacctgtacagaaccgtgtccgtaggcatccgccttcacaacccccagaaactttacatctgcaccgattctctctcttaatttatgataattgtgtgccagggcatccagatcaatctccgcccaggtacgtctcaatgtcgactccatgccgcactgcctcctgatgatttcttctatatttatacgaatactataatccacgcgccacatttatgcaaacaaaaagttcccttccatgctttgccttgataagtaatattataagaagatcacaccgtgggatttcagatggaaatgcagatggaatattcgttggagaaaaatgtgagcatttcttccgatcgaatggttgcatcagattccgtgtctcttccacgtttggacaatccgacgggtgcatgtccgacacaccggagacaatgggcggactttctggtgtccctaatggcacctcttcacagacaatataaaaccgcgcgaaccgaactcgccggcatctgctattgaaaatagggcagatgccgactcagacagcggcttcgcgcggttatgttttgttcagaggtgccataagggacacacacaaaagtcctacaaattgtcttccggagtgcggacatgacccgtggagtgctccaaacttggaaagacacggatcatcgaagatgcaaccattcggttggttagaaatgccatattttttgaaccgaatattccatctgtatttccacatgaaatccccaagtgtgtttcttataatattacttatcccccaaaagagatctatgcttcctccacttcaaagtagctgctccagttcgcggacaacttctcatgcagggtgcttaccgcagaatccagatcttcaatggttggcaagcccatatttgccgctccttcgttcattgcggtggcaagtgatgcaagattatcctcgtcacccagatcctccagcgataatcccagttcatccagcttcatcaggatgctgtccggatttgcgcggaatgtctctgacaactcctcaagcaatgcctctgttcctgtcgctgcggtttcctgcgtctctgtcgttcccgtgacctgcgtgctctccgtcgtctcgtctgtctcgtccgtctcctgcggcggcatcggcggcattggcgggcgttctccgctcatcatcccctgtgcattgtaagtgctgctcggcatcggaatgtccatgtccatctggctgatgcccggcacataactgtccgtggcgctgttctcttccttctgctgtgtcgcctgggtctcctgcatcttctgcttccactcttccagtgcttccagatatgcctcgtaacttgaactctcgaccttcataaccaattcctttctgaggtggttccttcccgaaattgtgccatcctttgcattttcctcaaaatagctatcggttccaccgcagaaaaaataacagacttcacataacattcagataaccgtcacattactccccggactgatagacaatctctccgtttatgatggtatataatatccgcgcgtcaaccgaaaacggggtgccttttagcagaacaaaatctgcgtccttcccttcttcaatgcttccgacacgatcttcggcgccgatatgccttgccgcctgaatggtaattgcccgcagcgcatcaaactcacgcatgccgttgtagattgcccgccctgcgcagagcggcagatagcgctcctcgatgaccggcgaatcggtaatgatcgacacctcgcagccgacatccgccagaattgcaggcgtctcaaatcccttgttcttcaactcgtacttcgtcgcatgaccgaaggacggaccgaccgccaccggaaaatgctccgcacccaattcctttgcgatcagcgcgccgtccgtcacatgatcgagccttaaccccagatggaactcctttgcaatgcggattgccgtgcagatatcatccgcccggtgcgcatgcgctttcagcggtatctccccgcggatgaccggcagcattgcttccagttttgcatcgtaggctggcattttgctgatgtccacctgcccctccccgctgccgcggttgatctcattccagcttgtctcacagcctgcctcccgcagctttttatcgtagatgatcgtcttctgcaacacttcccgcagttttgccgccacagacatgcgcgaatagacgcctttttccttataacagttcttcggattctccccgaatgcgattttcatggctgatttttcccggacaatcatgtcgtccacgcggtttccatacgttttgatgacgcagaaggttcctccgatcacattggagcttcccggccctgtcgacacgcaggtaacgcctccctcccttgccatgcggaaagtctcatcctgcgggttgatcgcatccaccgccgagagctgcggtgtcaccggatcgccaagttcattgaagtcctgccccgcaaaaccgactgcataaccgtcgagccccagatggcagtgtgcatccacaaacccgggatagacatcgatccccatcgcatcgatgacagccgcctcattgatgactttgccctccagcacaggcgcaatcttttttatttttccgtcctcaatcaaaatatccgccacaaatgcctcctcgtcgacggcattgtggatcgttccctgttttaacaataaatactgactcatcgcaatcctcctgtgttattctttccctgctctgtccttaattttttcttgcattttatagttatcctgttataatacaactaagaaatgagtttttcgaccgtacagctattgctcaagcggctcgctcgtttctttttttattctcagaatatcgtataaatacatttttccatcttcatcatggcgtattaaaatccttgcgccaaagatattatatctgcacaaatttccctcatcgttgtatacaggtattgcaaaacgtgtatcataacgataccatccatattttgcatctgccacatgtttttcctcgtaattaggcgcaaatgttttaccggcggcaatttttatcattggttctacaatctgagatgcatttgcatttgcatgccgatttgcaccttttagg

SEQ ID NO: 11542 - DNA, 603 bp, Unknown
  gut microbiota DNA sequence
aaacagagcagtaatggaagccataaacagaatcaccagaggcgatggggattttgtaggagccttccgacagaatgtcatccgggtaatcggaagctacggtggagaacaggagccagatgaatacgatgaaaaaatcaaagaaaaagaagaagagatggtggctctgattgcagaaaatgcaagggtaggttcctacaccgatgaattcgatgagaggtaccgcagaatagcagaagaaatcaccactttaaaagaggagcagatagaggccagacggaagacaaaactggcagacagttatgaacagcggttgaaggatatggacagtttcctggagaaacagacctgccagataccggaatttgataatgaccttgtaagaaggctgatagcaagcatcaaggtagtctctgccgagaagctgattatccagtttcagtcgggaatcgttatggagcaggaaatcagatatgagtaagtgatgggcagggatgacaactgaatagggaaacggaattcctgcctgtaaaataaatccgtgggatttatggtaagaataaaatgcccgataggttcgggtgttttattgttggtgtaaac

SEQ ID NO: 11543 - DNA, 6289 bp, Unknown
  gut microbiota DNA sequence
caggaagctggaagttactgcacctccagatacgaataacccatcaggctctcatcgacctcgcgcgcgacctcgcgtccctcgcggatcgcccagacgacaagggactgtcctctgtgcacatcgcccgccgcgaacacattcttcacgctggtctcataggcgccctccgccgttgcgacgttggttctgccgtttaagtccacaccgaacgcgtccgccacatatttttccgtgccgaggaatccggcagcgatcagcacaagatccgcttccatcttctgctcgcttcccgcaacctcggtcatcgtcacacgcccggtcttctcatcccgcttcggttcgagctttacagtgacaagcccgcagagattgccgttcttgtcttttaagaattccttcaccgtcgtctgatagatccgcgggtcgtgcccgaacaccgcaatcgcttcctcctggccgtaatcggtctttaacaccttcggccactccggccacggattattctccgcgcgctttgccggtgcctgcggcatcatctcaagctgtgtcacgctcgcgcagccgtggcggatggacgtgcccacgcagtcatttccggtatcgccgccgccgataatgaccacttttttcccttttgcggagatatagctgccgtcttttagctcagaatccaagagactcttcgtcgttgcttttaaaaaatccacggcgaaatagattcccttggcgtcccgtcccggtgccttgatgtctctcggattcttggcgccgcacgctaaaatcacacggtcgtactcctttaacagcttggaggcctttacatcctttccgacattggtgccggtcacaaaggtgatgccctcctccttcatgacggcaaccttgcggtcgatgacccatttttccagcttcatattcggaattccgtacatcagaagtccgccgactctgtcgtcccgctcatagaccgtcacagaatgcccgcgcttgttgagctgatccgccgccgcaagccccgcaggaccggagccgatcaccgcgatcttcttgccggtgcgcactttcggaggctttgccgccgcataaccctgctcatacgcattctcgatgatgccgtgctcgttcgccttgcaggttaccggatcttcccagtgcccgcaggtgcaggcagcctcgcagagtgccggacatacccgggaggtaaactccgggaaattgttggtcttcttcaggcggttgtatgcctgctcccagttccccgtgtatacaagatcattccactccggaaccaggttgtgcagcgggcatcccgaggtcatccccatgatgttcattcccgcctggcagaacggcacgccgcagttcatgcagcgcgcgccctgaatctgttgtctctctttggacagaggaatgtggaactcattaaaatttttgatccgctccttcggctcaatggcgcgggcatcttctctgtcatattccataaatcctgttggttttcccataattctttcctttctcgaaaatgcatgagtcacacatgtcaaacgacacctgctcacacactatccacgcgtatttgcataaaaagcctcaatctgtgcctgttcggaagaaagacctttctcctccatctgaacaatcgccataagcatacggttatagtcatacggtatgactttcttgaacttcggcagatactcgctgaaattatccaggatcttcttgcccttttccgagttggtcagcgccacatgttccttgatcatgtcctttaattccatgacatcatatttgttggaaatctcctggctgaataccatttccttattcattcttgtgtagaggtcattgtcctcatcgagcacataagcaataccgccgctcatgccggcagcaaaattcttgccggtcttgccgagcacgacgacacggcctcccgtcatatattcacatccgtggtctccgacaccctccacgactgcggaagctcccgagttgcgcacgcagaaacgctcgcctgcgacgccgctgataaacgcttttccgctggttgctccgtagagcgccacattaccgatgatgatattctcatccttctcatacttcacgcccgccggtgcatagacgacaagcttgccgccggataatccttttccaaagtaatcgttggaatcgccgaccagctctaacgtcagtcccttcgggataaaagctccgaaactctgtccgccggcaccgttgcattttacaatgaaggtatcctccggcagtccctctccgccgtacttcttcgtgatctccgaaccgaaaatcgtaccaaaggaacggtcggtgttcgtcacctccacatcaatgcttctgcgctgcttctgctctaacgcaccctttaactgttttaagagcacggtcacatccttggacttctccagttcaaaatcatagacatgcttcgggtcaaaggttactttctccttcggtcccgcaaacgggttgttcaaaagattggagagatcgatctcgcggtcgcgtcccgaaagatcctcgcgcaccttaagcagatcgcttctgccgaccatctcgtcgatcgtgcggcatccgagctttgccatatactcccgcagatcctgtgcgataaagcgcataaaattctccacatattccggcttgccggcaaaacgcttccgaagctccgggttctgtgtcgcaatacctgccggacaggtatccaggttacagacgcgcatcatcacgcagcctaaggtcacaagcggcgctgtggcaaatccgaactcctccgctccgagcagcgctgccgtagcgacatcgcggccgctcatcagtttgccgtccgtctcaatgcgtactttgttgcgcagtccgttcataatcaatgtctgatgtgtctccgcaagaccaagctcccacggaagtcccgcattgtggatcgagctggacggagccgcaccggtaccgccgtcatagccggagatcaggacaacctgtgcgcctgcctttgcaacgccggctgcgaccgtaccgactcccgcctcggataccagtttcacggtgatgcgcgcatcacggttcgcattctttaagtcgaagatcaactgctccagatcctcgatcgagtagatgtcatgatgcggcggcggggagatcaatgatacacccggtgtggaaagtctggtctttgcaatccacggatagaccttcttgcccggcaggtgtccgccctcgcccggctttgcgccctgtgccatcttgatctgaatctcctgcgcgctcaccagatactcactggtcacaccgaaacgtccgctcgccacctgcttgatcgcagagcaacggttgaccgggctgttcttgctcgcaagacggtctgcatcctctcctccttcgccggagttggacttgccgtgcagacggttcatggcgatcgccagtgtctcgtgcgcctccttggagatggaaccgtaggacattgcccccgtcttaaaacgcgtcacgatggaatcgacactctcgacctcctcgagcggcacgccctttttcgggtaattgaaatccatcagaccgcggagcgtgatctctctctcttccttattcacaagctccgtgtactgtttaaagagttcgtagtcgccgcgctttgtcgcttcctgaagcagatgaatcgtcgccggattgtaaagatgcggatctgcgccgcttctcatcttgtggcgtcctctgctgtccaatgtgagatccgtctctaatcccagcggatcgtacgccgccgagtgaagttcattgacgtcatccgcaatatcctccagcgtaatgccgccgatcgggctgaccgtattcgtgaaatacttgtcaatcacatccttattgataccgatcgcctcaaagatcttggaaccctcgtaggactggatcgtcgagattcccatcttggatgcgatcttgacgatgccgtttaaaatcgctgcattgtaatcctgaaccgccgcataataatctttgtccagcatatgctcgtccaccagctgttttacggtatcctgtgccagatacgggttgatcgcacaggctccgtagccgaggagcgtcgcaaaatggtgtacctcacgcggctcgccggactctaagatcatggcaaccgccgttctctttttcgtctttaccagatgctgctgcagtgctgatacagcgagcagtgacgggatcggcacatggttctcgtcgataccgcggtcggagagaatcagaatgttcgctccctcacggtacgcacggtccgcctccacaaacagacgctcgatcgccttctctaagcttgtattcttatagtagataatcggcagtacttctaccttgaatccgtcgaccttcatcgccttgatcttcatcaggtcggtgttggtcagaatcgggttgttgaccttcaataccttacagttctccgcccgctcttctaagaggttgccgtcctcgccgatgtagacggtcgtagaggtcacgactttctcacggatcgagtcgatcggcgggttggtcacctgcgcaaacagctgtttgaagtaattaaacaacggctgatggtcactcgcaagcgctgcgagcggtgtgtcaatacccatggcggatgtaccctcgccgccgttcttcgccatcggcaggatcgcctcgcgcagagattcgtaggtataaccgaatgccttctgcatgcgctggcgctcttccttggtgtactccggcacacgctcgttcgggatctttaaatcctcgagctttaagaggttgcggtcaagccactcaccgtatggctgcttgttcgcgtaagtctccttgagttcgtcgtcatcgatgactcttcccttgacggtatccacgagcagcatcttgcccggacgcagacgctccttcaccacaatcttcgtcgggtcgatgtccagcacgccgacctcggaggagaggatcagataatcatcatccgtaatatagtaacgggaaggacgcagaccattgcggtcaagcacggctcccatcatatcgccatcggaaaagaggatggacgccggtccgtcccacggctccatcatcgtcgcgtaatactggtaaaaatcctttttcttctgcgacatgatattgttgtttgcccacggctctgggatcatgatcatgactgcgagcggaagctccataccgctcatcacgaggaactccagcgtattgtccagcattgcggaatccgatccctcactgttgatgaccggaagtaccttctgaagttcgccctttaagtgctcggactccatcgtctcctcgcgggcgagcatcttatcggcgttgcccttaatcgtattgatctcaccgttatgtacgataaaacggttcggatgcgctctctcccagctcggattcgtgttcgtggagaaacgggaatgcacggttgcaatcgccgactcgtaatccttatcctgtaaatccgcaaaaaacagacgaagctgctctacaagaaacattcccttatagacgatcgtacggctggaaagggataccacataggtatcatcgttggactgctcaaagactcttcgcgccacatacagcttgcggtcaaacgccagtcccttctccacatccgccggacgcttcacaaagccctgcatgatgtacggcatgcagtccaccgctttctgtcccagcttcgtcggatcggtcggaacttcacgccagccgaggaactccattccctccttgccgacaatgacctcgaacatcttcttggcacggttgcgctttaactcgtcctgcgggaaaaagaacatgccgacaccatagtctctctcctcaccgagttcgattccaagctgttttgccgccttggaaaaaaacttgtgggatatctgcagcagaataccgacaccgtcaccggtctttccctccgcatccttgcctgctctgtgctttaagttctcaacgatctttaacgcattctccacagtctcgtgtgtcttgattcccttaatgttgacaaccgaaccgataccacagttatcgtgctcgtaacccggatcgtacattccggctgcctgcttccccgcatccgataccgagaaacggttgagggcgtccttcttataagtggtctgctctttcataatcagcttcctttctgcattctgtattccgatcagctgtctttactgcacggacagttgtctttaccgaatttgttatatcctaatatacaactttctcatttgtttgtctaccagtttattcttat

SEQ ID NO: 11544 - DNA, 853 bp, Unknown
  gut microbiota DNA sequence
aaacagagataactacaaaaaggatactattgattgccttaaacaaggtgtagttgtggaacaagcggggagtgtaggccacggtaagcagggcagccagccagataatgtagaacccggaaaggatgagaagtgtcgtcatagcgggaaactcctttaagagggggtgagggagagaaaaggggcgaagcgccaggcgccccgcccccttattcaggctactaattcagttagaatcaggcatcctcgaagccggtgaaggctacgatacgagagatgcaggactcgccgccaaccagtctccaggggaagcagccgattacgcagcgcttgttggagagctgatcgatgtcgccgcccaggcactcagcgtgaatgcactcatagggctggcagaacagctggatgtgcatggcctgatactgctcgggccagggatacatctcctgcagagtcttgccatacttctcctgcatgtacttgtcgcacttagcagcatccatggggcaccagtcacgaatcttggtgttcatgggatggtcagcggaaccgcagtctacgccgatccaagcgatcttcttatcctggcaccacttaacgaagctcagggaaggaccgggatgacgaaccatgtagcgctgctcatcagcctcgggggaatcccaaccatacttatgataaccagtgttgatgatgaggatatcgccctcacgaacttcaacgcgctcctcgatcatctcgggagtgtagatgccgaagtcttcgcagcagggagcatcagtcaggtcaacaacgacgccgggacgaaccagcttggtcagctcgagctgatcaacagtacggccggaagtat

SEQ ID NO: 11545 - DNA, 1023 bp, Unknown
  gut microbiota DNA sequence
cttaccttttttcagttatgcaatatgctgcggaacaacaaaacactcatccaactgtttatgtaaaaaggaaattgttgtcaaaatatcaattgcgtcctgctcatttacaatccactttatcttcagttcatgtgctgttacatttctaaccatatgtgtaactccgtttaacatctcttttaacccattttgtgcatttctttccgaaggtgtctgcaacgaatttattgccaatctgggattattaactgcaaaagcgttattaaataagttggagccatcatcctgtatccctgtcttttctcttaccttctctgacaaactctttgcagcttcaaagattgcatgaaaatagttctcctgtaagtattcttctttacagcattttattacatcctgatgaacatgcctcttttgcagctcgcttaccaaatctcttgtccgtctttcgacctccgatattgtggttgctgcctctatctttatcagctttccctcatttgtcatctgtaacccgattaacatcaatggtttatttatctctaataaaatctcatcataatcaccattttgaccgttaatgaaccttaccggttttaagctctttttaataaaattaagaaaagcatttgacgatccgtctatttcttgtctcgctaaaaaagtgtagtagattcttttccattttgtactttcattgcttgtgtctcttactccgcattcccgaaaaatttcattcatttggcttcctgtcatgcattctgcaactattctagacaacacttcaacttccgaattcgcaagttttctaattttctctgccatcatcattccccccttaataccaatcctggtactgtgccatttcctgcatcatatcagactcccaatctgcgacagattcaaattcacaatcacatccatcacaaaaattaaaaattgcctgcataaactcatacacattttttaagtccaaatcaatattatcaaaacgatattctaaactgtatgaagtaggat

SEQ ID NO: 11546 - DNA, 1573 bp, Unknown
  gut microbiota DNA sequence
cgggatataccgcagcatcgcccagctcctcctcgatgcgcagaagctggttgtattttgccacacgctcggttctgctcggtgcgccggtcttgatctggcaggtgtttaatgccaccgcaagatctgcgatcgtcgtgtcctccgtctcgccggagcggtgagaggaaattgccgtatagcctgccttatgtgccatcttgattgcctccagtgtctctgacacagagccgatctgatttaatttaatcaggattgcatttccgcagccactgtcaattcccttcttgagacgctcggtgttcgttacaaaaagatcgtcgccgacaagctgcaccttatcgcccagctccttcgtcagcttctgccatccttcccagtcctcctcatccaacgcatcctcgatggaaataatcggatacttctccaccagcttcttccagtgctcaatcaactcctcggaagtaaactttgtacctgccttcggcaatatgtactcacccttctttgtacctttccactcggaggacgccgcatccatggcaatcatgaaatctttgcccggctcatagcccgcatttttcactgcctgtaaaatgtactcgatcgcttcctcatcgctggcgagatccggtgcaaaaccaccctcatcgccgacggaagttgcaagccctttgctctttaacagcgctgccagtgcatgaaatacctctgcacaccagcggagcgcctccttaaagcttcccgcaccgaccggcatgatcataaactcctgcacatccacggtgttggctgcatgtgcgccgccgtttaagatgttcatcatcggaaccggaagtctgtttccggaaattccgccaaggaaacggtacagcgggatatcctgcgcgatcgccgccgctcttgccgccgcaatcgatacggcaaggatggcatttgctccaagctttgacttgtcctttgttccatccgctgcaatcattgccgcatccagcgcgtaaatatcgcttgcatccatgccgcagattgtatcgttaatgaccgtgttgatattctccactgcttttgtgacaccctttccaaggtatctcgctttatctccatcacgaagctccagtgcctcaaactctcccgtcgaagcgcctgacggtgccatgcctcttcccacggtgccatccgcaagtgtaacctccgcctcaacggtaggattgcctctggaatccagtatctctcttccgattaccttttcaatctccaaaaaattcatgcttcgttctccttccatctgatcatctgattctctgatcttttcaatcatctgattctttgatccatccggactccggctcccggaaaacacaccggtccgcgttcgttacataggatggaacgcgtcccggtgcagctgttttccggcaggaaacggattcagcagctccgcacctgtaagaagtcctaaaatgatttacactgtagttagttgtgtctaactgtcgtcattataacgattctaaaagaagattgcaaccccggatgatgatactttttctcattgcggattgttgaccggata

SEQ ID NO: 11547 - DNA, 225 bp, Unknown
  gut microbiota DNA sequence
tttggtcaagccctcgatcgattagtaacagtcagctccacacgttaccgtgcttccacctctgccctatctaccttgtagtcttcaagggatcttactcacttatgtgagggatatctcatcttgaggggggcttcacgcttagatgccttcagcgtttatcccttccggacttggctactctgccatgccgttggtcgacagcagatacaccagtggtccgtc

SEQ ID NO: 11548 - DNA, 195 bp, Unknown
  gut microbiota DNA sequence
tcacagacactataaaatcgcgcgaaccgaaactcgctgccatctgctattgaaaataaggcagatggcaactcagacatcggcttcgcgcgattatgttttattcagcagcggcaaaagcgccacacgaaagttcttaaattgtctcatgatttgcggacacagtccgtggagtgctccaaacttggaaagaca

SEQ ID NO: 11549 - DNA, 6048 bp, Unknown
  gut microbiota DNA sequence
cccggataacagtacttagcatcctgttcatcatcatagaaataatcatactcttgatccttcaacctgcttcttggatactctgtatttcttatttaattctgaaattgcatctgctgcagaaaccttttttgctaagacattttttactctttgacggcattctgcgtcaaatggcatgccttccattttgaaactggattcaatactgcttactcttctatcaactgtcatacgcgtatcctttctcctttccctttcacagaaaggtatttgtatcttctatagtataccacaaaacgctacatctatactatcaatttccgtattatgaagagcgaacatataaccttctccgatatcattatcatttcatggttaccattcattacatttcaggtgcttaccactcagacttaccacttttcctaccacttttcttaccactgtgatacgatattttgcgatactttatgaggtttgcaggcgaatcaccagacaccttccagcccttataaatcaagcattaccgccactttccagcccttacttctcgtcaacgacctgaaaaatgtagaacttcagataataactctcatccgccgcccacagaatcgggtgatccggtgcctgcgtgcggaactcgacctggcgcagcctcttgtgcgccgagcgtgccgcctcgcggatcgtcttggcgagcagctcctgtgtcataaagtgtgaacacgagcaggtggcaagatagccgccgtccttcacaagctttagacctttcatgttaatctcacgataacctttaattgcatttttcgtcgcctgacgcgacttcgtgaatgccggcggatcaagaatcacgacgtcgtactgctcgccgctctgtgccagcttcggcagttcatccagcacattggcacagcggaactgcaccgtgtcctccagtccgttccggcgcgcattctcccgcgcctgctccaccgcatacccggaaatatcaagacccgtgacttctgcggcgcccgcaattcctgcatttaaggcaaacgttcccatgtgggtaaaacagtccagaacctttttccctttacagatccgctgcatggcaagacgattatacttctgatccagaaaaaatccggtcttctgtccgttcacaacgtctaccatataatggacgccattctccacaatctccacattcgtgtcaaactctgctccgataaatccctttaccttcggcaagccttccttcgtgcgctcgttcgcatcgcttctctcgtaaacgccacgaatgcagatcccgtcctgcgcaagtgtctcctttaaaagttccacgatcgtctccttgaactgctccattccaagcgccagacactccacgaccagaacgtcctcatatttatctacaaccagccccggcaggaaatccgcctccccgaaaatcacacggcaggaggaggtgtccaccgtcgtcttgcggtaatcccatgcattctgcacacgcatctgcaaaaatgcgcggtctatttcctgatcgatctttcttgtcagcatccggacatggatcttggaattgacgttgataaaacctcttcccatcggataaccgtcaaaatcgtgtaccagcaccacttcgccgttctcaaatgttccggtcaccgtgtcgatctcattgtcgaacacccacattcctccggctttgatggttcttccctcaccctttttcaatgtaacaatcgcgctcataggttcctcctttttctattccgcctttttggggcggtttacaatgtaaattcccatgcataccagcaccagcgcagccaccgacatcacgcttaagctgtccgtctcaccgagcagaaccgcggacaggatcacaccgcacaccggattcataaaccctaagactgcaacatttcccgggctgccacacgacgatcgtcttctgcataaattgttgtctcatttatctgtatactccgtttccatctgtccttccgtccgccctgcagacataaccaccgctcattttagcacagaaccttccatcttgccacgacaatttattttcctgtttgcctgccatccccgctgcgttatacttaggatagaagttatcacgcacggggcagcggcatatcactgcctcccacaaaggagaaactatggcaactatcagtttatgtatgattgtaaaaaatgagtccgcagtgctggcgcgctgtctggatagcatcgccgatctcatggacgagatcatcattgtagacaccggctccaccgacaacacgaaagaaattgccgcacagtacacctcgcggatctacgatttcaaatggaccagcgacttttccgccgcacgcaatttttccttttccaaagcaacgatggaatatatctacaccgccgacgccgatgaaattctcgacgacgcaaaccgcgagcgttttctccgtcttaaagatgcccttctgcctgagatcgagattgtacagatgaagtatgtgacgcagggcacgttcgataccgttttgaatgcaaaaaaggaataccggccaaagctgttccgcagactgcgcacgtttacctggatcgatccgattcacgagaccgtccgcttaacgccggtcacttttgacagcgatgtggagattctgcactgtccgcagtccctgcacagcaagcgcgatttttccatcttcatcaaagcgtttgaacacgacgggcaattttccccaaaaatccgcaccatgtatgccaaagagcttttaaaaacgggcgacaaaaaggattttactgatgcaaaaccgatcttccagctcattttcgacaatgacccggcagatgatgcccgaaaggaagctgcctgcgtcctagcccggatttaccgcatggaggataacaagaacgaatttttcaagctgaccatgaaggacatgctcaccacaccgtgcgcagaaatctgctacgaactgggaacctattttgtgggacagcgcgactacgcggaagcggttctctggttctacaatgccgcctacgagacggaaagcatcctggacgttcacacaagcggggatcttccgctgctcggtctcgtcgaatgttacgagacgctcctcgccggggaggaagccaaaattccttccgacacagcgcttaccatccagtatgaaatgatgctcgacaaataccgggaggcttccagagactggcggatgccggaggagacctgatcttacaaatctccggaaatacgctccggcagggcttgtaaaatacaacataaagtgataggatgaaactatggtaaaattttaacaatcttttgtgtgggaggtatttgagatggattttcgtgaagaatacaaacagaagcttgtctccgcagatgaggcggtaaagctcatcaaatccggagactgggtagattacggctggtgcaccaacaccgttgacgcactggatcaggctctcgcaaagcgcaccgacgaactgacagacgtcaagctgcgcggcggtatcctgatgaagccgctggctgtttttgcacgtgaggatgcaggcgagcatttctgctggaactcctggcatatgtccggtatcgagcgcaagatgataaacagaggcgtggcttactactgtccgatccgctactccgagctgccgcgctactaccgcgagcttgactgcccggatgacgttgccatgttccaggtcgctccgatggatgcgcacggctactttaacttcggtccgagtgcctcacatctgggtgcaatgtgcgagcgcgcaaagcacatcatcgtagaagtcaatgaaaatatgccacgctgcctcggcggtaccgagtgcggcatccacatttccgatgtcacctacatcgtagaaggctccaacccgccaatcggtgaacttggtgcaggcggtcctgctacagatgtggataaggctgtcgcaaagctgatcgtcgatgagattccgaacggtgcctgcttacagctcggtatcggcggcatgccaaacgctgtcggttccctgattgcagagtccgacttgaaggatctcggcgttcacactgagatgtacgtggatgcatttgtcgatattgcaaaggcaggtaagatcaacggttccaaaaagaatatcgaccgttaccgccagacctacgctttcggcgccggcaccaagaaaatgtacgattatctggacgacaacccggaactgatgagcgctccggtcgactacacgaatgacatccgctcgatctccgcactggataactttatttccatcaacaatgccgtggatattgatctctatggtcaggtaaatgcagagtctgcaggcatcaagcagatcagcggcgcaggcggacagcttgacttcgtgctcggagcttatctgtccaagggcggcaagagctttatctgcttatcctctaccttcaagaccaaggacggtcaggtgcagtcccgtatccgcccgacgctggcaaacggttccatcgttaccgacgcaagaccgaatacacactatgttgtaaccgaatacggcaaggtgaacttaaagggtctgtctacctggcagagagccgaggctctgatctcgatcgcgcatcctgatttccgcgacgacctcatcaaagaggcggagcagatgcacatctggagaagaagcaaccgctagtaccggaggacgactgacggacgggacgtggaatgttgcatatagtttcactatctgaggccagaagaacagccatgttccagatgaaagcaggcgtggagaatccaatcgccaaatacggaatttctaagcatgccgcttttgacatcttcgatgatccatgtctttccaagtttggaacactccgcagaaggtgttcgcaacctgcagacaattttaggacttttgtgtgtgtcccttatgggcaccgctgaacagaacataaccgcgcgaagccgatgtttgaattggcatctgccttattttcaatagcagatgccaacgagtttcggttcgcgcggttttatattgtctgtgaagcggtgcccttagggacaccagaaagtccgcccattgtctgcggtttgccggacacctcctgtggattgtccaaacgtggcaaagacacggaatataatgtcaaaagcggcatgcaagaaattcacgtattttgctccaacgattctccacgcctgcttccattctggaacaggatgattcttccccttcagatcctgtcaatcctgttaccattccacttcccatctgtcagccgtcctccggcactaaccggttgtctacagggttccagccatccggtcgcggatctctactccggtcggtgtccccgcaagccctccttttccggtctcacggatatcctcattcatgctgcgcccgatactgcgcatcgcgtcaatcacttcatccggcggaatcttactgaagatccccgccatcgtcatatctgcagaagtcatggcattcacggctcccatgacattgcgcttcacacacggaacttctacaagtcccgccaccggatcgcatgccagtccaagcagattcttaagcgccagcgccgctgcattggcaatctcatctgcaccgccgcccagaagatacgtcacaccacctgccgccatcgcggaagccgaaccaatctccgcctgacagccgcctgctgcgcctgccagaaacgcccggtttgcaatcactccaccgattccggctgccacgtacagggcttccaccatacactcctcagaaaaaccgcgctcctcctgcacactcaaaaacactgccggtaccacaccgcaggagcctgcggtcggtgccgccacgatccgcttcatgcaggcattggactcgctggtcttcagcgctttttccatcacttttccgataaagtctccgcagagcagcgttcccgcctcccgcgcccgcttcatcctggttccctctgttccgaccagtccacttgctgactttaacgtctcatcgtaatgtgcatctgcatactgcattgcctggtac

SEQ ID NO: 11550 - DNA, 882 bp, Unknown
  gut microbiota DNA sequence
ttttctccaacgaattcccagttgcatttccacatgaaatcctcaagtgtgtttcttataatattacttatctttttaaaagaaaatggtacaatcagtcgccgtccggctttactcagggtcagatccgatgcagcttctgctcatatttttcctgacgaaccggaagacggaacggattgttgacatagacgatcatgtacatgccggctgccgtaatcatacctgtcacaacgtcgaagacggagtgctgttttaaaaacatggttgagagaatgatgctcaccatgaggatggcggaaccgcagcgcgttgcgtgcttgtgcttgaacgcatcagaacgccataccgcaatattgaccgcaatcgagttgtatacatgaatgcttggaaacaggttcgtcgcggtgtcggaagcgtacagccacttgacgatatgtacaaaaatattatcccgcgcaaaggttgtcggtcttaagtaatgtccgttcggataaatggtggacacaatcaggaaaattgtcattccggtaaacagcattgcgcacagccggaaatattcggaacggtcttttaaatagaaataaccgatgccccagccgacgtacccgaaccataacaggtaggggatgataaaatattcacagaatggaatgtaatcgtccagcgcggtgtgaatgacatgaaaatgtgtggtgacggtcttctcgagatgaccaaaccatggaagatagatcgcaaaataagataaaagaaacagagccttgtttcgatcaataaagctgctgattctctgacgaagttctggtttcataatatccgtcctttctatataaatagtaagaagtacatccaatttcttcatgactgcgattatagcac

SEQ ID NO: 11551 - DNA, 20876 bp, Unknown
  gut microbiota DNA sequence
ccatggagggcaaatatcagtttgacctgattttcatggacccgccttaccgcaagggaatggagcaggaggttttacggtatcttgcaggatcttcccttttaaaagaggacacggttctgatcgtagaggctgcgttagatacggatttcagctatctggatgagtatggaatgacactttcacgcctcaagatgtataagacaaatgagcacgcatttatccgcagaaaatagccggagcatgcgaaaaggagaagaaacctatgaagagggcaatatatcccggaagttttgatccgcttacactgggacatctggatatgattgagagatccgcaaaaatcgtggatgaactggtgatcggtgtactgaataacagcgcaaaaaattcgttgttttctcttgacgaacgtgttagtatgataaaagagatgacggaatccatgccgaatgtcacggttgcatcttttgacggtcttttggtagactatatgaaggagatcaacgcgacgatcatagtgcgtgggcttcgggctgtgacggattttgaatatgagcttcagattgcacagacgaatcatgtggagaatccggaagtggagacgatttttctcacgacgagcctgcagtattcctatctgagttccaccattgtgaaggagttcgcatcctacggaggcgacatctccaagttcgttccggcgagattcatagacaggatctatgagaaatatcacatctcaaaataaggagaggcttatggcaagtagaattgaacagattatagaagaaatcgaggaatatatcgatggctgcaagccgcagacattttcctcttctaaaattatcgtaaaccgcgaagagatggaggagctgctcaacgaactccgcatcaagacaccggaggagatcaaacgctatcagaagatcataagcaataaggaagcaattctggcagatgcccaggcaaaggcagatgcgatcattgcgcaggcgcaggtcaagacggacgagctggtcagcgagcatcagatcatgcagcaggcatatgcgcaggcgaatgaagtggtcatgattgcaaccaagcaggcacaggagattctcgataatgcaacgaatgacgccaacaatatccgtatgggtgccatgcagtatacggatgacattctgaggaatctggagaacacgatctcacattccatggatgcggcgaaggcgcgccatgatgcttatgtaagttccctgcagggattcctggatgtagtgacggcgaaccgtgccgagctcaatccgactgccgaggagccggagaccaagacgacggatgcgcaggcatcccaggcagacggtccgaaggtggagatctcttcggatatgctgggctgaccggacgcactgtctcacagatgaaagatctgtgagacgagacaggcaagcagtccgcagcaggcagcaagaagcagttttgcgatgcagtagcgttttatggagagtggtgtgtcgcggatcatggaacttgtctgggcgatgccggacagtccgccgaaggcggtatagaccacggccagcacatactgggtggacttaggaagaccggagtccggaagcatggcaatcccgtttgtgatttcgaccattcctgtaaggatcagtgtgaggatatggggaatgggaagcttctgcagaagagaggcgatcatggaaaacagcataatatacccaccaagtctggtcagtgtttcaaaaccatccatgatgccggtatctatgattttaaaattcatttgagatccagatgccggctgtttttgcgcgtggaacgcggtgcggccttttgtgcggcgtgcgtctgcagagagcaggatactgcccagcagaagcgccgggaaatacaggatcagcagggtaactgccgacagatgggacagctttaactgggtgtagaggatgaagcttgtgacaaagaccggactgatgttgttggtaatgataaataaaacatcggcttcccggcgtgtgatttttccgcttgcaagcagggcggcgcagtttttgctcccgatcggaaagccgaacagaaagccgcttaacagaacaaaagccccgttgtcgctgaccggaatgagccgggatacaagcggtgcggtgattttgttcagatattgcaggtaatttgagtccatcaggatattggacagaatgacaaaggggagcagcgtcggaagaacgcgcgtgtaccatagaacgagtcctacggatgcggcgtttacggcatctttcggggcggttaagatataggcaataaataatagcagacaaaggaatatcaatttctttttcatactagaatgtatgaagaacaggaggattctatgagcagtttaaaagaaatacaggcattacagttacagtcggagaaagtgtttgattattttgaggagatctgtgcgattccgcacggttcgaggaacacaaaggccatcagtgattatctggttgcgtttgctaaaaagcatgatctgacctggtatcaggatgagtccaacaacgtggtgatcgtgcaggaggcgacagccggctatgagcaggcagataccatcattctgcagggacatatggatatggtatgtgaaaaggaaagcggctgtgcgatcgattttgagaaggacggtctggatctctacgtggacggagatttcttaaaggcgagaggaaccacgctgggcggcgatgacggcattgccgttgcctatgcgcttgccattatggattcgccggagattgcgcatccgcgccttgaggttgtgatcacggtggacgaggagatcggaatgctcggtgccgaggcgattgatctgtccatgttaaagggacacaagcttttaaatattgattccgatgtggagggtcatttcctgaccagctgtgcaggcggcatgacggtggagactacgattccggttgaccgtatgtcccagaacggacttgcggtgacgctgacggtgacaggactttgcggcggacattccggaagtgagattgacaaagagcatgcgaatgccaatatggtcatgggacgtgtgttaaaatacgtctctgaccggatggaactgggcgttgtgaccttagagggcggtttaaaggacaatgccattccgcgtgaatgtacggcaggtctgctgattccggaggagaaaaaagaggagcttaccacctatattaaggaacttacggcggagcttaaaaaggagtatgcggtatcggatgcgggaataacgattgactgtgctttcggagagaagggggaggcatcgattctttcctatacggcgatggcgagagtgattttttacctgcgccatgtgccaaacggcgtacagcatatgagcacggtgatgccggggctggtggagacctccttaaatcttggcatcttaaaattggaggatcaggcgcttcttgcgacagcctccgtgcgaagcagtgtgtcttcccgcaaggaagatctgcgtgaccgtctggagcatatcgcagagttcttaggcggagagattgccgtaagcggtgattatcctgcatgggagtatcaggcgaagtccgagatccgcgataccatcagtgccgtatatgaggagctgttccaggaggagccggtatttgaggcaattcatgccggactggagtgtggtatcctttccggaaagatcaaggatcttgactgtgtatcgttcggaccgaacaattacgatattcatacgccgaaagagcgtctgtccatctcctcgaccgagaaagtatggaagcttctggtggcatttttaaaaaaatgtaaataaaaaaggaatgatatgaatttcagacatgtccgtatgctgctgttactgtttaccatgatcctatggaacgttcttataaacacatggattctggagagaaccagacagataaactgtttttcctatgagacggcgctttacagtttccgggaacaccgggtgagcggggaactgcttgcccggatgcaggaggaggcagaagaaaaaggaatgtcggaaaaagaactgcttgccgtctattttgcggaggatggaagcgtcaccgatcccgggcagctggccgtagaggctctgtatgcaaaacggtatcagccgcaggcatatgcgcgaatctgcggctatctttctgccgtgtgggacgatctggaacgttttccggtcgggacggtggcctccgacgggaatgcgggagtgagctttgcagacagctggatgcagagcaggaactttggcggtgagcggggacatgaaggctgtgatattatggcttcggtgaacgagcgaggcatctatcccatatacagcgtatccgacggagtcgtggaaaatgtgggatggcttcgcctcggcgggtaccgcatcggcattcgcagtccgtccggagcctatttttattatgcgcatctggcggagtatgcgaaggagtttgaagttggggagacagtccttgcaggcacccatctgggctatatgggggataccggttacagcgatattccgggaaccaccggcaactttccggtgcatctgcactttggaatctatatcaacgatgagaacgggcaggaactttccgtaaacccgtatccgatggtgttatatctctgggaacagcagggaaagtacacattcggtgagacaaagagacagtgagggagaaaaatggcacttcgtctggataaatatctgacagaactgggcgcaggaaccagaagcgaggtaaaaaaacagatcaaagccggtctggtcaccgtgaacggagcggttgcaaaaaagccggaacaaaaggtcgatgagacgggcgatgaggtatgcctgcgcggggagcgcctgctctataccgcttttgagtattatctgtttcacaagcccgccggctgtgtgtcggcgacacaggacaatatgcaccgcacggtgatggattatctgagcgacaccgcaagaggagatctgttcccggtgggaaggctggatctcgacaccgagggactgcttttgatcacgaacgacggtgcgctggcacacgcgctgctgtcgccgtcccgccatgtggcaaaaacatattacgcccgggtgcagggcgtggtggatgagaccgatgtcaacctttttaaaaacggggttgacatcggggaggagaagccggtcagaccggcagatctggtaattctgggctgtaaagcggatgtgtcagagattacgcttaccatcacggagggaaagttccatcaggtaaagcggatgtttgaggcggtcgggaaaaaggtactgtatttgaagcggatttccatgggaccattggtgctgccggaggatcttgcaccgggagcgtaccggaaactgaccgcggaagagcttgctgcgttaaagaatgagcagccgaagagaaatgaggattagaatgaacaacggatttttgccagtcagccgtgcggagatggaagagcgcggaatcaaacagtttgactttgtctatgtgatcggggatgcctacgtggatcatccttcgttcggtcacgccattatctcaagacttctggaagcacacggctattcggtcggaattatctcgcagccggactggagagataaggagtctgtctgtatcttcggggagccgcggctcgggtttttagtgtctgcgggcaatatggattcgatggtgaaccactattcggtgtccaagaaaaggcgcgcgacggatgcgtttacgccgggcggcgtgatgggaaaacggccggattacgcgaccattgtctattgtaatctgctccggcagacctacaagcacacgccgatcattatcggcggcattgaggccagcctgcgcagactggcgcattatgattactggtcgaacaagatgaagcggtccattcttctggattccggggcggatctgatctcctacggtatgggggaacacagcattgtggagattgcggatgccttaaacagcggactggcggtcagcgatatcacatttatcgacggcacggtctataagaccagaaagcgtgaggacatctatgatgccatagagcttccgcattatgaggaggtgctggcggacaaggcggcatatgcgcgcagcttttatacccagtactgcaataccgatccgtttgtagccaaacgtctgtttgaaacgtacgacggaaagctttttgtcgtgcagaatccgccggcgaagccgctgacacaaagcgagatggatcaggtctatgcgctgccgtatcagcgcacgtatcatccgagttacgaagcgcagggcggggttcctgcaatcgaggaagtgcgtttttctctggtcagcaaccgcggctgctacggaggatgcagtttctgtgcgcttacgttccatcagggacggattattcaggtgcgcagccacgagtccattctggcggaggcggagaagatcgtctgggaaccggactttaagggatacatccatgatgtcggcgggccgacggccaatttccgcgcgcctgcatgtgacaagcagatgacaaagggcgtatgtcccaacaagcagtgcctgtttccgacaccgtgcaagaacttaaaggtggatcataaggattacctgaagctcttaagaaagctacgggaactgccgaatgtgaaaaaggtgttcatccgttcgggtatccgtttcgattatctgatctacgatgaggaccgcaccttcctcagagaactctgtgaacaccacgtcagcggtcagctaaaggtggcgccggagcatatttccgatgcggtcttagagaagatgggcaaaccgcgcgtggaggtgtacaagcggtttgtgaaggcctatcaggatatgaatgagaagctcgggaaaaagcagtatctggtgccgtatctgatgtcatcccatccgggatcgacgttgaaggaggcggtggaactcgccgaattcttaagagatctcggctatatgccggagcaggtacaggatttttatccgaccccgtcgaccatatccacctgcatgtactatacgggacttgacccacgcacgatgcagccggtctatgtggcggtaaacccccacgagaaagccatgcagcgcgcgctcatccagtaccggaacccgaagaattacgatcttgttgtggaggcgttaaccaaagcggggcggacggatctgatcggctttgacaaacactgtctggtacggccgcggggcatcggctacggcacaacaaacgccaaagaccgctacgctggaggtgacaagaaccgccgcacggcaggcggcgggaataaccgcggaagagcaaatgcttccgagaagaaaaatacgaaaaagacaatccgcaatgttcatcataaaaaagcaggtgcggggaaaaagtaagcgggcgaatggagagagactatgcaggaattgcacatcggcgagaacgacgcgggacagcgttttgacaagtatttaaaaaagcttctggcagaggctcccggcagttttgtctacaagatgctgcgcaagaaaaacattaccttaaacggcaaaaaggcggacggcacggagaaactctcctgcggggacgaggtgaagctgtttctctcggacgagacctacgagaagttccgggcaaagtcaaaaacggtgatgccagaagctttcagtggttcagaaaagactttaaggcagcttaaagtcctttatgaggatgcggatattcttatcataaacaagccgtccggcatgctctcccagaaggcgagacccgaggatgtttccgccaatgaatatatcttaagctatctgcttagggagggagcgctgaccgaggaggagatgcgcaccttccgtccgtcagtctgcaaccgcctggaccggaatacttccggtattctgattgcgggaaagactttaaagggacttcaggagatgtctaaggcattaaaggagcggacgatccagaagtattaccggtgtgtggtaaaaggggaagtccttagagaagattacttgaaggggtggctcgttaaggatgaacgtgagaataaagttaccgtcagtacggtaaaacccaaaagtgtggatgccgcgccgattgagaccgcgtaccggcccatctggacgggcggcggttacaccgggctggaggttcatctgatcactggacgttcccatcagatccgggcgcatttggcgtccatcggacatccgatcatcggggatgtaaagtacggcgacgccggcacaaacgaacaatttcgcagacagtgtaaggtaaaatcacagatgcttcacgcataccgcattgtctttgcggacgggagagaagtgatcgcgccctgcggcgcagagttcgcgcgcgtggaagagtggtgtaagaaccggtagacaggttgtggcagaaagaattgcagcacaaaaaatggaagttcaaccttaagctgaacttccatttttgtcgttttcgatgaaatctttcctatacggaaatggatgtggcgtctgaccgcctcagatctttcctgtacggaaatggatgtagcatctgaccgcctcaaatctttcctgcactggaattgatgtggcgcttgatcgcttcaaagctttccgcactgacatcgtgctcgatcttgcacgcatcctctgcggcaacccgcggatcaaccccaagcatcgtcagccagttggataagattgtgtggcgctcataaatcttttctgcaacttcaagtccgctttccgtcagatggatgtatccttccgggctgacggtaatataaccgttctcacgaagattcttcattgccacgctgacgcttggcttcttaaagttcatctcattggcgatgtcgacagagcgcacgttgcccaatctatgatttaagaccagaatcgtttccaggtaattctcgtttgactcattcatgaccatctggcatccctcccattgctaaccttcattctaggatcttcgggtaaaacccctctctgggttcaagtatatcataattggagaggtttgacaaagggatatttttattgtgtacctactgagaattctatataatagagaaaagaaaaggatgaaagatgcatgacggcagctaactgccggtgtgtcaagagagtatctggaggcaatatggcaacttggaattcaagaggactgcgtggatcaacgctggaagagtttatcaaccgtaccaatgagatttatcaggagaacggtcttgcgctgattcagaagattcccacaccgatcacgccgatcaatatcgacaaacagaccagacatatcacgctggcgtattttgaccagaagagcacggtggactatatcggcgccgtacagggaattccggtctgttttgacgcaaaagaatgtaatacggatacttttccgcttgcaaatatccatgaacatcaggttgcattcatggagaactttgaaaaacagggaggggtatcctttttcctgctcagttttacgaagagggacgagttctactatctgcgcctggatgtgctcttagagttctggaagcgcgcaaaggagggcggcagaaagagtttccgctatgaggaattggacccggagtatttcctgtcgcggcagcgcggcgttttggttccgtatctggatgcactgcagaaggatttgctgcgcagggattgacaattattctaagatctcctataataaacagagtttcacttgctatcgtgctaccatagtagcaaggtaaagtataaaagtatcggggaaatgagggcgatcatgaaaagacagttattgcatacgccggaaggtgtgcgggatatttataatgatgagtgtgagaagaaaatgcttcttcaggaccagctatatcatatattgcgtctgcacggttatcatccgattcagacgccgacatttgagttttttgatatattcggacgggagatcggcaccacgccgtcgaaggatctctacaagttttttgaccgggaaggcaacacgttggtgttaagaccggatatcacgccgtcgattgcacgctgtgccgcaaagtattttggcgaggaagaacttccgatccggctgtgctacatggggaatactttcatcaataacagcagctatcagggacgactgaaggaatgtacacagcttggcgcggagcttttgggagatccatcagtggatgcggatgcggagatgatctccatggtgatttcctgcctgaaggcggcggggcttaaggagttccagcttagcatcggacatgcggatttcttccggggactgatggaggcggcagggcttttggaggagcaggaggaggaactgcgcgaactcatttccaacaagaactttttcggtgtggaggagttcgtggagactttaaacctcgaggagaacttaaagaatctctttggcatgctcgggaatctctacacgggttcggatgaactttctgccgcaagggaatgtgcagcatcctatcccaggatcttaaaggcgatcggggatctggaggaacttcataaaatactggaagtctatgaggtttcccgttatgtttcgtttgaacttggaacgatcagcaactaccagtattacaccggtatcatatttgcgggatatacgttcggaagcggagaggcgattgtaaagggaggcagatatgacaggctcctcacctgttttggaaaagattcagcatccatcggctttgcgtttgtgattgaccagctgatggctgcactgcagagacagaaaattgatgttccggtggaacgctgtgtggagctgatggtctataaatctgccaaacggcagaaggcgattaccgcagcggcgacagcgcgtgcagccggacgctgtgtggagctgatgttgtgggatgagacgaagcaaaggaaagattacgaggattatgcagctcgcagccggatgacaaacgtgcagtttttcgcgtagaaggcagagaagggagagacgttttaaatggaggatatgagatatctgacttttgcgctcggcaaaggcagacttgcaaaaaagacactggaactgtttgagaagatcggcattacctgtgaggagatgaaggataaggacacgagaaagctgattttcgtgaatgaggagttaaagcttcgttttttccttgccaagggaccggatgtgcccacttatgtagaatacggcgccgcggacatcggtattgtcgggaaggataccatactggaggagggacgcaatatctacgaagtcttggatctcgggtttggaaaatgccggatgtgcatctgcggaccgaaggatgcggaagagttgctgaagcaccatgaactgatccgtgttgcaaccaagtatccgcacatcgccaaggactatttttacaataaaaagcatcagacggtggagatcatcaagctgaacggttccatcgagctggcgccgatcgtcgggctctcggaagtcatctgcgatattgtggagaccggctcgactctgcgcgagaacggtctggtggttctggaggaagtatgtccgctgtctgcacggatggtggtcaaccaggtcagcatgaagatggaaaatgaacggatcacgaagctgatcgcggatttaaagagagagatagaaaggaaggatctggcatgagaatcttaacgttaaccaaagagacacagcagaatatactggagaatctgttaaagcgcagcccgaactcctacggggagtacgaggggcgtgtgaacgccatcatcgaggaggtgcgcgccaaccgcgacgcggctgttttttcctacacgaaaaagtttgacggtgccgacattgatgccggaaatatccttgtcacggaggaggagatcagggaagcctacgagaaggtagatccaaagctcctctccgtgatccgcaaggcacttgtcaatatccgagactatcacagcagacagcgccagaattcctggtttgattcacaggaatccggcattatcttaggacagaaggtgactccgcttgcgagagtcggcgtgtatgtgccgggcggcaaggccgtctacccgtcgtcggtgctcatgaatgtcattccggcaaaagtggcgggtgtggagcagatcattatgacgacaccgccgggagcagacgggaaagtctatccgtccacactcgtggcggcaaaggaggcgggcgtggacgccatctataaggtgggcggcgcgcaggcgatcgctgcgatggcgttcggaaccgagagcatcccgaaggtggacaagattgtaggcccaggaaatatctatgtagcacttgcaaaaaaggctgtgttcggttatgtcagcatcgactccatcgcggggccgagcgagatccttgtccttgcggacgagacagcgaatccgcgttatgtggcggcggacctgctgtcgcaggcggagcatgacgagatggcttccgctattctgattaccacaagccgcacgcttgccgagcaggtggcggctgagatcgaccgctttgtggagaagctgtcgagaaaggagatcatcacaaaatcgctggagaattacggatacattctggttgccgacagtctggacgatgcgattgcaacggtcaatgagattgcgtccgagcacctggaacttgtgacgaagaatccgtttgaggtgatgacgaagatccgcaacgccggagcaatctttatcggcgaatattcctccgagccgctcggcgactactttgcgggaccgaatcatgtgcttccgaccaacggtacggcgaagttcttctcggcgcttggcgtggatgattttatcaagaaatccagcatcatttcctattccagagaggcgcttgagaatgtatacaaggacatcatccagttcgcggagtgcgaaaaactcacggcacacgccaattcaatccgtgtccggtttgaggaaaattctgaacaaaagtaattcctttttcgtggaatccgtaatataataaaagttgaagtgttgggaaggaacgggagtcagtatgagcagaacagcagattatgtgcgaaagaccaaggagacagacattacgctcagtctggaactggacgggagcggagtaagcgagattgataccgggatcggctttttcgatcacatgctcgagggctttgccagacacggttttttcgatctgtcggtcaaggcggagggcgatctgatcgtggactgtcatcacacgatcgaagataccggaattgtgctcggcaatgcgatcaaaaaagcggtcggggataaaaagggcatcaagcgttacggaagctgtattctgccgatggacgagacactcgttttatgcgcggtggatctttccgggcgtccgtatctgtcttttgacggtaattttaccgtagagagagtcggatacatggacacggagatggtaaaggaattcttctatgcgatctcctatacggcaggaatgaatctgcacatcaaggtgctgacgccgggcaataaccatcacatgattgaggcgatgtttaaggcatttgcgcgagccctcgacgaggcgacatcttatgatccgcggattacggatattttgtctacgaaaggcagtttatagaaaggtattatatttttatggaacagaaaaatatcgttgctacgatttacttaaagaacggacaggcggtacgggggattgaggatcacaccccgctggcggacgtcatcgagctggcaaagctttacaatgacaacggaattgacaagattatcatttttgatctctctgacgatgatgaggagcatgagaagaatattcacacgatcaagaacatcaaccgtaacgtggagatcaagacctgcgcgggcggcaacatcaaccgcctcgaggacatcaaaaagtttatctatgccggatgccttcaggtcattgtcaacggtgccaaggcgaacagcatcgagcttgccgaggaggcaagcaagcgtttcggaaaagaccggatcctcgtgtcggtggagaacgtggacttcgtgttcaaacatcaggcgaagatgaatgagaatttccatgaacttctggtgttaaacaccagtgttttagatgcgattgagaatattacggatgttccgtatgtggtctattttgaggcctgcgattacgagaagatcattgaggtgttaaagcggagcaacacgcgcggaattgccggcggtttcttaaacgatccgaataccaacatcatggagatcaagtcacagctttcttccgcgggcatcaagatggacaattttgagccggcgttaaagtgggatgatctgaaaaagaattctgaaggcatggttcccgtgattgtgcaggattaccgcacggatgaggtgttaatgcttgcctacatgaacgaggaagctttttataccacaatcaatatcggtaagatgacctatttcagccggagccgtcaggaactctggacgaaaggcatgacctccggccacatccagtatgtgaagtctttgacggcagactgcgattatgacacaatcctagcgaaggtatcccaggtgggagcagcgtgccataccggcaatccgacctgctttttcaacgagattgtcaagaaggaatatgtggagaagaatccgcttaaggtgctcgaggatgtctatgagattattctcgaccgcaaggcacacccgaaggagggatcttacaccaactacctgtttgacaagggaatcgataagatcttaaagaaagtcggcgaggaggcgaccgagattgtgattgcggcaaagaatccggatccggaagaggtaaaatacgagatctcggatttcctgtatcacatgatggtgcttatggcagaaagaggagtcacatgggaagatatcacacaggaactttcccagcggtaaagccgtcgcgaaaggtttatatggatgttctgcgcgtgattgcgacggtgtttgtgatctgtgtccacaccgtcgcgctcgcgaagacgacagcagcgccggggacgctgctttttcgcgtattggaagtctttaattatacgtttttgtcctgcaacctgttctttgtcatgatcagcggcgcattgctgctgccagtaaaaggagagcggtgcagggatttttttgcgcgccgttttatccgtgtcttcatcccactcgtggtctattacaatctgtatgtctgtgccaaagagggaatcggacggctcgctccgtcgcagtggggactgatgctgcagcggttcttcatcggaccgccggtggaagcgccgcatctatggctggtgtacgccattatctggctgtatgtgctcaccccgtttttgcggtatctggtgcagaacattcccgatccggtcatgaacggcgtgatgcttgtgatcttccttctgaatgcgtatgtcacctatgtgccactgtttggcgttacgccgcctgcggtactctccggtattgtgaattcgtatgcgggggcgtttctgcttggctattatctcgcgaaccgcgcggggaagcgggcagagaattttttccttgcggcgggtcttgtgtcatatctgatcacctgctatgtgattctgttccatggctggtatgacgactatatttacaacaatgcgcctacgatgatgttttatgccgccgccgtgtttgtgctcataaagcggctggtgccctgcggcagcaaagagagcccctttgtgcgcatcatcgggaagtacagttattcgattctgctgattcactggggcgtgctccactatgccgtcaagcaggtgcttcacgtcaatgtcctgtccggcggcatcgtgggaggctgtctgcttgccgtacttctcacgtttgcactgtcatttgtgggagccgtcattttggatcagaccatcatccgttttttgacgtttgcggtttcaaaactgatcgatgttctgcgcacatgtttttcccaaaaatctcatatagtatcctagagcacaggcgggataggagaggtgcagtatgacagactatgtagaacggcggagagcgtatgtctcacaggtccgcagttcctttgagacgggagcggatgcgggagagccttttgacagagaggagccacagagagggcgcgcggggggacagctccgctttcttgtggcactgctgctgtttttgttcttttttgcatgggatgacagtggaaatacggtttgcggcgtcactccggcgaaaatgattgacatgatcgaagataatcggtatgatacaattttgcaggagtgcgacgcagtgcttgcagaacttctgcatacagaatgaaaggataaaagaaatgacaaagttagcgttatccgatgagatactgatgaagattgataagccggcgcgctacattggaaacgagttgaacagcgtctgtaaaaacaaagacgaggtatcgattcgttttgccatgtgctttccggatgtatatgagatcggcatgtcccatctgggcatccagattctctatgatatgtttaacaagagagacgatgtgtggtgcgagcgcgtgtattccccgtggccggatctgcacaagatcatgaaggaggagaacatcccgctgttttgcctggaatcacaggagccggtgaagaatatggattttcttggaattaccatccagtatgagatgtgttataccaatattctccagattcttgacttaagccagattccgctgcttgccgcagaccgtgacgataccgttccgatcgtgatcggcggcggtccctgtacctacaatccggaaccaattgcagactttttcgatctgttttatatgggagaaggggaggtcgtatatgaccgcatgttagatctctatcaggagatgaagcgggcgggcagaagccgcagggagtttttgcatgaggcggcaaagattccgggaatctatgtgccttccctgtatcaggtggaatataaagaagacggaacgatcgcgtcgtttacaccggtggatgaggaaatcccggcgactgtgaccaagcagctcgtgatggatatgacggatgcggtctatccggaaaagccggtcgtaccgtttatcaaagccacgcaggaccgcgttgtgcttgagattcagcgcggctgtatccgcggctgccgtttctgccaggcgggaatggtgtaccgtccggtgcgcgagaaaaatattgagcgcctaaaggcgcttgccacacagatgattgaggcgaccgggtatgaggagatctcactcagctccttaagttcatcggactacagctctctggaggaacttgtcaatttcctgatcgacgagtgcagggagcgcagggtgaatatttcacttccgtcgctccgcatcgatgcgttttcactggatgtcatgagcaaggtgcaggacatcaaaaagagcagcctgacattcgcaccggaggcgggatcacagcgcctgcgcgacgtcatcaacaagggactgacggaggaggtcatcttaaacggcgcccagatggcgtttgagggcggctggaataaggtcaagttctactttatgctgggacttccgaccgagacagaggcggatatgcgggcgatcgcggagcttgccaatgagacggcggcacgctattacgacaccgttcccaaggagaagcggaacggcagatgccagatcacgatcagtacctcctttttcgtcccgaagccgtttacaccgttccagtgggcaagaatgtacccgccggaggattacatcggacgtgcaaaagtggtcaacgacacggtcaaggaacagttaaacaaaaagagcattaaatacaactggcatgaggcggatgtgacggtcttagagggcgtattggcgcgcggcgaccggaaaatcggacaggctatcttaaaggtttatgaaaagggtggcatttttgatgcatggtccgaatattttgactatcagagatggctggacgcctttgtggagtgcggcattgatcccgatttttacacgatgcgcgagcgttccatggacgagattttcccctgggattttatcgataccggcgtgaccaaggaatttttaaagcgtgagtggaacaatgccatgaaagagaccgtgacgccgaactgccgaatgcgctgttcgggctgcggtgtaaagaagttcggaggaggtgtctgctatgaaaattagaatccgtttccgcaagtacggtgtgatgaagtttatcggacatctcgatgtgatgcggtacttccagaaggcaatgcgcagagcacacattgacatctgctattcggagggattttccccgcaccagatcatgtcgtttgctgcgccgctcggcgtgggcatcacgagcgacggcgagtatatggacattgaagtgcacacgagtgcatccacggaggaatccctccgggcgttaaacggcgtcatggtggagggcgtggagtgcaccggttatgtgaaacttccggatcaggcaaagacggcaatgtcgatcgttgccgccgcagattatgatctgtattttaaggaagggtatgcggcaccggtttctgtttcggcgtttgctgacggtatccgcgatttctttgagaaaccggatgaggttctcatcaccaagcagacgaaaaagagcgagcgcgtgctggatgtcaaaccactcatctacggctttcaggtgacggactgcggcggcgtgccgtccttctatctgaagctttccacaggaagtacggataatctgaagccggagctggtgcttgaggcgctgtttttacacatgggacttacctatgatcccaatgcgattcagattcacaggaaggatgtctatgcgtccgacggggatgattttgtgtccttaggtgcgatgggagaagtaatcgaatgaaccgttacatgataacgcgagagaagataaaagggcaggaatatctgatttctgccctttatgatgagaaaaaacatatgattgaggtattgccggaggcggcgggggagacatcactgctcggcaatatctatgtcggaaaagtcgagaacattgtcaccaatctaaatgccgcgtttgtcaagatagcgccggatatacggtgctatctgccgctgtccgatgtgaagaatcccgtttttaccagaaagctgtcgcagacaaaggcgcttgcggcgggcgatgaacttctggtacaggtctcgcgcgaggcgcttaagacaaaagatcccgcggtgacgacaaacctgacgatcgcgggaacctatgccgtcttaacttccggaaaccggaagaagagcgtctcatcaaaggtaaagggggaggccagagagcgtctggtgaagcttgtagagcagacggcaggggagtacggcgtgattctccgcaccaatgccgcagaggcttccgatgaggcggttctgcttgaactggaagtgctttcggagcgctatgagacgatggcggaggcggcggcacacaagaactgttacacgcttgtatacagggaggaagcgggatggctgcgccatatcagagacctgcggaaggacgatctggaagagattgtgacagatgaccgcggaatgttcgaggatatctgcagtgcctgccggatccataagcgggcgcttacgacgggaggaagcgtgcccgtgccggtggacgatgtaatgacggcggatggaatccggatccgttattacaaggatccggcgctctcccttggagcactctacagtgtccgggcggagctgaaaaatgcattgagtgagcgcgtatggttaaaatccggtgcctatctggtcattcagccgacggaggctctgacggtggtggatgtcaacaccggaaagaatgtggcaaaaaaggagatgcaggagaactttctgcgcgtgaacaaggaagcggcagaggagattgccagacaactgcggctgcggaatctctcgggaatggttctggtggattttataaatctgacatcaaaatccgcggaagaggaactgcttaagacattccgggcggcactgcaaaaagatccggttccggcgcagcttatcgatatgaccgcactcggtctggtcgaggtgacccgcaaaaaaataaaaagatcgctgcatgagatttttccggacggtctgggattctaaaaaaaagataccttttaaaaaaaaggtatctttttttgtgcctgtttttttccttagaataataaaaaaatgaaaggaaacttgcaggatgcagaatacatatcaatttatcagtgataagggagttttttctctgccgggggcggcagattacagtgatctgtatttcccggtcgcaggggagtgtggtatcaaaagtgcggtgacgccgacacttggcggggactgcaagctggatcagaatacgtttctgctggagccggtgagcgtggagaatcttcacaataaccggaatgccagaaatttctggtgccatatcggaacgcacggaagctggtccgccacgggcaattcggcggaagaaatcgcaaaaaaatttacggatcttgcggatgaaaacgaagtgacagccggttttatgtggcagatcgtgacaagaacctccaggaagtatcagctttcggcacagatcacatcgtttgttccgctggacaatccgatggagatcatgtatgtggagattaccaatacaggcaacatgcagatgcgattcacgccgaccgcagccataccggtctatggcaggagtgcggacaatctgagggatcaccggcatgtgacatcgctgctgcaccgcatccgcacggtggagaacggtgtgcttgtaacgccgacgatgtcttttgacgagc

SEQ ID NO: 11552 - DNA, 897 bp, Unknown
  gut microbiota DNA sequence
ggaaggcgcaacagacgccatgaaacggagaatcccatgataaaactgattgccaccgatgtcgacgggacactggtaaaagacggaacgatgcagatcgatcccgaatatatgactgtcattaaggaacttgtccagaaaggaatcatttttgccgtctgctccggcagacagttcatcagcgagcggaagctgtttgcgccgatcaaagatcagctgctctacatcacggacggcggcacggtcgtgcgcaccccgcaggagattctgatggttcacacgatgccgcgcgatgtctggagtggcatgtgccgcatggtgcaggaacagatgccgcactgtgactgttttgtcgctaccccggactactgtctcgccgaggatgccggaagccgcatgttccactggctgcgcgattcctacggctatgatatccgggaggctgagcgcctagccgacatcccggagcaggacatcatcaaattcaccgtttaccacaaatccgcctgtgaggaaatgtgtgcaccgctcttcaccccggcatggaaagacaaggcacagcttgccgctgccggcaaagagtggatggactgcaatccgcccggtgcaaacaagggaaccgcgatcgagttcgtgcagaagcatttcggcatttccccggaagagacctgcacgttcggggacaacttgaacgacatcgagatgctgcagaactccggcatgagctacgcggtcgccaacgccagagaggaagtcatcgccgcggcaaaagatacctgtgcgccctactgggagaatggagtcctccagatcttaaaaacatttttataacgaaaaagaatcgtgtccctccagcggcagtgccccggcgtacacggttcctttttatttctgtag

SEQ ID NO: 11553 - DNA, 7591 bp, Unknown
  gut microbiota DNA sequence
ctgaaataagtatgacgtgcttcttaacattgcttatcagcagacggcaatgtctatctgatgcggcagtgccatgaaacaagagctacctgcgtgggggcacatggtgctcagagctttgccttgaatacctcgtcggcgggatagccgccggcgcacttctgcatgccgcgctggatgctgtcggcggaggtaccccagtccttgtccttgttgcggtagtcgtttttttccacaaaccaggacacttccttctggagccggtcgagattctcctgcatcaacgaaaaagctttgggataaaactcttttttctcgtcatcggtcagtttgtcctcggctgtctcgatcagatcaccaaagtgcggcaggcagaatcctctgcttttttcaaaaagtgcgcggaattcctcatttttcttatacaggtcgaaaaaagtatccagataacggccgtagatctgatggaaatggtcgcagacatagcagtcggtggtcttagcggcgatccatgcgccgagaggcgttttgggcgcattcccggatgagacatccgtgtgcttcatgcgtttgataaagctggatttgccgggcgtaaaatgtgccagctcatcgccgagctcctggttcagcttttttaagtgtgtgcttaagatcagggcgttgccgagccggttgccgtagtcgtacatcatcttgaagtggtggcggcagaaaccggtggcgtctgttttggcacggatatcatcttccatataggcagagccgaggatgaaggagatggcatgctgctcggcctcgcgttccaggtagcagaaaggacattcgtcgtctgcgtggaaggcattcatcaaagggatggttgcaatcgtttctttcatggtaatctccgtttcttttcatacaatctgtgaataaatccagtatagcataccagaggaagaaaaatcaaaaccgccttgtaaaatgcggcgttatcaagtaatatatataaggctgcagggaaagcccggcagtgttgacaggaagtttgagggagagaatggaatactatagcagacagatcagcaagttaatacaggaattatccaccctgccgggaatcggcacgaagtctgcgcagcgtctggcatttcatattctgaatatgccaaaggagcaggtggaggagctttcttctgcgattttggacgcaaagcagaatgtgcggtattgcaaggaatgttttacgctgacagatgaggaaatctgtccgatctgcagcgacagttccaggaaccataaggtcattatggtggtggagaacacgagggatctcgcggcatacgagaagacacagaagtatgacggggtatatcatgtgctgcacggcgccatctcgcccatgctcggaatcgggccgggggacatcaaactcaaagaactgatgcagcgcctgcaaaaggatgtggatgaggtcatcattgcgacgaattccagcctggagggggagacgacggcaatgtatatcagcaaactgatcaaaccgaccggtataaaagttacgcggattgcgagcggtgtgccggtgggcggcgatctggaatatattgatgaggtgacgcttctgcgcgcgcttgaggggcgcacggaactgtagtgaccgcatgagaaaaggatgcaactgtccggcatctggggcgggcggatgacaatcagatataagaaaggaccatgacacgacatgacgaatctggaacttcaaaagacagcaaatgaaattcgcaaaagcattgtaacagcggtgcacagtgcaaaagcgggacacccgggcggatcgctctcggcggcagatattttcacatatctgtactttgaggagctgaacattgatccgaagaatccgaagatggcggatcgtgaccggtttgtgttgtccaaaggacacacggcacccggactttacgctgcgcttgcagagcgtggatttttccctaaggaggatctggtgacgctgcgccacacaggatcatatctgcagggacatccggatatgaagcatattccgggcgtggatatgtcgagcggttctctgggacaggggctctcggtggcagtgggaatggctgcggcaggaaagtttgataagaaagattaccgtgtatatgcactttgcggtgacggagagatccaggagggacagatctgggaggctgccatgtgggcaggctttaagaagctggataatctggtggtgatcgtggataacaacaacctccagattgacggttccattgacgcggtatgttctccgtacccgatcgacaagaagtttgaggcgttcaatttccatacgatcaacatcaacggaaatgattttgacgagatccgtgcggcttttgcggaggcgcgggcgaccaagggaatgccgacggcgattatcgcaaagacattaaagggaaaaggtgtttcattcatggagaatgccgttgactggcacggaaaagcaccgaatgatgatgaatataagatcgcaatggaagatctggaaaaggcaggtgcagcattatgtcagaattaggaaagaagattgcaaccagagagagttacggcaacgcactggtagagcttggaaaagagcatgaagatctgatcgtgctggacgcggatctggcaggtgcgacaaagaccggcatttttaagaaggcatttccggagcgccactgggacatcggtattgccgaggcgaatatgacaggaatcgcggcaggtcttgcaacctgcggaaaagttccgtttatcagttcttttgcgatgtttgcggcgggcagaaattacgagcaggtgcgcaactcgatcggttacccgcacctcaatgtgaagatcggagcgacccatgcgggaatctccgtgggtgaggacggagcgactcatcagtgcctggaggatctggctttgatgcgcgcgatcccgggaatggtcgtgctcaatccggcggacgatgtggaggcgcgtgcggcagtgcatgcggcgtatgatcacgtgggaccggtgtacctgcgttttggacgactggcggttccggtgtttaatgacgaggcgacctaccagtttgagatcggcaagggaattgtgttaaaagagggaaaagatgtctcggtatttgcaacaggattgtgtgtgaacgaggcgagagaggcggagaagcttctggcagcagacggtattgatgcggagattatcaacatccatacgatcaagccgctggatgaggagctggtacttgcgtccgcagcgaagaccggaaaagtagtaacgatcgaggaacattccgtggtcggcggactgggaagtgccgtatgcgacgtcctttctgagaagcagccgacgaaagtcatgaagatcggtatcaacgatgtgttcggagagtccggtccggctctggaactgattcaaaagtatggactggatgcacagagcatctacgagaaagtaaaggcgtttgtaaaacagaattagagaaaaatgcagataaggccgcggggattgtagcttccccgcggcttttgtgattccgggaaacgttttgccagaagagacggaaagctgtcgaaacattttttcggacaagcccataatatttcaaaatatgcagagggcttgtggtacgatttccccgagaaaaggctgtaaaatccatgtgcgcgtattgcgcggatacgcagccggatgcggaaaggggaatcgtgtggcatgatagagattattcaccaggaacagacggaagaaaaggtacagagggaactgccaagagaaatcaaacagatcgggtcgccggatgcaggggaacggatttatgtggaagataccgtgtaccgcagaatgcatccgcatggcggcgtggaagaaaaaacggcatatgtgctgctgggaaaatttgagaactgcatgggcagagagtgcacgtttgtggaagcggttattccgttgaatgaaatcctgtttgaccgggatattccggtctgggacgatcacacgtgggcgtacatatataagcagttaaagccggagcatgatccgttcgtgattgtgggatgggcgctggatatcaagggacagctccccaatatgacagcgcatctggaggcgctgcatcaacggaatttcggtggaaagcgccagattctttttctgatggacagcctggaatgtgaggaggcggtctacggcagccggaacgggcacctgtacagaagagatggattttacatttattaccagcacaggcaggtgccagaggagaacgacctctggaaaaaagaggaaaaagaattttaccgggaaatggatgtggaaggggaagagaagccaaaaccggcagtgccagtaagcgccggggagcgggaagcaccggcagacatggaaaaaacgtcggacgataatgaaagtgcaggaatataccgaggtctttaccgcaggaggatacaacaggaagccgggcggcaggaggcccgggaaagacccgcgtatgcagctacagttttgctgggggcggttgtgtgcgtgcttggtgtgaccgcatatctgaatcatgaaaagatggcggagatggaacagacgctcgcacagatgaagggaacccggtatgtgacagaagcgcagacggcggacacgggggcggaagagacagagcggatgccgtctgtggcggtagagacggtgatggggaatgtcgaaaaacaggaactgtctgcggaagcggcaggaacacaggaagatgttgcggcgcagcaggcggagacggcgcagggagcacaggggacggcagagtcagcggaaaatgcaacggcaaatgcagcagcaggaactgcagcgggaacggaaactgcgggggatacggcggcagccggtggacaggcatgcgcagacgtagcgggcacgtcggtggaggcgcagacgcagagcacggcatccacggacgggagcctggcggcacagacccagggcacgacgacagctgccgggaatgaatccgtggagaatacacaggaggcggcaacacagaccgaggcgcagatgtatctgtcacagggatattacgatgtgcagaagggagacagccttgtgggaatctgccggaaaatatatcagacgacggcaatgctggacaagctctgtgaggtcaacggcattgaggatgaaaatgccatctacgccggtcagcgtctgattctgccgaattaaaaaaatagtgaaacgggaatacacacatgctataatgtccataagcagttgaaggataggcagcatagaaacgaggaagtatggcagaaaaaaacaaaagcggatttcatacggtaggggataccgatatggaggaatataaccgtaaaataaaggaacatcgcagaaaggttctgcgccgcaccgtgattgtgacggcggtcattcttctggtactgaccggactgggactttacatggcgctccgccattatgaaaactatgacattatgtcaaccgcggagcggtcggatacggatgcgacacattttacggaatttcagggaaatattttaaaatacagcaatgacggggcattttatctggatgccgcgaatgaactgatctggaaccagacgtatgagatgtcgtcgccgaagctggatacctgcggaaattatctgagcatctacgacaagggcgggacaaaaatttatatcttaacaccgacgaagcttgtgggaagcattgagacaaccatgcagattcagcaggtatgcgtggcggagcaggggacagtcgcggttctgatgaaaaaagacaaggcggcgtaccttgcgctgtatgacagagagggcaacagcctggcggaaggggagatccacggccagaacgggggatacccgatcgccattgcgctttccaatgatgcggtaaagctggcggtatccatgatcaatatcaatgaaggaagcgtcaagagcacaattgcgttttataattatggcacggttggccagaacgaaatcgatcactgtgtgggtgtgaataattacgatgatatggtcattccagagatggagtttacctccaacgaccggatggttgtgttcggcgatacgaaagcagtgatctttgagggcgcgcagaagccgcaggcaatcgcggagatcccgatggatgagaagacaaaaagtattttttacaatgagcactatatcggaatcgtgaccggcaatgaggatgaggcggtgaccaatcatctggcggtgtatgatgaaaacggaaagctggtcatggaaaaggatttcggtctggactacagcagtatcgaatttttgaccaataatgagatctgtatccggaacgcaaatgtctgcgacatctatacggtgcatggtgtttataagtttcaccatgagtttgaagaagaactttttgagattataccgggaaaattaaaattgaactacacgcttgtgctcaaagatacgacacagcggatcagattaaaataaggaggagattatgaactgggtattgatgcttgtcctcctggtgttggtgtgctgtgcaatctacggctacacaaagggatttttaaggattgttttttcacttgtcgcatgggtgattgtgctggtgtttgtctcgtgggcaacgccgcatgtcagccagtggatacaggagaatacaaccatttacaaaaaaatagaagctgcgtgtgaggaatctgtgcggcgtgcggcgcagggaaagatggaagaaggcgcagtggaacagtacggagaagccgggggactggggctggatcttccggaatctgtgatggcgcagatcgtttcgggggcttccggcgtagcggacactgtgcttgcggagaccggagtatatgcagggatcgcgcagagcctggcaggatttatcgtgcagggaattgcgtttgtgacggtgctgattctctcgtggattctggtgcacgtgatctcggcgctgcttggaatcgtatcgcatattccgatattaaaaggtgtgaaccgctttacgggaatgttagcggggctgatgcagggacttcttattgtgtggattgcgttttacatagttgccctttgcagtgcgggagagacagggagagtgattgtttcctatataaatcagagcgcatttctgaaagaactgtatgaaaataatattcttctgtctctgggaacgggttttgcacgctaaaaggcatgaattacaagggctgccgacagtgaggggaaaatccgtgaaaactttttaaaaaaactgtaaaaagagtgttgacaatctgagatgcagatggtagtatatacaagctgaccgcgagaacagcggacaggcaaagcgcttctgaaaaagaagcaaaagaaaataaaaaaagttgttgacaaacggttgatagtatgatatagtaaataagctgtcgccgagagatgacaacagcgagtgaggttgaaaaatccactcagaagttgcggagcaacttctaatgacagcgcgaagcgctggctgtacattgataactgaacagtgaataaaccttgaaagatcctaaatttcaagctgtcgatcaagagattga

SEQ ID NO: 11554 - DNA, 2281 bp, Unknown
  gut microbiota DNA sequence
acgtgtgctcttccgatctgtgaacgatgagcgttccaagcgggattccctgaccaagctctacaaccatgaaagcttttatgaggagttagagtattaccagagaaggtacgaggagaaccgggagcgtttttcgcttgcggtgatcgatattgataattttaagaatgtcaatgatacctacggacatgcgtttggagatgtcgttttaaaagaagtggcagacatctgcgccagacacaaaggcgcggcgggattctgtgcccgctatggcggcgaggagtttgccatcatatttaagggagcgggagtcggacaggcggaagagatggcggagcagatccggcaggagtttgaacagaaaatgtttacaacgccgcagggggagcggtcgttttccgtaagcatcggtgtggcggagtacgacagggcttatccgggtgccagcgcgttttttgaagtggcggacgctgctctttaccgcgcaaaaagagagggcaagaatcaggtgagacgatgaaagtattgttgacggcggtgaatgcaaaatacattcactcaaatctggcagtgtacgatctgcgtgcctatgcggaggcttatggcaccggcggggcgcaggtggagatcggggaatatacgattaaccatacgatagactacatattggaaggaatctataaggcaaagccagatgtgctttgcttttcctgttatatctggaatctggattatgtggaacagctgatggacgagtaccacaagatctgtcccgaagtgccgatctgggtcggaggcccggaagtgtcttatgagacggaggcgtttctaaaagcgcatccgcaggtgaccggggcaatggttggcgagggagaagagacttttctggaactgtgtgagaactacgcaaaagcgggtgccggagcgaaggcggggaaggtggatttcccgggaatcaagggaatcatgtaccgtgccggagagagcctcgtaaaaaccggagcgcgcgagccgctggatttaaaccggattccgttctgctacggagccgttgaagatttccggaaccgcatcatctattatgaatcgagcagaggatgtccgttccggtgcagctactgtctttcctcggtggaaaagacactgcggttccgggatgtggagcgggtgaaaaaagaactggcattttttttggagcaggaggtcgcgcaggtgaagtttgtggaccgcacctttaactgcaggcatgaacatgccatggagatctggaagtttttaatcgaacatgataatggcgtgaccaacttccattttgagatatctgccgatcttctgacggatgaggagattgcgctgatcggtcagatgcggccgggactgatccagctggagatcggcgtgcagtccacgaacgacgccacaatcaccgagattcaccggacgatgcatctggaccgcctgaaagcggtagtaaggagcatccaggaaaaagagaatattcacgagcatctggatctgatcgcaggtctgccctatgagggctatgagacatttgcgcgttcgtttgatgagatttacgcgttaaagcccaatcagcttcagcttggatttttaaaagtgctaaaaggttcttacatgtatgagcatgccacagagtatggacttgtctaccggagcagaccgccgtatgaggtgcttaagacaaactggcttaagttcggggagatccttcgcatccggcaggtggaagagatgctcgaggtgtattacaacagcggacagtacgccacagcaatccggcttctggagacgcagtatgcgagtgcgtttgccatgtttgcggaactgggaactttttatgaggagcacggttattttggaatgggtcattccaggatgcgcagggcggagattctgttggaatttgcaaaagagcgtaagccgggactgcttccggtgcttggtgagggtctggtatatgacctgtatgaaagagagaatctcggaagcagaccttcgtgggcagcggatgcaaatgagtggaaacagattgcgtgccggtatggaaaaaaaggcaagcagtcgcacattgagcggtttttctaccggttttccggccacaggcaggataccgcatcgctcccggagaggctggaggaaccggtctatgtgagatttgactataccggaagggatccgctcgatcaccaggcgcggcatgaatatctggagccttccggggaataaccggaaagaggggagaatagattgttagaggatt

SEQ ID NO: 11555 - DNA, 7640 bp, Unknown
  gut microbiota DNA sequence
gctgtggttccatgaccagctccggctccgcttccatatccggcttctgcgctgctgcagctgccgtgctttctgcaattttgctctccaacgccgcattctggcttaccagttcgtccatccggctctcaatagcggcaagcgtctgtgccttttcctcggcaaccgtctccttcactgcctgaagtccctcagtaatctccttaagccctgcggtaatctcctttaatttctcagcaaattcctgctgctttaagacgagttccttaacggaatcatccatcatgttctgctgctttccggcaaactgctcgaatccagcatccatgctctcctttaactgtaagagattgtccactacgcggtcgttggaattcataagtgcatctgcattttccttgcttctggtaatggtcaccttggcgatcgccttctgcgctgtgatgatctcttcgcccggctccctggtattgcggtcaaccgcctccagctgctccgagattttcttgagcatcagatatgacgccttttccccgcgaagcatcctctcatattcgtcttttacctgctccccggtcttatgtatctcctttaataaggcagcgatgaatacataagtacaggcgagaattgctgctcccagaatgatctgcaccagatatacccggggcaggttgacgataaaatacatttcaatcaacagcagcaccgttgctcccagcaaaaagaccggcgcaagcggcataccctttttctcacgtggctgattctctttcttatccatagtgtgtcctccgtggctttcctgtccatccctggcaacaggcattttatagtgttatattatcacagaacgcaaaaaacataaacggattttcttgttattttatgctgcagattttataatatatttcggacttattttcacattttttatacctttacaacagatatggagattatagcatgaacgaaacctcttccaagaacgaaatcacatccggtatcatctggaaacaacttcttttatttttctttcctattttactgggttctttttttcaacagctttacaacacgatcgacgccgtcattgtgggacgctttgtcgggaaaaatgcacttgccgcggtcgccggttcctccggaatggtcatcaacctgctggtcaacttttttaccgggctgactgccggtgcttccgtcatcgtctcccagttcttcggatccggggaccgcaaaaaggtggacgacagtattcatacgatctatgccttctccatcatcggcagcgtcatcatgacactgatcggcatcactgctgccccggcgcttcttcgactgatgaatacgccggaagaactgatgagtgattccattctctatctgcgcatctattttgccggtatcttcttcgtgtttatttacaatactggagccggcctgctgcgcgcgctgggagattccagacgtccgctgtactgtctgatgatctgctgcgtcatcaatattgttctcgacctgctcctgatcgtcgggctgggactcggtgttgccggtgcggcggtcgccacgcttctctcgcaggggatcagcgccgtgatcgtcaccgtttttctgatgcgccagaaagatctctgcgatttttccttaaaagagatccatatccacccgagacttctcaaatcagagctgcttttgggactgccgggtggatttcagtatgccatgtacagcatttccaacatgattatccagtccgcgctcaacaaattcggaaccgacaccgttgccgcatgggcggcttacggaaaactggacgcaatcgtctggatggtcagcggtgctttcggtattgccatcacaactttcgtcggtcagaactacggcgccgggaagtatgaccgcgtcagaaaaagtatccgcgtgtgtatcggcatggactttgctgccgccatccttctgatgctggtgctcgtatgcttccgcattccgctcttccacatttttgtgaccgatgaaaatgtcgtggagatcggactgaaaatgatggcgaccatggctccgttttactggctgttcgtctttaccgaggtcttctccggtgcgctgcgcggcatgggcgatgtcgtcgttccgatgctcatcacaaccggcggtatctgcctgttccgtgtggtatggattttcggagtggttgccctcttcccgacgctcaccgtaacgctcctcaattatccggtgtcctggattttgacatccgttctgtttctgttttactatcatttccggatgaagaagctgaccgcgcactgattgctccggcatctcttacttctctctgctttttgcgaagctgaccgggcggcatgccgtaggcttccttaaagctgcgcagaaacaccttatagttggtaattccatttttattcattaaataagtaatactctcgtccgtctgcagcagatcactgtgaaaatactgcaggcggatttggtttacataagtcaaaaatgtctggccggtgtactttttaaacagacggcaaaaatattccggcgtaagtgacagttcatctgccgtctcttttaaagtaatggggttcgtgtaatttcttttcacatactgcatgctctgctcgatccgctcaaaatctctcctgaagcggtggcgcagcacatgatcgaccgtggccgcatcctttgtatacagcagatacagcagcttataaaccgctgcaagaaatagcagatgcgtaccgtccgccgcctgctcctgcaggcatttcatttcttccagcttctgtgacatccggcaattcacggatgcggtctcctccgaatacggaacatattccccgaaatgcagtccccgccagtcctcactgacgcgctttaaatgctccggcggaatctgcagcagatagtaatgcccgtccccgtggacatgcgtgtagtgaatgtctctcggattgacaacgagaatatctccctgctgcagttcatacgacgtctcattgatgtacgctgtcattgccccgtgctgcatacagatcatttccagatgctcatgccagtgtgctggcagcaattcattcgacgcgtcgacctgcgtaaaatagagctgcatcagcccgtcatcggatataatctcatgttccccctgctgcactcccgctccctctctttcctgctctctccgtgtttttcacatgcacggacttctctttctcccatcataccttcagaaggaaaaaatatcaatatcgacccatatttctgccaaaattcgatctataacaaacggaattatctgcttataatacgaacatagacaatgttccatgatggaaaatatcaaaataatatcaggcgtaagccggaaaagaggtcaaaatgaagaaatggaccagagtgatgtatcagccaaaccgtccgttaaaagagggctgttacgtgactgcttccaaagaacacatcgcactttccagggaagctgcagcagagggtatggttctcttaaagaacgagcacaatctgctgccgttaaaagcaggcagccggattgcactctttggaaaaggcagttttgattatgtcaagggaggcggcggcagcggcgatgtgaccgtatcgtatgtgcacaatctctacgatggctttcagatgctccacgatgccgtctccctctacgagccgctgtgcgatttctaccgcgccaatgtgaacgaacagtacgatcagggttccgttcccggcatgacgacagagccggcgctctccgcagaacttctcgccggcgccagtgcctataccgatacggctgtgatcgtattgagccgtttttccggagagggctgggaccgctccagcatcgaatacaacggagaatataatccgtgggagacagagaccagcatgccgaaaatctccggagagatcttcccggacggcgacttctatctcacaaaggaagaatccgccatgatcgcacaggtaaagcagcatttttccagaattgcggtcgtcttaaatatcggcggcatcatcgatacctcctggatcaaaaatgacgatcagatctcctccgcgctcatcgcatggcagggcggcatggagggcggacttgccatggcggaactgctgtgtggaaaggtatccccatccggcaagcttccggacaccttcgccgcttccgtggacgactatccttccaccgcggattttcacgaatcggttgactatgtggactatactgaggatatctatgtgggctaccgctattttgagacatttccggatgcggcaaaacgcgtatgctatccgttcggattcggactttcctacacccagttctcccttacggtgcagagtgtgaccgaaaccgcgcaggccatccgcgcttttgtccttgtcacaaacaccggagattacagtggaaaagaagtcgtgcagatgtattacagtgcgccgcagggacttttgcagaaaccggcgcgcgaactttccgctttttgtaaaacaagaatgcttctcccgggcgaaagccagcttctgacgctcgagacagcaaaggattccatggcttcctacgatgatctgggaaaaatttttaaatcctcctacatactggaaaagggagactaccatttttacatcggaacttccgtccgggatgtcacagcgctggattatgtcatgacgctcgacgccaatctgctggtagagcagctctcctccaaagccgcacctacaagcttgaagaagcgcctactcgcagacggaagctacgaagaacttccgcagggaactgccaacgatccgaatgcctgtgtttttgaaaaaatgataccgggcaccgaggaagcactcgccccggcaacacgcgggcgcgcatcctaccttctgctgaattcctataaagaaaacgcacatccgctgatcgatgtttacgagggaaagatttccctggatgaatttaccgcccagctggacgacgatgatctgattcatctgctcggcggccagccgaatacctctgtcgcgaatacctacggctacggcaatcttccggaatacggcgttccaaatatcatgaccgccgacggtcctgccggtctgcgcatcaccccgcagtgtgaggtctgcacaacggcatggccatgcgccacactgctcgcctccacctggaatcctgccctggttgagcaggtcggaaccgcaggcgccgaggaagtaaaagagaacaatatcgccgtatggctgacaccggcggtcaacattcaccgcaatcctctctgcggaagaaattttgaatactattcggaagatccgctgctcaccggcaaaatgggcgcagccatggtgcgcggcatccagtcgcagcacatcggcgcagccgtgaagcattttgcatgcaacaacaaggagaccaaccgcaagcacagcgactcccgcgtctccgagcgcgcactccgcgagatctacttaaaggcatttgaaatcatcgtgaaggaagccgatccgtgggtcatcatgtccgcttacaatatgatcaacggccaccgcgcttcggaaaatcacgatctgctcgaaggcatcctgcgtgacgagtggcattttcaaggaatggtaacctccgactggtggacgagaggggaacattacaaggagatcaaagccggaaatgacgtgaagatggcgtgcggtttcccggagcgtgtaaaaaaagcgatggaacttggtgaactggatcgaagtgatctggagcgctgcgcaaagcgcgtacttgatctgatcttaaagatcgattagaaaactcattcttcctgctgtagctaaaaagacggaagcctctcacagagactcccgcctttttgcttttcgactatagatattttccgatatggattcaaccgcaacagctcctgcttcctccccgcctctctggaagtttttgttgcagtcaatccgtgcggttccattggcagctgcagctacttcttcgtttctgcagaatccatacaaccgttgcaggatgcagcgattctatcatccggccacgattttctaagcgccgcataggaaatcaggaagtttgccaaccagcccgccggtacggcaagccagacaaatgcaataccaaagcgcggtgcaaaaatcaaagcaaccgacagacggatcgcaaggtttaccatattagctataagaaatggacgcatgattccaagtccacgcaaaactccatccgttgccatcttaatacccatgaaaataaagaaatagccaagccatctcatgtaatccccggatacctgatatgcgaaagcagttccgtcttttcccagaaataatgaagaaatctgggtgtgtagtgtttcaataattataaaagccagaactgcaaagcacagatctaacaccagtgcagcgtgataaccttttttaatacgcccgattttctgagcaccaagattctgggacacatacggcgaaactgcattgccaatggacacaaatatcagtgcgaaaacattctctactctcattgttgccgaataacctgcgagtgcctgtgtaccaaatgggtttacaactgcctgcacgatcatcatgcctattgatactgtggactgctggagaactgacggtatggcaatccggagcatataatgtaactcatgtccgtcaaaccagtgaaatggactcttatattggcgcatccggtaaaaaaagatcacgaatgaaaatactgcagaaatgccctgtgcgatcaaagttgcaagggctgcaccaaatacacccaatccaagtcctgccaccatccaaagatccataataatattcaaaacagaagaaaatatcagcagccccaacggaatctttgattccccgattgaggtgaacatcgtcgaaaggatattgtacataaataaaaacggaaatcccacaaaatatacccgcagatacagtacagcttcctccagtatgtcagtgggcgtttgtaaaaggctcatcatcggatgggaaaaacgaaagccgaatacaccaagaagtatgcttaggatcagaaagctgatcaaagatgtcgacacaatcgttttcattttgccgtaatctctggcaccaaaatagcggcttaccagtacgcctgcaccgacaccggcaccaagtgccacacaaataaatacattcgtaagtgccgcgcatgcaccgacagccgcaagtgcagacgaaccaacatactgaccgacaataatggaatccgccatattataaacctgttgaaaaaagcttcccagaatcataggcattgcaaaaacagtcagcgctttgagtggggcatctgtgatcaggtattcatcttttgacattattttatttctcctaaattcctgcttttatctgggatttctgccacgatttattccagcgtcaatacatcggccggcatcaggtattctaaaatggcatggaatatcgatgcttactgttccaccagctcctcataaaaccggtaattgttcttgccgttctgtttgacataatacaatgccttgtccgctcttatatagtattcttcaaagctttctccctgtctgcacatgcacagaccaccgcattctccatgcactctgtga

SEQ ID NO: 11556 - DNA, 2158 bp, Unknown
  gut microbiota DNA sequence
ctgagcgcataatcccccgccttatgtccatagacatcattgatcttcttgagattatccatatccacaaatcccagacagccatcatgctcctgcattttttcaataatcagtgtctcacctttatgacgcatgggaagtcctgtcaggtaatccaaggtttcccgggcctctttctgtcgtgccagctccagctcgcggatgcggtccatcgtctggatcagagtaacgaccagcagagccaccagcccgattgcgataaagattccggacagagacacaacacgatacaccgctgtcatctccagcatgactgcgatcatggcagctaccagtccgatcagtggaagcttgtaatgtttcgctgttcccttgatgagatcccggcagatggtgataaatatcgtcagaaacgttcctgcgatcactatgtggcacaagaacattgtcgaaataaaatctgcgatattcagtacttgtaagaccgtgcatatcacaaaattcacacaaatgatacactctgccacatgatagaccttccggtatcttccctgctgcacactatcaatatagaacatgatcggaatcgggcagatcatcacaacaaggaagcacatattcgacagaatggaagcattgggaacaaacagctgacgcagcttcgattctcccagcatccacactgctcccaggatcatgcaccatcccagatactccagatcaaatcttgtcttgtatataatatcgagcaccagactgatgatcagcacgaccagtccggaaaacaacatagtgcaggcgatcagagttactataaaataacagtgaaacatataggtccagatatctgatttatccccgcaatataccgtgttgacgacaccggaatacttttcagtaaaagactgcagttcgatccgcacttcctgccccgcatcctcacttgatgtctcgcagaacacatacccgctggcagaatttttcccgaagggtctggtattcttcgtatcatacaccgtcctcagttcccctccgatataaatgcgcacattctccatagaggatctgatggcgatcgtattttcattatagtcctgtgggagcactgaccggatgactaaaagctcaccggcaggcacatcataccggtccggaacccggatctcctcttctgttccgtctggcaattcccggtaaaaggttccggcataagtaatgctttcctccgtgaccggttccctctcactggggtaaatgctctgccccaaaaaaaatgctgcaagcagcacaagtatcaccacataaaataaaattcttttatacttatggatcgtatatttctcttctgtcatttttattacctaatattaaataattccggggcattttccctgcttttatgacgatattggggtgcagtccaaaaatctttcacccgctcatgaacaagtttatcacaggaggcaggaaaagtaactatctattttactctgtagacggagatatttcgccctgcttattcttgtagcagccaatcggctatatcgtgaatttcgattccttcatagctatattttggatgtttggttctggcaataatcattttcggataagcatctcggatctgaagcagaggagagcattctctctcaaatgtttcctgcccggaaatgttgtcgctgacctgaatataaatcttctcgctgcctctctgagcaacaaagtcgatctccttttgatagagcttgccgacatagacatcgtatccacggcgaagaagttcgatgcaaacgatgttttcatatactctgccgtaatccatatttctgcttcccagtattgcatatcgaataccgctgtcacacaaatagaacttttcagagctttcaaggtatttcttgcctcggatgtcgtatctcttaatatcataaaatacaaaagcattgcacaaatacttaatatacttgccgacggttacatgattggttggagtctcatttgctgtcagcagctgactgaccttgttaggagaagtcagattgctgatattgtccatcaagaactcgctcagacgctgcaaaaccaaagtgtccggcagagcatatttctgtactaagtcccgtgtaacaatggtttcgtagacttcttttatatagtt

SEQ ID NO: 11557 - DNA, 287 bp, Unknown
  gut microbiota DNA sequence
gtatctcttaatatcataaaatacaaaagcattgcacaaatacttaatgtacttgccgacggttacatgattggtcggagtctcatttgctgtcagcagctgactgaccttattaggagaagtcaggttgctgatattatccataaggaactcgctcagacgctgtaaaaccaaagtgtccgggagcgcatatttctgcaccaaatcccttgtaacaatcgtttcgtagagctctttgatatagtttgttctgtctttttcgattctgtaagcgtaagaacctgcta

SEQ ID NO: 11558 - DNA, 6053 bp, Unknown
  gut microbiota DNA sequence
ggttatatttttttacgtactaaatggtgtaccaaacatacaccgccccggaaatattcctcaaatattccgcggttagtataatttttcataactcataccttccggcgcaaacaccaaacgccgggaggtactccccgggtataacgaattttcatccatatgaatttttgctgccatatatttcacaacatttctctgaccgcagatgtcagcgcatctgttgtcaaaaaaggcactgtatgccgcgtgttttccacgtttgcgtccagtgccttctccttatttccactatttttccagatatttcttgacatactgtccggtgtaggactccggtatctgcgccacctcttccggcgttccctgcgcgatgaccgttccgccgccgtctccgccttccggtcccatgtcgatgatgtaatccgccgtcttgattacgtccagattgtgctcaataactaccacggtattgccgccgtcggacaatctccgcaaaatctcgatcagcttgtgcacatccgcaaaatgaagtccggtcgtcggctcatccaaaatgtagatcgtctttccggtgcttcgcttggagagttcggttgccagcttgattcgctgcgcctctcctcccgaaagctctgtggacggctgtcccagttttacataggaaagtcccacatcgtagagcgtctgaatcttgcggtggatggacggcacatttttaaaaaactccagcgcctcctccaccgtcatatccagcacatcataaatgctttttcctttatacttgacctcaagcgtctcccggttgtaccgctttccctcgcagacctcgcacggcacatagacatccggcaggaaatgcatctcaatctttaagattccatcccctccgcacgcctcgcagcgtccgccttttacgttgaagctgaatcttccctttttgtagcccttcgcctttgcatccggggtcgccgcaaacagatcgcggatcatatcgaacacgcccgtgtaagttgccgggtttgaccgcggcgttctgccgatcggcgactggtcaatatcaatcaccttatccagctgctccatgccaagaatctcatcatgctctcccggaatgcagcgcgcccggttcaggtcgcgcgccagccgcttatagagaatctcattggtcagggagctctttcccgagccggacacgccggtaatgcaggtcataatcccgagcggtatgttcacatcgatgtttttcaggttgttctcccgtgcgcctttgatcgtcagaaatcccgtcggttttctgcgctcatccggtaccgggatcttgattctgccgcttaagtacgctcccgtgatcgacttcggattcttcatgatctcctgtgccgtaccgcaggcgaccacttctccaccgtgtgagccggctcccggtccgatatccacaatatagtccgcggcaagcatcgtatcctcgtcgtgctccacgacaatcagcgtgttgccgagatcttttaaattcttcagcgcccccagcagcttatcgttatcgcgctgatgcagtccgatcgatggctcatccagaatgtacgcaaccccgaccagcccggaaccgatctgcgtcgccagacggatacgctgtgcctctcctcccgagagggtaccggtcgctctggacagggacagataatccagtcccacctcattcaggaatccgacgcgtgcacggatctcttttaaaatctgatcgccgatccggtgctgctgctcccccagcttcatctccgccagaaaggcattgagattcttcaccgacatggaagtcatctcataaatatttttatccgcaaccgtcactgccagagactctgctttcagccgctgtcccttacaggtctcgcagggggtaatccgcatgaactgctcatattcctgcttcatgacctccgaaccggtctcccggtacttgcgctgcacgtttttgatcagtccctcaaaggcaacatcataaacgccttccccgcgctgtcctctgtaatggactttcacttccctgccgtccgttccgtagatcaggacatggcggatttcctccgggtattcgcagtacggcgtctccagcgaaaaatgatactcctccgtcagcgcctttaaaatagcgtatgtgaaactggacggatctgtacaggactgccagcccatcacctggatggcgccttccgcgatcgagagacgtttatccggaatcatcagatcctcatcgaattccattttataaccaagtccgaaacaggtcgggcacgcgccgaacggattgttgaaggaaaaacttctcggttcaatctcgccgatgctgatcccgcagtccgggcaggaaaagctctccgagaactgaatcggttcaccgccgatcacatccacggtcatgagtccgtttgccagtgtaagcacattctcgatggaatccgccaggcgcttctcaattccttcctttaccatgagacggtccaccacgatctcgatattgtgctttttattcttgtccagtttgatctcttccgacagttcatacatgctgccgtcgacaatcacacgcacataaccacttcgcttcgcctgctcaaacagcttctgatgctcgccctttctgccgcgcacaaccggcgccagcagctggatcttcgtgcgctccggcagtcccatgatctgatcgaccatctggtcaaccgtctgctttttgatctcttttccacacttcgggcaatgcggcacaccgatccgcgcatagagcagccggaagtagtcgtagatctccgtcaccgttcccaccgtcgagcggggattgcggttcgttgacttctgatcgatcgagattgccggcgacaatccctcaatcttctcgacattcggcttttccatctgccccaggaactgccttgcataggaagacagcgactccatatagcgccgctgtccttcggcatagattgtatcaaacgcgagggacgattttcccgatcccgacaatccggtcagtacgacaaattcatctctcggaatatccacatcgatatttttgaggttgtgctcattcgctcctctgattttaatatattttctttcggatgttttcttcattgtcttatcctttctacaggtcacgcagcatccctttgagttcgatcatcttgtcgcggtattccgccgccgcctcgaaattgagatccgccgccgctttttccatctttttctggatatcggcgatcagcttcgtcagttcctccttgttcatcgactccggggacttcttgaaattcatttcttcttttgcgatcttcttggaaacagaaatcagttcccgcaccgacttctggatcgtcgtcggtgtaatgccatgtgcctcgttgtactcctgctggatcttgcggcgccgctccgtctcctcgatcgcaacgcgcatggaatccgtaatcgtatccgcgtacatgatcacatgtccctcactgttgcgcgccgccctgccgatagtctggatcagcgacgtctcagaacgcaggaagccttccttgtccgcatccaggattgccaccagggtaatctccggtatgtccaatccctcacgcagaaggttgatgcccaccagcacatcgaacacatccagacgcagatcgcggataatctccgcgcgctctaacgtatcaatatcggaatggagatatttgacgcgaatccccagttccctcatgtaatcggtcagatcctccgccatttttttcgtcagggtcgtaatcagcaccttgtggtggttcttgatctccttgttgacctcacccaccagatcatcaatctgcccctctaccgggcgcaccacaacctccggatcgagcagtcccgtcggccggataatctgctccgcgcgcaaaagttcatgctcatcctcgtatacgttcggcgtcgccgaaacgaacagcatctggtcgatcttgccctcaaattcctcaaaattcagcgggcggttatccttcgcagacggcagccggaacccgtaatccaccagcgtgctctttcgtgactgatcccccgcatacattccgcggatctgcggaattgtgatatgggactcatccacaataatcagataatcatccttaaagtaatccatcagtgtgtgcggcgtcgctcccgccggaagccccgccagatgcctggagtagttctctatgccgctgcagaatcccgtctcttttaacatctcaatgtcaaaattcgtgcgctccgcgattctctgtgcctccagcagcttgtcctcgcccttaaaatatttcacgcgctcttccaactccgcctcgatattatcgcacgctcttaaaatcttttcctgcggcacaacgtagtgggaagccggaaataccgcaaaatgctcgagccggcacttaatctcgccggtcagcacatcaatctccgttatgcggtcaatctcatccccgaaaaactccacgcggatcgccgtatcgccatagtttgccgggaatatctcaagcacatccccgcggacccggaacgtgccgcgatgaaaatccatctcatttcgcgtgtactgaatatcgatcagcgcacggatgacctcgtccctgtccttctccatgcccgggcgcaacgataccatcatgccaaggtaatcctccgggctgcccagaccatagatacaggaaaccgatgccacaacgatcacatctctccgctccacaagcgcagccgtggcagacaggcgcagtttatctatctcctcattgatcgccgagtcttttgcgatataggtatccgtctgcggcacatacgcctccggctgataataatcatagtatgacacaaaatactcgactgcattctccgggaaaaattccttcatctccccgtagagctgcgccgccagtgttttattgtgagaaataatcagtgtcggccggttcagctgttcgatgacgttcgccatcgtaaaggtcttacccgaacccgtcacgccgagcagcgtctcaaactggttgccctcacggaatccgcgcaccagttcttcaatcgcctgcggctggtctccggtcggcttgtatttggaatgtaatttaaaatgatccacttgcaaatctccttttatgttctcataaaaaatagaaagcgccctttcccggctgtgcagtacatgtccggaaaatctttgatgctgcaaatcggaaattaccaacgcttcatgttcttctcaaacttcccggtatatgcctgcttcaattcatctgccgtaattccgtaacagagcatgacatcattgtagtacataagaacatctgccatttcctcaaccagatcttttctcaattcttcctgtgtcagggcattcactgcaccatgcttcttgacaatatcaatcacttcacctatttcaccaaccatccaaagcatcttgttctgtcctgtttccggacagatcggttcccatctgtccttgtacttatcctgtaatgcctgctgcatttcctgcatttcgtttatactaaaatcttccataccacattcctcccctgaaatagttctgcaaatcagaaattttcacttttatgcagcttaacaagctgaaccttgccatccattttaacatccttggcaacaaaatcatacttctcaaacaatgaaattctgcaagtggaaagttataccgttatttcaatctgattttcctctattgcaacaacacagctttcataatagccatcgcctgttgtgcgtggaccactgtcgaccggatatcctgcttcttccagtttcattgtcaattcatccactttttctttactgccgacgctgaaagcaatatggattagacctgttcggttaagtgttttcttcacatcctccatatccggcttattcattatctcaagtctcgaaccgccctcaaaagcaagaaaatatggcctgatttttcagtctatctctcgttccaacagcccctaacaatcatgatttttccgattctgcaaacttgaatttcatgcgctatttgttta

SEQ ID NO: 11559 - DNA, 8967 bp, Unknown
  gut microbiota DNA sequence
ctcgtttcgcatgtttttacaatctcatttggttctatgcatatttttacactatgttttatttgttttttctactttttcttctattctgtgctgtttttctgtcatttttcattttttgatcccaattttttcatgactaaatatgcagttttctttttccatgtttttccacgcaaaaaatcccggaacggattttactctccgttccgggatttctctttcctgtataagtatgcatcacctgcagtcatacataccggtcagttcttatgatgttatgctgtctttgttgcgtacatgaagtacttcataccgaatatcgttgcgtagataccggttacgttagacttctgcatgtaaatatcattgtagtagtagatcggaactactgcccatgtatccatcagcatatcctctgcctgatgcattaagtcaacacgcgctgcaaaatctgttgtggtgcggatctgattgatcagctcatcatatgctgtccagtccggagaagaagataccggagtaccctttcctaactgcatatcgttgttaccggaatcagaggtaaagatctctaacatgttaaccgggtcgttataatctgcaagccatccctcacgcgcgatggtgaagttaccgctcttacgatcctcaaggaatacattccagtcctcagacttgatctcaaggttgataccaagtaatgcaacatcctgctgtacggactcagcaaccgcaatgtgtgctgtaccgtcgtttgttaagtatgtcatggagattgccggatctactgcgtatgtaccgtcaccgttgtctgtaaatgtatatccagcctcttccagtaagccctttgctgtctcaagctcgccggcaccggtagctgttgcatcatagtaagaagtatctgctgtcttgaatacgccgccgttaccgtctgccataccttccggtacgaaagaatcagccgggatctgacctgtctggcctacgttctcaacgatgaactgacggtcaaccagtaagctgattgcctcacgcatcttagcagcctcttcctctgtcttgccatcgaagaccgggtcgtttacgttgaagccgatgtaataggttcccaggttgtcaaggataccaaactctggattgacgccgtttaaggaaggaatctcatcgttcggtacggtatcgatgtagtcaaggtcaccgctgttgtatgcagcatagattgctgtatcatcagcgcttaacatgaagtgaagctcgtccatggttacgtttgccgcatcatagaagttcgggttctttacataaaccatgctctcgttgtggttccaggactccagtgtgtaagcaccgttgcatacaaaaccagcttcctgtgcccacttgccaggaacagtgccgtccgtatcagcagcctctacggatgcctgatgtactggatagaatgtcgggaatgccagtaagtcgttaaagtacgggcacgggctgacaagcttgatcacgagtgtgtaatcatccggtgtctcaactgccagtgtaccgtcatcgttgcggtcgattacatcgaacagataagcatagtctgctgctgtcttctcatcgatgacacgattccagctgtatacgaagtcagatgcctttaagtcatctccgttgctccacttggactcaatcatgtgaacagtgtactctgttccgtcctcagatacttccggcatatcggttgcgagtgccgggataagattaccatccttatcataggtataaagacctgcgaaagagtttactgcaaggcagccgccgtctacggagctgtttaatgcaggatcaaggtaatccggctcacttgccaggttgatgttgagcacatttgtctcagcgtttgtggttgttgcttctgcagttgctgcagcctctgtgccagcagcagttcctgtggactcgcctgtacttgctgtggaatcagatgatccgccacaagccgtaagaccaagtgccatagaagcaaccagtaatgatgctactaatttcttcataatgaatcctccttgttttccgaaggaaaatgcgactgtcacaacaggagcagaggattttcctcctataaaatgatctatgttccacgtaccttttcggtaacgttgaaaccttacttattccagcatgcaacgaagtgtccgctgcctctgtcggaaagcggcggcatctcttttgcgcactgctctgtcgcgtatttgcatctggtgcggaacggacatccggtcggcatcttcagagggctcggtacatctccctccagcacgatacgcttgctgtgtctggctgtctccggatccggaatcggaaccgctgacagtaagctcaatgtatacggatgcatcgggttgccgtttaactcatcggcatcggcgatctccatcatttttccaaggtacataaccgcaatacggtcggaaatgtggtgaacgaccagcagatcatgcgcgataaacagatacgccacgcccagcttgtcctgcagttcctcgaacatatttaccacctgcgcctgaatggacacatccagtgcggataccggctcgtcacagacgataaacttcgggtttaccgcgagtgctcttgcaataccgatacgctgtctctgtccgccggaaaactcatgtgcataacgcatggcatgctcggcattcagtccaaccagctccatgaggttcaagattttctcacggcgctcttttttattcgcatataatttatgaacatccagaggctctccgatgatgtcctcgaccgtcatacgcgggttcaaggatgaatacggatcctggaataccatctgcatctgtctgcggtaaggaagcatgtccacatccactttcttgccaagcaccggcttgccgtttgcatcgacgatcagcttgccattctcatcatactgttcgccgctgtcaaaaagcaccttaccatcgaacacgatgcgtccggcggtcggctggtacagacgaagcagcgttctgccgacggtcgtcttgccgcatcccgactctcctaccagaccaagtgtctcgcccggcttgattgcaaatgaaatatcatccaccgcttttagcggaatcgtcttaaatccctgatgcacaggaaaatactgttttaaatgacttacctcaagaaggttcttttcctcactcattactctgcctcctcctgtgcctcatataactctttgatgttcatccagcagcttgccagatgggtatcgctgatgcgaagttcttccggtttctcagaaagacagatcttcatcgccgcatcacaccgcgggcagaatgcacagccagccggcatctgcaacaggttgatcggtgtaccgccgatcggcaccagcttttcgttcatattgtctgccttcgggatggaacgaagcagtcccttggtatattcatgtgccggacggtagaaaatatcatccgctgtaccgcgctcgcagacacgtccgccgtacataacaagaatctcatcacacatacttgcaatgacgccgagatcatgggttaccatgataatcgccattccaagcttcttctgcagatcctgcatcagttccagaatctgtgcctgaatcgtcacatcaagtgccgttgtcggctcatctgcaatcaggatatccggctcacagacaagtgccatggcgatcatgacacgctgacgcataccaccggacagctcatgcggatactgcttcatacggctttccggctcattgacgccgaccagtgtcagcatctccaccgcgcgcgcccacgcctcttttttattcttatccgtgtgtaataatattgcctcaatcagctggcttccaacggtaaataccgggtttaagctggtcatcggatcctggaaaatgatggagcatttttctccgcggaacttctgcatctgcttgctgttccatttggtaatgtcctcaccgtggaatcttacctctccgccagtgatcttaccggtctccgccagaatctgcatgatggaatatgcggtaacggatttaccggaaccggactctcctacgattccgagggtctttcccggctctaagttaaaggaaataccattgacagcctttacctcacctgcatctgtaaagaaactggtatgaaggtcttttacttctaatatatatttattttcttcgctcatatccttatctccttaattcaatttcgagtcgaaagcatcacgaagaccatcacccagtaagttcaatgccagcacgatcaggcagatggcgattgcaggaatgaccaatctaagtgggtaggactgcatgccggctctggcatcgtttgccagacttcccagggaagtaagcggtgcagatacaccaaggccaaggaaactcagataactttcggtaaaaattgcactcggcacctgaagtgctgtcgtaataatgataacggacagacagttcggcaggatatgtctgcgcaggattctggcattctttgtaccgatgcatcttgctgccagaacgtactcgttgttcttaatggaaaggatctggcctcggatcagacgcgccatacttacccagtacagaagtccgaatacgataaacatggagatcatgttcgttcccagcttttccagcaccgttccggtaatgagcggttttaacgtctcattaaacactaccgacagcagaatgatgatcagcatgtccggcagggaataaataatatccacaatacgcatcatgatgaggtcgacttttccaccaaagtatcctgcgatggaaccgtaaagcaggccgatgatcaataccatgatcgatgccacaacgccgaccgacaggctgactctcgttccgtagatcacacggataaagtagtcacggcttaagctgtccgttccgaagatatgtggaaacagcttctcgccggtctcgttcatatactttgtctcaagcttggaatattcaaacggtccaaggttcgctgcggatttgtcacgcacaccgttgaccgagataatctcggaatacttgtaaggacatatatgcggtgcgatgatgatggtcagaagaatcaataccagtacgatgatacttcccatggcaagcggattcttgcgcaggcgtctcataccatccttgaaaaatgtggtagactcacccatgacatcctgctgctttttttcctcatctgtcgccttctcgaaatttgccttattgaatttgctcagatctacctgtgccgacagaatctgtctatgtttcaactccattacttctatccgtcctttcgtactttactcaaatgtgattcttggatcgacgaacttatatgcaatatcggtcagcaggtttgccacaaccatcagaattgcgaggaaaattgtcgttgccataatcatcgtatagtcacggttggtaatacttgttacgaaagacgatcccagtcctccgatagtaaaaatattctcaacaaccatggaacctgtcaaaatgtatgcaaccatcggtcccacgtaagtgattaccggaatcagcgcattgcgcagtgcatgtttgaaaatgactttccagcccggaacacccttcgctctcgcggtacggatgtaatcctggttcagggaatccagcatactggtctttgtcagacgtgtgatatacgccatcggataaacactcagcgcgatgatcggcagtacataattcggactcgtggacgaccataccgggaaccagccgagttttaagcagaacaccagaagaagcagtgttgcaagcacgaaggacggcatcgccgtaccaagtgttgtaaaaaatacgatcagccggtccggccagtgattacgcgtcaacgccgcaatgcttccaagtacaagcccagccacgattgccaccaatgcagccatgccgccaagctttgccgataccttaaaacgggaagaaatctcgccccagatatcacggccgctatgtaaagatacgccccagtcaccatgaagaagattgttcatataaatcacatactgctccgggattggtttgtccagattatatctctcttccaggactttctgtgcctccgcactcgttgccttttccttattgaaaggaccgcccgggataatgttcatcacaaagaatgtaatggcactgacgatcaggatggatacaatcgccagtaaaactcgttttacgatatactttcccactttttttctctcctgcttcttgaaaattctttcttgttttatcgctctagcattgcgttcttttatctgtctgtttctctaatgcaatgtcactttaatccgataaaataatataagtgtattatactcgctcactatcatttgtcaactgctaattgtatacaaaaatacatggatattacctcctttttctgtacgcccagtaaatacaagtgtttttcctacataaatactctgtctttttttttagaaatttgttatactttcttcaatcacattatctcttacagaaagaaggcagatccatcatgattcaaaatgatgatattctgaatatgaacttttataaaaaggaaaaatttaccggcagttatcagggaatgcgttacctcatccaaaaagatcaggaggaggatgccgaggacgaaaatgtaaaacatgatatttttcgcgtcaccatctggcccggtccttataattttgccagcaccgcggacgatctgaaaagttctgctgtctttccgtttacgccggagggcaaagagcaggtggtcggctggctgaacgaacagtggagtgcgcgccgcaccgaatggcccggccgttgaatcagtctctttctttatatgagcatctcgctgattcattatcactgcaccgtaacacagcgtcaaaaaaagccacatacgaagtatacatcttcgtacatggcttttcttattctattcctattcacggaaacgcccgtaaaacccgaaaacttcacgccgtattctgcgctctgtctcctgctctactgcgggtaacaggagcttgaaaaggttcaagtcctgtcttccacttttctcctgctctactgcgggtaacaggacttgaacctgcacggtctcccaccagaacctaaatctggcgcgtctgccaattccgccatacccgcttatcagagaaataactgcttcccttggaaagctaccggtatattatagcgtgctggcagacagattgcaacttctttttggatttaagcctccggcttctcatagcgtgtccacactttgtccgcgccgcatacattcttcgtgccgtcctgctgaacgataatataatcgccctcaccgataaaggtacgtcctctgcggtgcttgatgtacgggcacacgatcgtaccgtcgggccgctcaatctttacgagcgaatccgtcacgatccatcccttggtcacaacatcggaaaacagttcaaaaccatcttccatcccttttcccacttcgtatttgtctacttcggactctaacggaattcttcgactcttcataggtctcctccttttccggtgatgctccctgcttaccttccttatattctgaacactttcgtccgccgcatgaaaacgcgggcgtccgtcctggcaccatattcacttctgccttcgcctacattataccatactgtccgaaaatttacatgccttttttcgtactttcgcactattcccatgaaacaacaaaaatccccgtgatgccggaatatgacatcgtggggattttcgctctatatgcctgccgtattccggcagcatttcttatttcttatttcttatttcttatctctttatgatctggcgatccgctccgcctgcgcccttcgcacaaaccggaatgcgccaatgctctcaagcgccttcgctgttgcaaagaagatgacggaatcaatcggccacataatcagattctttaatgcacgcgccggaaggatcaccatgaatgcctgtccatataacacggtgaggcacaatgtattcaggaacacattgcacaccagcatcacgataaacttggtggcaagcaccctcggcagtgtgagtttcttcttataatacatacagccgtacataacgcctgccagcatcgtaaccagtgtcagctgcggacagaacggaccggtcggctttaagatgtatttaataatatcaagcgttccggaaaaaatgccgccaaccgtcggtccaaacaggtaggcaatgattccgttcgggatactcgaaaaaccgatgcggataaaattgccgtattcgatggagaacatgccaagaataatggcgatggctgccagcatagccatggtagtgatggttcttaccgattttaattcacggtaggaatcggtgaacaaagcgacgaattttttcataaaaaaattacctcctttgcagacctcatcatactacaactggagataatattcctatcttcggatgcagcgggatgcgactcatgcaccgcaagaaactcttttcgtctggctgacaactccctgttcagccggcacttaacgcgcatgtgtctactctgcgaacaatatttacttgcaacggtaacagtataacataccttagcggtaatacaataggcaattctcactaagttttgttccaaagtcacaaaaagcggaaaacctttaccggctttccgctctccattccttagtgagacacgggggattcgaacccccgacaacctgattaaaagtcaggtgctctaccaactgagctagtatcccatattatttttaaacaaaacacaatgcccagttccggaatcgaaccagagacacgaggattttcagtcctctgctctaccaactgagctaactgggcacaaatgctttcgcattgagttgcgggaataggatttgaacctatgaccttcgggttatgagcccgacgagcttccagactgctccatc

SEQ ID NO: 11560 - DNA, 12542 bp, Unknown
  gut microbiota DNA sequence
ctatatcagattacaacaaaagcaagctgggctagcaggattcgaacctgcgaatgctggaatcaaaatccagtgccttaccgcttggcgatagcccaacaaataatcgttgcacctatcgcaactaaggtggatacagggattcgaaccctgggcctccagagccacaatctggcgcgctaaccaactgcgctatacccaccataaaatgtgctcgaagggattcgaacccccgacccacggcttagaaggccgttgctctatccagctgagctacgaacacatatgatcttgtataaacctgtcagtgcagatttaaagcgggtgatgggaatcgaacccacgtatccagcttggaaggctggtgttctaccattgaactacacccgcacgaaatcggggtgacaggattcgaacctgcgacctcctggtcccaaaccaggcgctctagccaagctgagccacaccccgaaggattttatcgcttgcgcactcttccggccactgagctgtccttttcgtgacgcaaggattattatataggacagcctctgaaaagtcaacacttttttataaatattttatttcaaaatttgcctttccgtttttgtccagatccatcacaatgtaggacggtcttctcccctcctgtctcggataggaaagactgcccggattgagcgcaatcacatcccttgtgtaatcgatcacaggcctgtgcgtgtgtccgaacatcacaatatcatagccctgtgccgccgcttcccgctcaatatcggcgatccccgcactgacatagtaataatgtccatgcgtgatcaatacacggtagctgccgatgcgaagttctttttcccgtggaagattggaaaaaaagtcattgttgcccgcaacgatctccagccggcagcccgccatctccgcaatactgtcctcatctccctccgcgtcacccagatggatcagaagatccatcggctgctcacgctctaagataacttttaaattttcaagtttcctgtgcgtatcacttacaaccagtattttcataggctaaaacccgtactcgtgcaacaacttcttcatggaacgaagcgcttttcctctgtggctgatctcattcttctgctcttctgtcagctccgccgtcgagcagtgatactcatccacatagaagatcggatcatatccaaatccgttctcccctgccggacattccccgatatatccctcgatcgtctcccgtgtcacaagtgtcttcccgtccggaagcactgctgcaatcgcacagacaaaccgcgccgtgcgctgctccttcggcacgcccttcaaacggtcgagaatcgcctgattcttaatatcgtaggaagtatcctcgcccagataccgcgccgaatatacgcccggctccttgtttaaataatccacctccagaccggaatcatcggccagcacaatatccttcgtacaggcagctactgccttcgccttgatctgcgcattctcctcgaacgtcgtgccgttctcctcaatatccagggaaatacctgcttccttcatggaacagatctccatatccatatccgccataatctcgcggatttctctcatttttccggcattgccggtggcaaaaattattctcatggctttgtcctctttttagtatccttcttcaaatgcgcgaagcactgcctgatagacgccctctgccgtctccctctgatatgcatcggaattcagcttttccagttcatctttgttcgtcataaatccgacttcaatcagtgcaaccggcacctcactggttctaatgatataaatactgtcgccctccaccagtcctttgtcacggctcccgatcctgcctgtgacttcctccagacagatctgcgcgaactgacggctcgcctccgacgtctcgtcgtacatcacctgtgtaccgctggtacccgacatgcgtccgcttctcgtcgagttgttatgtatactgataaaaagatccgcgtccgacttgttggcaagctgcactctctggtcgaacgtcggattgctgtcatccgttctggtgtaatacacgccgatgttctgatcgctgttgtcaaaaatctctttcagcttcagcacgatcgccaggtcaatgtccttctcattgattccctgcttgttcgcaccgacggctcttcctccgtgccccgcatcgattacgactactttatcatagacttcatgaggtgtcaaaaaattaaaataaaaattctgcgcatcatattccgtctgcagttcatataccttgttggtcgtgacctctatcacgcccgtctccccctgcctggtgtaggagagaccgtcaatatagtcgctgttccccagaaccgggtagctgtcaaaataagtgcggtccgcctgcgggatttccacccggatagtctgggtcacataatcgttgctgacagcaatctgatccccggtcacgccctccggcaggcggatactcagttctcccttcgcccccgccgcttcattctgctctttgatctttaagttctgcatcgtgacctgactctgggcgaactcctcctcggcaatgcgttcctctctcgcctccacctcccacgtgtgaagcgccggaagcttcggcagaagcacaaaagataccgctgtcaaaatcatgagaaagacagccgacagtctcaatgctttttcttccataaccgtatattcctttatcgattcttactgaatgccttaatacagagattacattcctccaccgtatccacgctgtcccatctggcaccattggtactgatataactctcaccatcgtccagaatcacattcgcggtcgcctcgtcggcagcgtattcgattgccatcggatgcaccgaccccggcgtaatcatgtgaagcacaatcgcataacgctcccccgcatccagtgaaattgcctgattaaaatcaaccgtataatagcccgcgttggagagcttgccggacgccaccggaatccgctgtgtcagcgaatctgcattttcaaaattccgtacaacatacagctcgtactgggaatcttttcctgttgcgtaaaagcctgccgccaccagttcttcttcctgtgacgtcgtgtagacattggcgccgtaggcgctgtccttgttatagccaagctgtccgacccagccgcacagatcgctctgatagatatggtcatagttgcccggctcttcgatctttgtatacacaacgttgtgggtgcctatattcgtatcataatacgatatgtaaaacaccccgtcctcgccgaacgtatctccccagctgttctggcagataaatgcgccgtctccctcgagatccacattaaaattctccttggaataactgtcgtcccagccgataatcacaacgtcgtgattcggcttctctgtaccgatgtagcagtaggaatttgtcttctgattgtaatacggagactttgactgcgagctgcgcagcccgttatagatcgacgtctgcactccgccgtataaaaagaccgactccttgatcttctcataatcttttccgtcgatgatctgcatttcctgcacatgcttgaccgctgtaagatccggattcgttttattgtccccgtaagggtcatccgcttcgtatacaggtccttcccatgccgccagataagccattcccatggtatattccccgccgtcatcctgcgtcagtgtaaatccattgttcatcgtcatatggtcgaccgaaaactgcagtttctcttccggcagcaacgacgactccagtgcccccagcgcggcaaacgcccagcaggtgccgaaagttccctgattgcgcactgctgccgcccgtcccttctccctcagatcatagcgggtcggtatgattgtcgcactgtccgacgtgtccatcgccgacgcctgattctcctgtatatcccaggaataggaataatccagataattcgccagatcattcaggcttacatagtaggtatcgtccttgcggataaacggcgacacgatcacctcacgggttccgttgactttcgcctccgaggcgcccagtgaaaactccacctcattcgcatgcttctccacaaggagccgctttccgtcatacacatgcgcgctgcagttgagtgcatcgcgcagaatgttcaccggaaccatgatattcagctggtcatccatataaaacgtatggttctcgttggtgtattccttgttatcgatcaccagcgacaacagattatcatttacgctggatgcgatcaacgggttccaggttgtcgcctgcagattggctccgcggaaattttccaccgttccgctccccgatgcccccagttctaatttaaaaatcagcatggcggctaccagcacgccaaacacgatatatctttttgaatatttcattcatcccctccggcggtatcccttacactccgccttggtggcttcggccccataaactggtaaaaataggtgcgaagcattccattgtagatcttgcggttcttgtccgcttttctgccgatatagcgctccgcttcatcataactcgtaatcagatacatcgaccaggaatcgagtccccggaatgcgtccccgatctccccgtacagcttcggcagatccgacttatcctcgaggcgctcgccgtacggcggatttgtcacgataaagccgtatttcttcgggtggtggagttccgctaccgggcgctgctgaaaatgaatcaggtgatccacgccggcgcgttttgcattctccctggctgcctttatgacgtccccgtcaatatcatagccctgtatgtcgaccttcacatccgtgtggatcatctcctcggcttcctttacgcactcgtaccacagcttgcggtcaatcaggttcgtccattgctccgccgtgaactcacggttcattccgggcgcaataccggcagcaatcatcgccgcctctatcgggaacgtaccgctgccgcagaacggatccaccagaatccggtccggtctccacggcgtcaacagcagcagggaagctgccagcgtctcggtcagaggcgccttgctcgtcaatgtgcggtatcctcgcttgtgcagggagtccccggacgtatccagcgtcaccataacctcatccttcagcagaaagatgcgcaccggatacggcgccccgtcctccgcgaaccattccacatcatagtgctgcttcatgcgctccaccatcgccttcttcgcgatcgactgaatatcagacggagaaaacagcttgctcttgatagaagacgccttttttacccagaactttccgttcacagggatatagtcctcccacggaagcgccttgattccctgaaataattcctcaaaggtcgttgcgcggaatctgcccacttctatcagcacgcgttctgccgtgcgcagaaagatattggcacggcagacagcttccgcatccccctgaaatgagactctgccatcctccacccggccgatctcatatcccaggtcatagatttctctcttaagtaccgcttccagtccaaaatgacatggaaccaccagttcatatgtcttcatgtattctcctctgtatcatatgtctaatttcctaataatatattatccattctaattttccctgtcaatcacttgttcgcattgcctcaatgccgccaaccacggtatatacctcatacccctccctgccgagctttctcgccgccagaaggctggtgcttccataatcgcagtagagcaccagcggtctgttcttcggcagacggtgcatccactgatcgatcttttcatacggaagatttctggcgttcggataatggtattcccgataagaatccgcctcccgcacatcaatcagaattccgtgctttcttctcataatatcttccaattcccttggatgtatcgtataaaacgtcatgcccgcgtatcctccttttccgccatatgctcctgtaatcgcaaaaacagattacaaagaggttctctgtaatctgtttctgtcaatcttattctatcctatgcgctttttctctgcctgtgccagtctactgctgatacttgtcagaggtcttgttggaaccggacacgttggatgtcttgttggttgacttgttagtcgacttattctttgcgctgttggaaccgcttcccgcgttgttctcgtagctgttctcataaccgtctctgcaattagaagtcgaattctgtgtactttcgttttttgccatgttgccctccatcccggcacgtgctcgtgccgaatctttttatttgcttactgcatggttagtatctgatgttccccggaaaatatacatggcttttgtggttttgcattgctttttcaaaaagaatgttctatactaatgctgtgatatgtaaaacatatcattttataccccttattaattatttatactcccctcagaaaaagccaagtgcatcgcacctggctttttctatcttatcacagtttctatcttatcacagttcataatattcaagattgtcggtaagctcctgcgtgatcctgcctccggctttctgatacttgtcatagactccctggatacgctgcacggtcttcgcgttcaaaagatcgaggcggtgcagagcgctctcatacatcggattcccctttaactcctcccggatcggctttgcgaacgggcaataggtaatcaggatctctcttgcgatcttgttgaggcggtagcttcccttcgactcatacttcatccagttctgataatccttgacgaagacctcacggtaattatttcttccacgcaagagcgcactcttgatcttctccttcgcctcggcggaaagctcgcggttcttccggtagaactgcagataatcgcaatactccgccgtcagggacttctcacggatatcgttccagtgtacaccctgaatcttcctgcagatctcccagcggtatcttccgaccgtatcgaccatcatatcgtcaatatcgaccgctgtgaaaatcgggaacaggaaacgcgccgaggtatctcttcgcacgcctgctgtctcctgccacatcatcgagcgtgttcctgcattcggcatcagaatgatgtccggcatgatctccttcataatcatctcgcggttgatgcccttgtccggatccgagaactgcacttcacgatagaacgcggagaaatcgatgtcgcggatcttgtgcagtgactcgtccagcttctgcgccgtcacgagcatcttttcaatggagttgatcagatcatactcccctaaaatcgggcagaacgtggacagcttgccataggtcgcacggtttccggacgtgaacatgttctgaatctcaaacttgactttgagctcccggttggacataaaatgcttctgctgctctgtcgtaatcttgccggtcttgcgcatctctgcaagatatgccggataatccatatcgaactcatttttcgacggctcgtttcttccgtcataaacactgcgcagccattcaaaaattgtgtatacatggtcagatttgcagacatccagatgctccgtgagatcgaacagaatattggcattctcctcgccggccatctgcacatccataaatccgaaattcaaaaacatttccacaatcggggtaagctctttttccccctttacggtatgcataaacgcttttaagtaggtatcgtagaaaatctgtgtgatccgcttgcggattgcaaacgtctgtgcgtccgtggaaaacatatccggcagatcccggtacttctgcacaagctcctgcatctcctcgatgacgctctgctcggtatccgcataggtcaggatatgaaccaggcagtcttcactgcgctcttcctgcgtttcttcctcctcgccatcctgtgcctgcggcgtctcgtacgctgcaccttctgtctcgaagtggtatccgcggtattcttccatccgcatgtcgaccagctttccgctgtagatgccaagctttttgatcacctcggcaatccggtccatctcatttaaaagcggctttacatcataatttttcttatgcgcctgaatcgccagagcaaagaacaggttaaaaagatcgtttttcgattccgccagaagaatatcctgattgtagcggagatattccaccatctcaatgattccctgcgtcacacgcctggtctgataactggcttccatgatcgccccgatgcagagattatcgtcccgctgcatcagatgcacatactcctctaaataacttccggtcaggctggcactgttgcctatctcccagttctccgcccggtgcaccatctccaacggcttgaaattgtccatgcgcgtaaaactctgctcgtccagatggtactgtgcgcagagattctcatactggctgtactcattctcggcaaaggagtgaaactgccttaccagattggtaaaaccggcataggttctaagaagcatctgccgctgtccgagtgctgcccgaagcagaatactgcgcatgctctcctgcccgtgaatcgcctcctttaaatcctccgccgattcacaattgaacaccgccagcacggaatcctcggtcgcaacataatcacacagatatctgtcgccctcagaaattccaatcaccgcattttttccaagaacaatcttggcgtaggaattgcactgaatgacagtaccctcctgcacgatataccatttttttactttctctttctgcttggcaattatctggttcttctgtacctttactgtcgtcatcgtctctctgtcccctgcctgcgcacatgaccgtgtgtctactgccccttcgcgcgtcctttacttattattaacaattccgtaagcagctcgtccgctgcctcctctttactcatccgtgccagttcccgctcgccgtcctctgtgatcagtgtcagcacgttcgtatcggttccgaaaccggcgccttccaccttcagattattggctgcgatcagatccacattctttttgcgaagcttttttcttgaattctcaagcatgtgctccgtctccatggaaaacccgcacagtatcgtctttcctttgtccgcccccagagctgccagtatatcctgtgtgcgttccagttcgatcgaagcttcccgatcggacttcttgatcttctcctccgccacagatgccggtctgtaatccgccaccgctgccgccttgacaataatatcctgctcctttgcacggctcatgaccgcgtcatacatctgtgccgccgtcacaaccggaacaacattcacaaaccgcggcggctcgcacgctgtcggtccggtcacaagtgtcacatccgcccctcggtacatggcgcgtctcgcaatcgcatatcccatcttccctgtggagtgattggtaatatagcgcaccgggtcaatcgcttcctgtgtcggacctgcagtgacaagaatttttaatcctgccatgtcctttggcgcagcaagttctcttaagacatactcggccagctcttcctcggacggcagtttgccgtctcccgtatcgccgttcgccagcatcccccgcaccggttcaatcatctcatagccgtaatgctccagcttgcggatattgtcctgcacaatcggattgtggtacatattatggttcattgccggggcgatcaggcacttgcaggtacacgccatcaccgtcgttgtgagcatgtcgtctgcaattccgttcgcaatcttgccgatcacgtttgctgtagccggtgcaatcagcaccagatccgcctgtttcgcaagcgccacatgctccaccgagaactcaaaattccggtcgaacgtgtcaatcagacacttgttcgccgtcagcgtctcaaacgtcgtcgctgtgataaaattcgtggcattctgcgtcatcagaacatgtacgttgcacccaagcttcttcaacatgcgcgctacattcggcatcttataagcggcaattcctcccgtcacacaaaggagtacggttttcccgctcaaaagtccccttggcttttcgctctgcttattcattttttcctcctgctctcgttcacttatcccatgatacgatgctaaaattccatttttattctatactcttttccctctctgtgcaatgcctttctgcctgcgcgcccaactttcaccgctaaatgtaacgcggcatttcctgaaaaaaagaatcctattacataaaaaacgcacagaccgtgtcacgtgacacaacctgtgcgcaaataaatatgttccctatacaaccgcccggatgtaatgctttacctcgcgcagctttttcacaaactggttgtccagctcatagaatccaaggccaagcggaaccgtaaccagaatgttaaacgggacagcaatataccatgccgtctgcatgatcgcgccgcccagttcaaagtgatagtataccatctgaatcaggaagatatgataggaagcttttccaatctgtgtgagcagtctccccacaaatcccggaatcgtacagtgataaaatttccggaacaataaaataacgatcgggaaaatatagaacgcaaccggcatcgctgtcgtcttccagtagccaaacaactcgaaatccttgtcgaatccgaaaactgcaatcagatatgccagtcctgccagaaacatcatccacatctgatacggctttaccctctgctccggatgcagatacagataacagccaaacgcgattaaaagcaggtatcttccgatgctcaggcggtaataatatttatccatatcaaacacgatgacgcacacctcaaacgcgagattggcgagcgctgccacagcaagtccaagcttagcattgtatgcgatcatcacataaatcaacggaaaaataacaagcaactgcagcatgatcggtacataatagcttccaggtccgtatgcgccaagcacaaaaatacggaacaacggtatatttttatcctgcgctgccagcagcagaatctcaagcagacaaatggcaaaaaacggcagcaaaaagcggatcagctttggtttcatcatattccagccatacattttctccagatttccgtctgcttttttgcggtttgacattgcaaaattataaccgctcacaatcataaataccggcactgccatgttgatcagcatcgtaaaaaaaggagatgtcttatcctcccatccatagtgcgtaatgattaccataatgacacagactgccttgagataatccagaaattcgattctctgtttctttccctcttgcatttctaatcctcattcctctttttatacacaatcctgatgtcctctttttgacaccaattctgtatattacgcactttttgcatgattttcaatagtaattgtggctaaatttgggcttcaatcgagggatttataaagcatttctacgatatgattttcagataaaacaaaagatatatactatagaggaaaaaaagacccggaagataatcttccgggctttcctacgtgcgcgagaggattcgaacccccgacaccttggtccgtagccaagtgctctatccagctgagctacgcacacatattcttttttacatatctattatagcactcttgtcaagtacctggatatgaatgccggcgaccggaatcgaaccggtactgtgtcaccacaacaggattttaagtcctgcgcgtctgccagttccgccacgccggcattactgtaacagttgttacagaagtgggacctatagggctcgaacctatgaccctctgcttgtaaggcagatgctctcccagctgagctaagatcccatatgaaattatcataagaacaattttgctctcatgagcgacccaagcgggactcgaacccgcgacctccgccgtgacagggcggcgctctaaccaactgagccattaggccagacatcttacaaacgcttttgtgacaagtggaccatcggggactcgaacccaggaccgaccggttatgagccggttgctctaaccaactgagctaatggtccaagtagattacttctataagccgatgatcggactcgaaccgataacctgctgattacaaatcagctgctctgccaattgagccacatcggcatatttacctcagctgattacagccagccaaaagctagtgactccaacgggaatcgaacccgtgttaccgccgtgaaagggcgatgtcttaaccgcttgaccatggagccaggtagttttacaaatacacttctacagtcaaaaaaaactccccgagtaggactcgaacctacgacagcgcggttaacagccgcgtgctctaccgactgagctatcgaggaatattagctgatacacagcttccggtaaaacctatcataaataagttgtaccttcaaaacttcatacagaaatcatccaacaaactttttggtcaagccctcgatcgattagtaacagtcagctccacacgttaccgtgcttccacctctgccctatct

SEQ ID NO: 11561 - DNA, 98160 bp, Unknown
  gut microbiota DNA sequence
tgataaaagatgtgcttattttacatcgttttcttacatatgtaaatagcatttttcaaatttatattttttttagaaattactaccggaaacttttcttttcgcattgcttccattataataaatacaaatacatgtatcaggaggtcttatgaacaattttatcattacaaccgataccacgtccgatcttccggctgcctatgtagaacagcatcagatcggcatgctttctcttacatatacgattaacgatactacttattcctgggagcatccgcttccggtaaaggaattttatgactacatgcgccagggttctcttcccacgacctcccaggccaatcccgaggaagctgccgctgtttttgaaaaaataatcaacgaacagaatgccgatattcttcatatcgccttttcttccggtttaagcggaagctacaacagcgcaagactcgccgcagaggaactttccgagaaataccccgaccggaaaatcattgtcatcgattctctctgcgcctccctcggcgaggggcttttagtgcacaaagccgttaccttaaaagaactgggacgtacactggaagaaacgacagactggattgaagcaaacaagcttcatctcgtgcataatttcacggtcaatgatctgtttcatctctaccgcggcggccgtgtgtccaaaaccgctgcttttctcggtacgatgatcagtttaaagccgcttctccatgtagatgatgaaggacatctgattccgctctccaaagtgcgtggacgcaaaaaatcactgattgccctcgtggatgccatggaaaaacagatcggcagctggcgtgacaagaatgacatcattttcatcagccacggcgactgcatcgaagatgcacaatatgttgctgatctcatcaaagaccgtttcggctatgaaagctttctgatcaaccatgtcggtccgaccatcggcgctcacacgggtcccggcgttgttgcactgttttatatgggcgattaccgttaattcggatagcttttttatggaattgccacaacaagcatagacctctttgggttgataagtaatattatcagaaagaagaccacatcgtgggatttcagatggaaatgcagatggaaattcgtttgagaaaaatgtgagtatttcttccagccgaatgtttgcatcggattccgtgtctcttccacgtttgaacactcccggagtgtgtccgccaaatcagagacaatgagcgaactttctagtggcggctaatgccgctgcctcacagacactataaaatcgcgcgaaccgaaactcgctgccatctgctattgaaaataaggcagatggcaactcagacatcggcttcgcgcgattatgttttattcagcagcggcaaaagcgccacacgaaagttcttaaattgtctcatgatttgcggacacagtccgcggagtgctccaaacttggaaagacacggattcatcgaagatgcaaacattcgactggttagaaattccacattttttgaaccgaatttccggctgcatttccacatgaaatcccgaagtgtgtttctgataatattacttatcaaagcaaacatgatatgcttattggaacagttccataaaaaaacaggccaaagcaccacggtgcttcgcctgttttttagccacttctctattaaacgttgatctccgcctttacgccgagttcgtcttgattcttctccaataccggatttacaacatttgcaaggaatgcatccacctgtaccggtgcgcgtccgacatacttggacggctccatggttgcctgcagctgctctaatgtcagattgaattccgggtctgccgcaatcagctccagcagattgttgtccttaccctcttccttgacattctttcctgcctgcatggacagctggcggatcttctcatgcagctcctgacggttgccaccgttctttaccgcgtccatcataatattttccgttgccataaacggcagttccgccatcatatgcttcgtgataactttgtcatagaccaccagtccgtcgacaacatttaagcacagatccaggattccgtcgatcgccagaaatccctccggaatagaaagacgcttattggcagaatcatccaatgtgcgctcaaaccactgggttgcagaggtgatcgccggatttaacgcatcgatcatcacatagcgggaaagagacgcgatacgctctgaacgcatcggattgcgcttatacgccatcgctgaggaaccgatctggttcttctcaaacggctcttccacttcttttaagtgctgcagcagacggatatcgttggacatcttgtgtgcacttgctgcaataccggcaagaatatttgccactctggtatccacttttctggaatatgtctgtccggatacggcatagcactccttgaatcccatcttcgctgcgatcatcggatcaatcttatcgatggtctcctgatctccctcaaacagctccaaaaaacttgcctgcgtgccggtcgttcccttggaaccaagcagctttaaggtgcccatcacatattccagatcctcgagatccatcagaaactcctgtgtccagagtgtagcgcgcttgccgaccgttgtcggctgtgccggctggaaatgcgtaaatgcaagcgtcggcagattcttgtaggtgtccgcaaactttgccagttccgcaatgacattgaccagcttcttgtgcaccagctttaacgcctcgttcataataataatatccgtattgtcgcccacgtagcaggaagtcgctcccagatggatgatgcctgcggccttcgggcactgctgtccaaacgcgtatacatggctcatgacatcatggcgcaccagtttttcgcgctcttttgccacatcataattgatgtcgtacacatgctccttcatctcatcgatctgttcctgtgtgatgaccggctttccgttctcggaaagtcccagctccatctctgtctcggcaagtgcaatccacagctttctccatgtggagaacttcatatcctgtgaaaaaatatactgcatctctttgcttgcataccgctctgagagcggacttgaatatctgtctgtactcattttttctccttacctttatccataggcttgctgcattttctaaaattcaagatatcctgccacctgctgcatttccctttgttcccggcgctcctgctgcctgctgcatttccctcgaatctaaagttttctgctgcctgccacattcttctatatttttaagaagctttctacctctcgtagtctccccggatatcttccttcggcggctccatcggataaatgccgttaaagcatcccttgcagatcggcagtccatccgccatctcgctcagacggtcaattccgagatagccgagagaatctgctccgatgatgttccggatctcctcgatggtgcggttgtacgcgatcagttgttcccgctccggaatgtccgtaccaaaataacacggccacaaaaacggcggcgagctgatgcgaacgtgcacctccgtcgctccggcatcccgcagcatttttacaatgcggtcggatgtggttccgcgcacaatcgaatcatcgatcatgataatgcgcttgccgtccaccgcctcttttaagacattcagctttacgcggacgctggactcacggctgctctgtttcggcttgataaacgtacgtcccacatagccgtttttgacaaaagcggttccgtacgggatgccggactgcagcgaataaccgagcgcagcggcattgccggactccggcacgcccaccacaagatccgcatccaccggcgaatccatcgccagaaaacgaccagccttgatgcgggatgcatacacgcttacgccgtcgatatggctgtccggtcttgcaaaatatatgtactcgaaaatgcatctcgcttcctgctcctttggcagtgcgcgggacatatccgaaacaattccattctccggcgtgatcgtcaccgtctctcccggcagcacgtcacgcacatactccgcgccgatcgtatcgagcgcgcaggtctccgatgcaaggatataggcattgtcacgctttccgatgcaaagtggcttaaaaccataaggatcccttgctccgaccagctttctcgggctcatgaccacaagggaatacgctcccttgatcttgcgacaggcgcgtcccaccgcttcctccaccgtactggatttcaggcgctcccttgcaatatggtaggcaatcacctccgagtcaatggtggtctggaaaatagctcctgtatattccagatcatgtctgagttccgccgcattgatcaggttaccgttgtgcgccagagccagtgttcccttgacatagttgagcaccagcggctgcgcattttctctggtcgacgcaccggctgtcgaatagcgcacatgtcccacgccgatatccccgtgcatgggctctaaattctcctcggtgaaaacctcattgaccagtcccattcccttgtaggaggtcactttccctttcggaccgttcgtctcgctgactgcaataccgcagctctcctgtccgcggtgctgcagtgcaaacagtccgtaatatattgtggatgccacatctcctccgtcaaaatcgtacattccgaagacgccgcactcctcatgcagttcatcccccaccggctgatttttattgattctattatcgctcattgatttccccatctacgaatctgatattctgtcttgctatgcctgaaacggctttccggtaagaagctcaaatgcctccttgtacttgtccacagtcttctccaccacttcatccggcagaagcagatcgttgtccggatttgcctttaaccagtctctgacgaactgcttgtcaaaagaaggctgaccctttccggcttcatatccctccaacggccagaatctggagctgtccggtgtcagcatctcatctcccagaacaacattgccgttctcatccagaccgaactcgaatttggtatctgcgataatgatgcccttgctcagtgcgtactctgcacactttttgtagagagcaatcgtcttgtccttaatctgtgccgcgtaatccgcacccttgcccgggtagatcttctccagcacctttacgctctcctcaaaggagatgttctcgtcatgcagaccgatctccgcctttgtgctcggtgtgtagatcggctctggcagcttgtcggactctaccagtccttccggcagcttaataccgcatacggtaccgttctcctgatagcttgcccagccgcttcctgtaatatatccgcgcacgatgcactcgatcggaagcatctcaagcttccggcacatcatgctgtttccctcaaaacgttcctgctggaaaaattccggcatatcctttacgtccacggaaatcatgtggttcggcacgatatctttggtgtaatcgaaccagaacttcgacatctgggtaagaattgcgcccttctttgtgatcttattctttaaaatatgatcaaaagctgagattctgtctgtggctacaataatcagactgtctccattatcatatacctcacgtacttttccctcttttaccggcttaaattcctgcatttcatcctcttttccgaagccttcccggcttcttttgttgatatttacagctttacccacttccgcagactatttctgcactgtacttcaaaattataatacagccgcttttggaaagtcaatgtttttaccctctcacacgattttcaccatatagaaaataaagttctttttattagtatttttgtacattttcattatttcattagcatatcttataggcttgttcacacagcctaattcatattttgttttcaaaaaaatacatatttctcccttgacgtactttagtaccagagttataataactgcgtagataggacaaaagcactacttttgcaattatctaatttcatataactcctctttatctgccaccagggcagatgttccagaaaacggtccccccgttttctgaatcctaacacaagaaaagcagcccctcccccgggactgcttttctcgttctattctttatttcttgatcagaagtgactttcctgtcatctctgccggctgctccattcccatcagttcgattaacgtcgggataatatctgccaggcatccgttctctctgagtgtgtaggacggatctgcattgaccagaataaacggtaccggattcgtcgtatgtgcggtaaacggtgcacctgtctcgtaatccaccatctgctctgcatttccgtgatctgcacagatgaacatctgtccgtctacttcctttaatgcctccactgcctttccaacacaggagtctacggtctcgattgccttgatggctgccggaatgataccggtatgtccaaccatatccgggttagcaaagttgatgacaatgacatcatacttctcagaacggatggctgcgcagagcttctcacacacttccggtgcactcatctccggctgcagatcgtaagtagccactttcggggacttcacaaggatacgatcctcgccaacgttcggctcttcaacacctccattgaagaagaatgtgacatgcgcatacttctctgtctcagcgattctcgcctgtgtcatggcgtgtgctgccaggtactcgccaaatgtgttcttaagctccactttcttgaaagcaacttccttgttcgggatcgtcacatcatactcggtaaagcagatatatttcacgttctttctcgcacctctgtcaaatccgtcaaaatcatcggcacagaaggttcttgtgatctcacgtgcacgatccgggcggaagttgaagaagattacggtatctttgtccttgatcgtcgctaccggcttgccgttctcggtaatcgcggtcggtacgaagaactcgtccgtcacatcctttgcgtaggaagcttccattgcagcaacagcgctctctgcggtctctccctcgcccttggtcagcacatcatatgccttctgcacacgatcccagcggttatcacggtccatcgcataataacgtccggaaatcgaagcaatcttaccgatgcccagttccgccatctttgcttccagtgcctcgataaatcccttaccggaagtcggagccgtgtcacgtccgtccaggaagcagtgtacgtatacattctttacgccctgtctcttcgcaagctcgagcagaccgtacagatgtgtaatatggctgtgtacgccgccatccgaaagaagcccgtataaatgcagatcggaattgttctctttcacattggcgataccgtcaagcagcgcctgattgctgaaaaattcgccgtcgttgatctccttggtaatgcgtgtcagctcctggtatacaattctgccggcgcccatatttaagtgtcctacctcggagttacccatctgtccgtccgggagacctactgccagtccgctggcatttccctttacaaacggatattccttcatcagtgcgtcgatatttggcttcttcgcctgtgcaacggcatttccttccgtcttatcgtttaatccgaatccatccaggatcatcagtactgttggttttttactcattgttcttccctctctctttattttcggttgccaacaatgtcgatggcatacccatcattatctgtcgtgccgcgaatctccgtcttgcttgtatccgaatcgtacacgattgtctgcgcagggtaatcccccgctgttttatcataaacattaccgtccgcatccattccgatgtcatcggaaattgcagccaggtaatgataaaacccgtctttatcatcctgctctgtcagaatgcttgtaactagtcccttctgtatacacgggacataggaaagtgtcaccgcgccatcctctgtgatcgtaatcttggcaagcgttgtatacagcgtcccggtggaaaaccagaaattcccgagactgtacgcaaccggcacaccatcggtaaaaccacatccctgcagcctgtgcggatgtccgccgatcaccgcgtctgcgcctgcctccgcatatagctccgccagaagacgctgggacttttcttcgtgcagactgccttccgttccccagtgcacttccacaatcacataatcacttgtggcatccgcttcccggatcacctccaaaaatgcggcaggattcaaggtcttcaatactcccggttccgtctccgtcgcctcttttgtatacttggtcgcccgctcaatctgtgtggcggaaacaatggcaatctttctgcctccaatcacaaaagagaggatcttggatgcctcttttcgattctcgcccgcccccgtataagggatgtccgctttccgcagacagtctaaggtcgacagcagtccttcttccccgtaatcatacacatgattgttggcaagtgtcacagcatccgttccaaaaacagagaggagttctacatcctccggatctgcccgaaaggtatatgccttcctgggaaccgcctccacgctcccgctctctgcgtaggtgaactcattgttcatcaccatcacatccacgttctgcatctccgagagcagatcctccgaaaagcagtcatagatgccattcgtctgccggttcatatactccatggtataccagtcgtcggcaaaattgatgtcgcccgcaaagccgagcacgatctttccatcctctccggcctctttccagtatacattttgtagccggtactgctgaaaaccactgtccctgcaatacatcaaccacagtacatggatggagctgccggtaatgtcataccagacttccggatcctccggtccatccagaacggcactcgcgatccgcaccaccgtctcatctccgtatctggcagccagccacatcaaaaacgaatcatcgactgcatatcctgcgataaatttcttcgtcgcaccttgtaatatcactgcaaatgcgtctgtcaggtccattctctgtgttgcgctctctgtcatctgcgtacgttttgtatctccggcattccaggtcttctgttgtgccggaatattctgtcctcctgcaaaaatatctcccagaagtacagccaccacggttactacaagtgcatttcttttccccttgcactttttgggcatacattttctccgctgtcactcaaaattctcttatattaccacttacaaattttcacgaaaacccgtctctctccgcctgttaccgcagagagaagcgggtccccgttccaggatcgtaccgctccgcagcgatcctgattccctgtaattttaaactattacttatagtttacgatctttccaaagtcagcctttaaggatgcgccgcctacaagaccgccatcgatatccggctgtgcgaacagttctgccgcatttcctgcattgacagatccgccgtactggatacgaaccttctcagctgtatcggtatcatatacctcagcgatgcagtcacggattgccttgcagacttcctgtgcctgtgcggttgttgctgtcttgccggttccgattgcccagatcggctcatatgcgattaccatggaagcaacctgctctgcggtaatatcctttaagtcggatttgatctgaagacggatccagtcaagagtaacgcccatctctctctgctctaatgtctctccgcagcagaggatcggggtcagattgtgctcgaatgctttcttaactttcttgttcagcatgcagtcgcactctttgaagtagtcacgtctctcggaatgaccgatgataacatacttcacgcctgcgtctaccagcatctccggagagatctctcctgtgtaggcacctttctcctcgtagtacatattctctgcaccgactgcaacgttggtgcctttgactgcctctacaaccggtacgatatcgattgccggaacacagtatacaacctcaacatcatcgcttactacgagcggctttaactcttctactaactttactgcctggcttggagtcatgttcatcttccagttgccggctacaattttctttcttgccattttaaaatcctctttcccttaagaatgatcccatttatgtatctgctgccatgacgttttgtaccgtcacgacagcaggtttttgttatttatttgtcgtctgctgctacaacacccggaagttccttaccctctaagaactctaaggatgcgccgccgcctgtggaaatatggctcatcttatctgcaaaaccaagctggtttactgctgctgcggaatcgccgccgccgatgattgtggtagcatctgtctcagccagtgcctttgctacagcgatcgtaccttttgcaagtgtcgggttctcgaatacacccatcggtccgttccatacaacggtctttgctgtcttaacagcctctgcatataactcagccgtcttcggtccgatatcacagccctctctgtcagccggcatattcttaacgtcgcaaacctcaacctcaaccggagcgtcgatcgggttcgggaaatcagcgatagtcactgcatctaccggaagtaacagcttcttgccaagcttctcagcctttgccatcatctccttgcagtagtcgatcttgctgtcgtccactaaggatttaccgatctcataaccctgtgcctttaagaaagtgtaagccataccgccgccgatgatcaaggtatcgcacttctcaagcaggttggagataacgtttaacttgtctgcaacttttgcaccgccaaggattgcaacaaacggtcttaccggattctcaactgcattgccaaggaatgcaatctctttctccatcaggtagccgacaacgttggagccgccctttgcgctgatgaactttgtcacgcctgctacggaagcatgtgctctgtgggaagaaccgaatgcgtcgcatacgtaatcatctgcaagatctgctaactctttgctgaactgctcgccgttcttggtctcttcctcgccgcggaaacgtgtattctgaagtaatacaacatctccctcgttcatagcctctaccgccttggtagctgcctctccggttacgttgtagtcggatacaaatacaacttccttgccaagcttctcggaaagtctctttgcaaccggtgctaaggactcgccctcgtttggtccgttctttacttttccaagatgggagcagaggatgaccttgccgccatcgttgatcagcttctggatcgtcggaagtgcagccacgatacgggtctcatctgtgatctcgccattcttgagcggtacgttgaaatcgcatcttacgagcactctcttgccttttacattgatatcatctacggattttttgtttaacgacatatgtcatgtccccctttaatatgcaaaatgtcaaaaagggacccggtccataaaagaccggacccctttctgagtctatcacctgattgtccgagaacaatctctttctctcaattatgctaactcggagaagtatttgatggttcttaccatctgagatgtgtaggagttctcgttgtcataccatgaaacaacctgaacctcatactgatcatcagatacctgatttaccatggtctgagttgcatcgaataaggaaccgaatctcataccaacgatatcagaagatacgatctcatcctcgttgtaaccgaaggactcgtttgctgctgccttcatagctgcgttgatgtcttcctttgtaacgccggctttcttaacaactgctgttaagattgtggtagaacctgtcggggtcggtacacgctgtgcagaaccgatcagcttgccgtttaactcaggaataacaagaccgattgcctttgcagcacctgtactgttcggaacgatattgactgctgctgcacgggatcttcttaagtcaccctttctctgcggtccgtcaagagtcatctgatctcctgtgtaagcatggatggttaccatgataccggactggatcggagcgtatttgttaagagcgtctgccatcggtgctaagcagtttgttgtacaggaagctgcggaaatgatggtatcagaagcctttaatgtcttgtggttggtgttgtatacgatagtaggaaggtcatttcctgctggagcagagataacaacttttctagcgcctgcgttgatatgagcctgagccttctccttggatgtgtagaaaccggagcactctaatacaacgtctacttttaactctccccatgggcagttatttgcatccgggaatgcgtagatcttgatctccttgccgcatacgatgatggaatcgtctgtagaagatacctcatctgcatgctcgtacttaccctgagatgagtcatactttaacaggtgtgctaacatcttcgggcttgtcagatcgttgattgctactacttcatatccttctgctccaaacatctgtctgaaagcaagacgaccgatacggccaaaaccattgattgctactcttactgccatttttaattcctcctagaatttgtaaatgtaatcgccgggcataaatcccctggaaccggcaagcacaaggtacttgtgctcattggctccgtgcttcctatattctaaccaatttccatagaaagttcaagcctttttctccactttattgccactttgttaaatttttcactatatcacaggttttttttcccttttccggaaaaatatacaaaatctgaaaatacgccggaaaatctgctgacgctgcacgcccgctgtgttatacttttttctggtaacctgtaaacataccaaagaggagttttcttatgtcaaaccttatttttttactgattttgtttgtttttgttcttatattatccgcgacgccgctgtttcgcaaaagccgcagccagcgggattatgagagttccggcatgcagctgcttgccacttcccgcggcagggtcctgctgctccctgccctgggctgtctctgcgcgtgtatcgtcacattttttatggtgcttatgtatcaggacatcggttttgaggcatcggatataggctctctgctctcatgcatcggcgtcaccatcctgttagttgtcgtctgctttctcggcggttacgccatgcaggcacgtcatgttctatataatgaagaaatccttctgatcgggaaaccgttccgcccctaccagaccattcactggtatgaaatctctgagatgcggatcaaaaatcaggacttttttgatctgtatgacagaaacggccgccgctgcgtcagcgcaaatgcgaatctggaaggctaccggcaattttatcaggcatcgttacggtttacccgtcccgaatacaccgcaaagcaaaaaaacaccccgtacgacaatccggtgtctgcggcatccggctgcggaacactgcgctaccggaccggcgaatattacgcgctcctcatcctctatgcggttgccatgtttctgtttttcggcttgaccgttttttccggggaaagcatttcgggaacgctgcagatcatccgcgaagaaaagctctacggcgcccttttctttccggtcgtgtttgtcggcaccgttctggcactgttttatgtcagtctgcagaaaatcacctacgaccgcgaaaaaattgttatttcccgtttcccccgccggacacaaaccctgctgcgccgggatatccgccagcttgaatgtacctccggcagtcaggggctccggacgctcaccctgcacacggataaccgcagatatgtgatccgcgagaaacagttccgcgtagggttcccggaatttttcaacgaactgatccattaaactcacacagaaaggaagatcactatgttatgggatacacatatgcacagccaatattccggtgacagcgaagcaccgcaggaggacatgatccgcgctgcaatcagggcaaagctccccggcatctgttttacggatcatctggacatcgactatccggacaacccggaagcgttcctgttagacctgccgaactacacgtcatccgttttcgccatgcaggaacagtaccgggatcagatctgcgtgcgctacggcatcgagctggggctccagccgcatctggcagcgctgcatgccgatattctctcgcagtatgacttcgactttgtcatcggttcctcccatgtggtacacggctatgatccgtattttccgccattctggaagacgcacaccgaggaggaaggataccgcgaatactttgagtccatcctggaaaacatccgggcatttgatgactttgacgtctacggtcacatcgactatgtcgtgcgctacggtccgacgcgcaacgagaattatacctacgccagatacagcgacgtgatcgacgagattctaagacttctgattgaaaaaggaaaaggcatcgagatcaataccggcggattcaaatacgggctggggcacccgaacccctgtgaggagatcctcgcgcgctaccgtgagcttggcggtgagatcatcacggttggcgcggacgcccatgctccggagcatgtcggctttgcctttgagaaagtgcctcagattttaaaggacgccggttttacttactacacggtcttccggaaacgcaagccggaattcataaaaattgaggactgaccgccgcatccggcgctccagtcctcattctcactgacattttatacgttgatgtcctgtttttatttacgcatctcttctgcggcgcgctctatgtaaaaatcaagcagttcatagatccagtctttcagattggaaaacacaaatcccgtacgcccagcgcgctctgtattgatgctgtagccgggcgtcccattatatggcgccggatcgccggtctcatcaagaaacgcctcttttccggtgcgtctgtacacgtaagtcaggatctcccgcggcgagatggtcccgcggctcgctccgttgacggcaccctggatctcatccccgccgagatgcgccagaaggcgccccgcatcgtccacgctgataaagctcatctgtgcgtccatattatcaatatacatcggtttctgccgcaccacatgttccacataaaagtacagccggtccgtgtagtcatccctgccgatgacgtaggggaatctcacaaaagccgcatttttcatcggatactgctgcacgagcgcacattccgcacttttcttcaatacgtcatacgatccgctgtaatccgtataccagaccagtctgtcatgttccggcgcatagtccgtctccacggtctgaaaatgcagatcatacacggataccgaggacaccatcacataccttctgcagggcaccgcctccagcacggtgcgcacatcccccgcacagtaagccagatcgtcgtagaaaacgtcataatatttatgggcaaacacctgctccatctgccggacatccgtccggtcgacgatcagacgtctgactctgtctccaaaatcatccggcgtccggccgcgtgttgcgatcgtcacctcatgtccccggtgcaaaagttcccacaccagatgttttccgaaaaatcccgttccgcccagcactaaaatattcatacgtttctccatctttcttcttcccgttttccgttccctttcgcactattatactcattttgcgttgttttatcaacaatcccccaagaaccgaacggcaaaagaccccgcagaaaggtttttctcctcgctgcagggtctcttttacttcccgttattttttcttttacttaaaatattccacgccggactcaaacagtctcaaatcctgctcaccgtaaatattcatcgccaccctccggtcacgacgctccgaatgtgccatcttgccgagcactcttccgtccgggcttgtgattccctcgattgccatgtaggagccgttgacattccactcctcatccatggtcggaacccccgcctcgttgacatactgtgttgccacctgaccgtttgcaaacagcttctccagccattccttcggagcgacaaaacgtccctcgccgtgggaagccggattgcaatatacctcgccggtctttgcctgtgccagccacggggacttgttcgtcacaaccttcgtgtataccatcttgctgatatgacggccgatcgtgttgtaggttaatgtcggtgaatctgcggtctgcggacggatctctccgtacggtaccagccccagcttaatcagtgcctggaaaccgttgcagataccgagcgccagtccgtcgcgctcgttcaaaagcttcatgaccgcctctgtcatcttcgcattgcggaacgcggtcgcaaagaacttcgcggagccctccggctcatctcccgcggaaaatccgcccgggaacatgataatctgtgcctgatcgatcgcctttgtgaactcctcaaccgaatcgcggatgtcctctgcattcaggttcttgaatacctttacgatcgtgtccgcacctgcgcgctcaaatgctctcgcactgtcgtactcgcagttcgttcccggaaataccggtataaacacggtcggttttgccaccttgtatttgcagacatagatactgtctgcctgatagatgccggtgtcaagttcgtccttattatctgtcacgcgggtcgggaatactttctccagcgtgccgctccatgccgcgatcgcctcgtcgagtgcaagcttcatgccgccatagcagaagctctgttcctcatttacccagccgacaagctcctcatttccggaaagtcccgctgcctttaatgtctccttgacaataccaaccttctccactggaacctccgccacgatattaccaaatcccggtgcaaacagtgtctcttccgacacttccttctcaatcgtcacaccaaacttattgccaaatgccatcttgctgactgctgccgcaagtccttttccatccagcgcataggcggatacgaccgcaccctttccgatcagctcatgcagcaccgcatagagcttcattacctgcgcatagaccggaagatcataagaatccctctcgatggagaaaagtaccagctgatttcccactgccttaagctccggcgtgatgatgtcgccctcttttgccacatccacggcaaaggataccagtgtcggcggtacgtcgatctcgttgaagcttccggacatggaatcctttcctccgatggacggcagtccgaagccgatctgtgcattgtacgcgccaagcagcgcggcaaacggctgactccagcgcttcggctcctcactcatcctgcggaaatactcctggaaggtaaagcgcaccttgctgtaatcgccgcctgcagccacgattctcgacagagactcaagcactgcatacaccgcaccgtgatacgggctccaggaagacagatacggatcgaagccgtacgccatcatcgtgactgcatcggatttgccggtcatcaccggaatctttgccaccatggactgtgtctcggtcagctgatatttcccgccgaacggcatgtatacgcttcccgctccgatggaaccgtcgaacatctccaccagtcccttctgagaacacacattcaagtcggcaagttctgcgagccatgctttcttcatatcgcctgctgctaacgcctcggaaaccgccggtgtatcgatcttattcagataattttccttcgggtccggcatatccactgccacattggtctcctgatgtgcaccgttggtatccaggaatgcacgggataagtttacgacttcctttcctctccacgtgagcaccagtctcggctcctcggtcacaaccgcaacctcgacagcttccagattctcctccttcgcaaatgcaaggaacttctgtacatcctccggtgccactacgaccgccatacgctcctgggactctgaaattgcaagttcggttccatcaagtcccgcatatttcttcggcaccttatccagctgcacgcgcagtccgtctgccagctctccgatggcaaccgatacaccgcctgcaccgaagtcattacacttcttgatgatatgcgccacttcctcgcggcggaataatctctggatcttgcgctctgtcggcgggttacccttctgcacctctgcaccgcagactgcggtggactctgtgttatgtgccttggaagaacctgtcgcaccaccgatgccgtcacgaccggtacggccgccaagcagaatgatgatgtctcccggatcggaggtcagtctctgcaccgcacgtctcggagccgcaccgagcactgcaccgatctccatgcgcttcgccacataattcggatggtatacctccttgacataaccggttgccagaccgatctggttaccataagaactgtagccgtgtgccgcctcgcgcaccagcttcttctgcggaagcttgcccgggatcgtgtctttcacggaaaccgtcggatctgccgcaccggtcacacgcattgcctgatagacataggtacgtccggaaagcgggtcacggatcgcaccgcccagacaggttgccgcaccaccgaacggctcaatctctgtcgggtggttatgtgtctcgttcttaaagtttacaagccactcctcggtcacgccgtccacctcgatcggaacgacaatcgagcaggcattgatctcatcggattcctcctgatccatcagcttgccttcttttttgaggcgcttcatcgccattaaggcaatgtccatcaggcacacgaatttgtctgaacgtcctgcgtaaagattcttatgggtggcgaggtaatcctgataggtctcctccatcggcgcacggtaatagccgtcgtcaaaacttacgtccttaagctctgttgaaaacgtcgtatgacggcagtgatcggaccagtaggtgtccaatacgcggatctccgtcatggacgggtcgcgcttctcctcattcttaaaataattctgaatatgtaaaaagtccttgaatgtcatcgccagaccgagggaatcataaagttccttcagttctgcctcaggcatcgcagaaaatccgtcgaaaatctttacatcctctggctccgggaacgactgcaccagcgtctgcggcttctcaagaccggtctctctggagtcaaccgggttgatgcagtgctttttgatcgcctcaaactctgcatcactgatctctccctcgatcacataggtcacagccgtgcggatcagcggctcctcgttctcatttaacagcttcacacactgctcggcagaatccgctctctggtcaaactgtcccggcaggaattctacggaaaaagttctcgcgccatttaactcaaaattttcctcgtacacatcgtccaccggcggctcggaaaaaacggtaaccagagccttgcggtaggtgtcctccgatacatgctccatatcgtaacggatcagctcacgcactcccttcacgtcactgataccgagataatttctgatctctgcttccagctctcttgctctgacagcaaatgccggttttttctccacatatacgcgtcttacgttgctcatattttccctccatctgcgcacgccatcggcgaaactactgatcgtttgtatttctatcttatcttactttctatatgaagtatagcatatgcgaacaaataagcataattaatatatttaatctcttctattattatggttaatatatcacataagatttatttgacagttttataagcaggtcttataattatagctaacacgctacaaaacggttcggagcagcgctccgacagaaacgaggaaccatggatatcaattacgaattgtataaagttttctattatgttgcaacctccctcagcttttccgaggcgagcaagcagctctatatctcccagtccgccgtcagccagtcaatcaagacgctggagaaaaagctggagcagccgctttttatccggagtactaaaaaagtacagctaactccggcaggaaagattctgctcaagcatattgaacctgccatgaatttaatccggcgcggtgagagccagctgttagattccggcagcctcggtctggggcagctccacatcggcgcgagcgacaccatctgccgctattttctcgtgccgtatttaaagcagttccacaagaagttcccgaatgtcccgatcaaggtgacaaactcaacctccctcagctgtgtggagctgttggaacagggaaaagtcgatctggttgtgaccaattttcccaactctaatttaaaccagtcctacatccgcaagaccgtgtgcagctttcacgacgtctttatcgccaaccctgcttattataatctgaagcagcaggagattgccttagaggatctgcagcagtacccgatcctgatgctcgaccgcaagagcaccaccagcgaatttctgcataacctctttctgcaacaccagcttgaactgatgccgcagatcgagctgagcagcaacgatcttctgattgatctggcacgcatcggcctgggaatcgcgtttattccggactactgcctaaaccgcgagtccagagagctctttatcgtaaagatcagggaaaagctcccggcgcgccagatggtcgccgcagtcaacccgacgcttccaatcgcgcagtctacggaagaattcttaaagctcctgccgtctctcccagaactcggctaacatctgttctacttcatttacgttacatatccggcgctgttcccattcccttgggaacagccctctgtaatcactctttaaaaaccgctcgtccagcagttcaatcactcccacatcctctgtcgtccgtatcacgcgtccggccgcctgcaataccttgttcattcccggaaagcggtacgcataatcaaagcctgcccccgctctctcatcataataatgcattaaaatctcgcgttcattgctgatctgcggcagtcctgttcccacgatcaccgccccgatgagctgttcttttttcagatcaatcccctctccgaaaatacctccgagcacacagaatgccaccagtgaaccgccgcgccgtttcgatgtctcaccggaaaatgcctgtaagaaagcctcgcgctcagcctcacgcatcccggtctgctgcatcatgcaccagagacgcggctctgcatttccggaattttccgcatcattgggatgctccgcaatctctgcatcttcgggatgctccgcaatctctgcatcttcgggatgctccacaatctctgcattctctgctccttccggaaaatactcctgcggacgcatttcatccgtctccccgccctctaaaaacacatcgtagacttcctgcatcatccggtaggacggaaagaacaccatatagtttccctgcttcgcgcgcgctgttttttctatatataatgcaatccgctcatactctgccctgccacgcctcgtgtacttgctgctgacgtcatttccaaacagcagcaggcgctgttcctcggaaaacgccgtctgcgcgtagaccgcataattatccctgcgggtggacagcaggcttttataatactggatcggaagcagcgtcgccgagaaaaagatcgtcgcatttcccttgtcaatgcgctcctgcagattgagggatggatccacacagtaaaacttcagcttgaagcgcccgtcctcctcatgctctgaatacacgacataatgctcgtcgaccagctcgtagatattcatgaaattgcgcaggtttaagtaaaattcatttacttccctgcgctccgggaaatcgggacttttctgcaaatactcatcgagatctgccgcaaggcgcgtcagtgcaaagatcagcgtaccgatattttcatatacgacatagttttcgcactcacgcttgtacccaaggagaattcggttgcatttttccagatgccggatcacacgttccgcacgtctgtcatgcttttcctgatagggtttcaacagctttttagctgccagaaaatcctccttatagatcgatgcgctgtacatttcccggctccgctccacaagattgtgcgcctcatccaccagaaaaatgtagtccccgcgcgttccttccccaaagaagcgtttcagatagacattcgggtcaaagacgtaattgtaatcccctatgatgtcgtccgcccaggtcgccgtatccagcgacatctcaaacgggcagacccggtactcccgcgcctgctctaagatcacttccctggtaaaaacatcctccttctgcaacagattgtacaccgcatcgttcacgcggtcgtagtgtcctttcgcatagggacagtgtacaggattgcagtccatctcctcgcacaggcacagcttttccttcgccgtcagctggatgatcttcgcctgataccccctggtgcgcaaaagttcaaatgcttcctttgccaccgtgcccgtgatcgtcttcgccgtcagataaaaaatcttgtccccgagtccctcgccgaccgccttcaccgccggaaagaccgtcgaaatggtcttcccgacgcctgtgggtgcctggataaacagattcttccggcgcgcaatcgtgcggtatacgtccgacgccagttctttctgtcctttccggtatgcatagggaaactccagctttttgatggaagcctgccgcagattctgccaggcgaactgaaaatccgcccactttttgtattcatcggtcagccgggtgaaccactccgccagctccgcaaacgaaaatgtttcccggaagtatttcagattccccagaaacgccgtctttgtcagttcgattgtatccagattgcagtaggtcagctgcacggagatctccgcaagatcatgctgcaaggcatagatataggcataacacatcgcctgcgcgcgatgcacgcccacgggttcatccagcgcatccagattcatgtagatccccttgatctcatcaatcgtcacatgcatgtcttcctccaccgtaagatggttgaagttatccgaaaaatcaagctgtctctccccgtcgcacgtaatctcgattccgtccgcccgtccctcgatggcaagcgtgtaatctccctcgctaagttcgatcttaagcggcacctccgcatggtaattcgcgcctttgctcttctgaatgcgcttatggatacggctgccctcccacatggcctccggggacgcagttctcccgtggcggttatcaatgtctccctcccgcagaataaactccaccagattccgcaccgagatctttatgattttcttttcgtctttttcctgttgtgcatccatacggcagcgctccctactttccggtttcttatcatacagtgtaacacaaaaacagggctgctgcacgaagaggtttctctccggcagcagccctgtcaccgtctgtctgactagcagactgcatatttctgtaccgtattctcaaacccggtgttctgtccgccgtattttacggtcagatccttgctgagtccaagatacagcattccgagcagtgattttgcatcaatcacagctctgttataacaaacatcgatatcaaaatcacattttccggcagctctcacaaactcctttacttcctccgtgtcagacaatctgatttttctctctatcatattattcatcctttcctactataaaccaaacgtgtttctctgatttccgcgcaattattgcataatttttattctttgtcaaatttgacgcaaccggtaaaccacttgaaagtacgggcaatctgctcatttctgtgcccgatttttgccgttttttgcaatctctttttgcgattttctctcaaaaagcaaactgcataattattcttgtgcacactttctcatttcctgcaaaggtacgtttcgtttttgtaatattttcacatattttttccccagagaaaactatttttcatctctcagtttcctaagattctgcttgagagcctccacggcgcggtcgatctctttccttgtcgtctctcccgacaacgtcatgcgcacagtacccgctgcatattcgtccggcacacccaatgccccgattacataggagacccgctcctcaccggtgttgcaggcagaaccgcccgaggcgcagattccatcctcatacagcagaatgaggagcgatgcaccgtccacgccggaaaagctcacattcacatttcctggcaggcggttcgtgggatgtccgttcaggcggacccccttgatctcatgcatgatcttttcaatcagataattgcgcagcatcatctccctgcggattcttctgcgcatattgcagaatgccagttccaccgctttccccatcccgacgatccccggcacattctccgttcccgcgcgttttccacgctcctggctgccgccgtggataaaggaaggcatcgtaaccccgtctcttacatacaaaaatcccacgcctttcggtccgtgaaatttgtgggcgctcgcactcagcagatcgatgtgatactgctgcatcgagatcgggatctgggcatacgcctgcaccgcatccgtatgaaacagaatctgatggtctcttgcaaaccttccgatctgcatgaccggttcgatcgttccgacctcattgtttccaaacatgaccgagatcaggatcgtatcctcccggacggcatgctctaactgttccagcgagatcattccgttttgatcgacgtccagataagtcacctcgtagccctgctcctcaagataatggcaggagtttaagaccgcgtgatgttcaatcctgctggtgatgatatgacgaccgtattttccatacgcttccgccacccccttgatagcccagttatccgcctccgatccccccgatgtaaaatagatttccgacggtctggcatccagtgatgctgcaatcacctctctcgcatgggcaatcgccgcctgcgcttcctccccgtaaccgtaagtcgttgatgcattgccaaacttttccaccagataaggctgcatagcggcttcggcctcctccgccatccgcgttgttgcagcattatccagatagaccacacctgctttatattcctgatcgcacatttttcccccacaccttacatataataaaaagattccaattcccggagacacacttgccagacattcattttcccaggaattccgtttctggaaattctctgaaaaattccctgatcaccggcacactgctgctcacactcgccggtgtgctcacacggattatcggcttcttctatagaatattcctctcaaggctgattggtgcagaaggtcttgggatctaccagctgctgtccccggtgatggcgctcggtttcgccgtcaccgccgccggaattcagactgcgatctcacgcttcgtctcctccgagcttgcgcagaacaatcccgcgggtgcgaggctctattttcggatcggcctgctgctgtcgttgtttttatctgccgcgaccggctttgtaatctggaaatacgcaggctttatcggtgtttccatgctcggggatgtgcggtgcatcccgctccttaagatcatctccctctcctttgtcccttgctgtatccacgcctgcatcaacggctgctactatggacagaaaaagacgggcgtccccgctctcacacagctcacagaacagatcgcccgcgtcggcacggtctggctgctctatcagatccatatgcgggagcagaccgccgttccgctctccgtcacaatgtggggagctgtgatgggcgaagtggtaagcacgctcgtttccgtcagcgtcgcaaaacttccggagggaacagacactgcactttccgtaaaatgcggcacgcgcaatctcctggccatggcggttccgctcacggcgaaccgggttgttttaacactcttttccagttttgaaaatatcatgattcccagccgcctgcgcctgttcggttacacggcttccgaggcgcttggcgtctacggcattttaacgggcatggcaatgtccgtcatcatgtttccgtccgtcatcaccaactccgtttcagtgcttcttatgcccgccatctcagaggccaaagccggcggaaacgatgcactcatccggcgcgcggtcttaaaaaccatccgggtctgtcttctgtggggctttttctgtacagcgggttttcttgctaccggccactttatcgggaatgtgctctttgggaacgcgctcgccggaacatttatacggacgctcggctggatctgtcctttcctgtacctcggcgtgacgctgagcagtattctgcacgggctcggctacccgggcatcactttcgtgctgaatctgattgcctgcggcatccgcatcctctttgtgctgtttgccctccccgtctacggcatccgcggctatctgtgcggacttctcatcagtcaggccgtcatggctctccttgccatcggaattctgctgcgccagacacattttaatgcctaaccacgcgctgctactcgtaatcgcgcaattggagacatcaacctgctcgaacgccacctgataaccgtttaaaatggtcgtctccaggtctcccgcatccagtttttccgcaacactctgcatcagtggatcggaagctgcgctctccaatgtgcttcccaccagcgcactgctccggtggcttaaaatcatgttgtcgctggtatccaccagaaaggctgccgcatcttccatctccaccaaataccgccagaatcattttaatttctggggacagtgactttgtaccagccgccaagaatgcccgacgagagggtattgatttcattttagacccaatgcattcgccaatacgagacgatttatacgaacacattgacggaataagaataaaagctcctaaattagaaaaacaaaacgttacataaagaaagcccccggaacttgatatttccgggggttgtgtttctcatcttgaaccgaagtccattttcaattaaactctggacagatactcgcctgtacgtgtgtcgatcttgatcacatcgccctgttctacgaacagaggtacatatacggtagctcctgtctcgacgattgccggcttggttgcaccagtagcggtatcgcccttgaagcccggctcagtctcagtgatctgaagctctacgaacagaggcggctctactgcgaatacgcttccgttgtgagagcacatcttcaccatctcgttctccttcacgaacttcagcgcatcgccgatgtcatctttggagagtgcgatctgctcataagtctctgcatccatgaagttgtataagtcaccatctgcatacagataagtgtaatcttttctgtcaatgcgggcagtcggacatttctctgtaggacggaatgtcttctcaaccacaccaccactcttaatattctttaacttagttcttacaaatgctgcaccttttcctggtttcacatgctggaattcgataatctgatagatattaccctctaactcaatggtaataccatttctgaaatcgcctgctgaaatcatgtaaatttcctccttaaaaatacgctcgagttttactctctgatttttctattttataataaacagcgctatatttcaagctttttttcatataccgcaatgtgtcatgcgaatttacacactttttaatctgctttgaacctgattcacacgatatccttatgcgttgtgtctctcaatctcatggatcatatcgattctggtctggtgccttccaccctggaattctgcatccagatatgccctgacgatatctttcgcaagctctgttccgacgattctggcaccaaatgcgataatgttggcattattgtgttcttttaccagacgcgcggtcgctgtatcggagcacaccgctgcgcgcacgccgttgactttattggctgcgatggagattcccacgccggttccgcagatcagcacgccgcagtcagcctcgcctgccacaactgccctgccgactttctctccgtattccgggtaattgcagctttccgttccatcggttccgaaattgataacctcatgtcccagctcctttaaatagtccataatgacaaattttaactctgttgctgcgtggtcatttccgattgctattttcattttttcctccatcccgggttttctgcgcccgtccttttcattgtcacatgctgccactgttttctgcagcccaaactgcttcttttattgcttctgtgccgctctctgctgcttttggcattttctctggtagaaaaacagaacgatcttttccagatagcgctttaagacaatctggatctcctccttcggatggatcggctttaccagaatcgtgcggattcccgtgcggttggcgccatagacatccgtaaaaatctgatctcccacaaacaatgtgtttttctcatccgttcccatctgttccatcgcttttctgtaattcgccggattcggctttcctgccttgtagatataagaaacctgcaccgcgtcattgaacattttcacgcgcggttccttattgttcgacagcagcatgcaatgatatcccagctccttcaaatgtgcaaaaagcgcgcacgcccgctcatccgccggcgctccgtgcggcaccagcgtattatcaatatcaaaaataacgcctcgatatccatccccataaaggcggtcaaaatcgatctcataggtagaatctacgtattctcccgggtaaaaccgttccagcattgcccttttgctcctttactcatctcactcagtgcgtatccttacatagattactacattttcgccaaaatatccacccggaattttccgattcgcgcagttcgtttttctcagagcgtttttgtgtaataggaacaaagtttcctattacacaaaaaagactgcatacacatgtgtatacagtcccatccgctcatgattctatagtataaaattctcatccggtctgaccggctgtgcctcgtcaggattcgttcctacaaaaaactgatactgctcgagcacctgatccctgcgcatgtccgaaatggcgcgctcgacatccagtctggcaatatcgctgtccacgccctttaactcgtagactgcatccggctggtagctgttcgcgtaatcgatggctccctgatccggtccgctcttcctgctgactgcaggcgcagcatgctcttctgcagacggtgcctgatccgtaacactctgcgggagttccgccggcagttccgatcccacggtaacagctcgattctctatggaattgtaatcataaaatcccgcactaatgcggattcctgacaaattcattagaaactctccattgtaaccataaactatcactataactttttattatatcgacaataaacgacagaatctttaccttctactcttatttgtcgagcatttttttcagttcgctcataaacgtgttgacatccttgaactcacggtacaccgacgcaaaacggacgtaggcaaccgcctcgagatccttgagcttatccatcacaagctcaccgatcagggaactcggaatctccttctcctcacggttaaagatctccgtctccacttcatccacaagctgattgatctgattgactgagatcggccgcttatggcaggcgcgcagcactccaccctcaatcttggaacggtcatactgctctctcgtgttatctttcttaatcacaatcagcggaatggtctccaccttttcataggtggtaaagcgttttccgcaatcatcgcaaagtctgcggcggcggatggaattgttgtcatctgccggtctggaatcgatcactcgtgtattttcactgctgcaaaatggacacttcatttgctacctccatgggcaattttgcctatatattgtagtatatctatacatttgtggcttgtcaatgaaatttacacgattatatgaccagttttttatatattttcacgaaattttcattttttgcataaactttctgttttattgtccccttcgcctattttaccttatgttttgcctctttctcatcaatgtccaccagaataatgtccggtccgatttttacaatcttgcaccacggaataaacaattcaaactccctgcccatacagcccatccactttgccggccctgggacaatcagcgccttgatgcatccgtcgcactcgtcaaaatccagatcccgcacatttcccagacacttgcagtcatttacattgatgacctctttcctcgccagatcgcaaaaacgcatatacttcccgcccgtttgtttcctcggaaaagtatatgcgtcttttttcaaaatcatgcctgtctgaaattatacgttaaagcggaacagaatcacatctccgtcctttaccacataatccttgccttccattccgacaatacctttttcacgcgctgcagcgaggcttccgttgtccagaagatcctggtagttgacaacttccgccttgataaagcctctctcgaagtccgtatgaatcttgccggctgcctgcggtgccttggttcccttcttgatcgtccatgcacggcactcatcctcgcctgccgtcaaaaagctgatcagaccgagaatactgtagcttgccgccaccagcttgtccagtccgctggattccacgccgagatcgtccaggtattccttcttctcttcctctgaaagttctgccagttcctgctcgatctgcgcacagatgacgaatacctttgcgccctcttctgctgccatctctcttacttttgcgacgtgcggatttgatgcgccgtcatctgcgaggtcatcttcggcgacattcgctgcatagatcgtaggctttgccgtcaaaagattgtatcccttgaaccagatctgtgcgtcctcgtcatccggcacctcaaaagatcttgccatcttgccgtcctcaagatgtgccttgaccgcctctacaagttcgagctcctttgcaagtgtcttgtccattctcgcctgctttgcaatctttgcgattcttctttcaaggatctcaatatcagaaaagatcagctctaaattgatggtctcaatatctcttgccggatcgatcgatccgtctacatggatgatgttggtatcttcaaaacagcgcactacatgaacgatcgcgtccacctcacggatattcgcaaggaactggttgccaagcccctcgcccttgcttgctcccttcacaagacctgcgatatccacaaattcgatcgttgcaggtgttaccttcttggtatgataaagctcaccgagctttacgattctctcatccggaacagaaacgataccgatattcggatcgatggttgcaaatggatagtttgcagacagcgctcctgctttggtcagtgaattaaataatgtagactttccgacattcggaagtccgacgattcctaatttcatatatatctatctcctttatttcctttttacgggctttttgctacataccgctttgactgctgcgcacttctcacaaaatccgtcctgtgcttcggcggatcaacactcctcgcagctgtcttgtggcactattctaagaaccccaaattagcacgattattatacactaacaggggctcgtttgcaatgttatttcatttttcagaacgctcaggcgtatccatggaagagattcttggcataggaaccgcgcttgctccaacccagaaccggaaatatttctcactttctctttgtaaaatattatactgtatcttccaatccccggatgatgttcaaataatccggtctatggtctacgacagcataaataatagcttcctgcttctcctcatttatcttgtaaaacacaagatttttctcaagtaccagtactttatacccctgtcttttaagcaccagataacgaagttctacacatttttgcggatacttgcctaagtcaagaagattccgttctaattcttcaagtttttcaagtgcaacttcccttccaaagttttctgctacatacaaaataatctttcggatctgagcatctgcagtttctgtccggacaactttataattcaatattctatccctcccgcagcatctgcctcaaatcctcaaaggtctcaccgagtggcgctactcttgcgttcctcacatcatcttcttccgtattgtctccataaaatcacctttctcgaatacatcgaatatacctcacctgaaatccatctgatacgatgaccttcagatacaaagaaagaccgctcactttcaatttttcttgaaaatgaacggtctttcatgcctctgttatttagttgaatgatgatgatattattttctctttgatacgtttccgaagccgcagtccaatacgactgagacattcacaccatctgaaattacttttttgtatgtttttcggtcactctggtcaaacctgaaaaacctctcaaagtgtcggaagtcgagaagttttacaaatctgttcgatgtagtacaactatcgtctccacatgaaaggactgctgtctatgaattaccatcgtgaaaggaaacatatccatgaaccttttaacaataggtcgaggctatcgttaaaaagtgtcaccactgaaaacaattttttaactgttctctacttttgaattgcttctataatatatgtctttccttggaaaggaacctcatctccaatccagcagcaagcaatttttgtttctgtgcaagcagctctgtatttcctggatcaagttttaataacttgtccacgtccttcaactgctgctgtatactttttatctgaccgtttacgcattttaatgtcacttgtagtttggcggtatctccgccgatctcgacagtaatacccataattctgttagccacggccgatacctccttccgtaaaaatgggcataaaaaagcacagatttctccattcacgaaaaaagcaccaaccatttctgattgatgctttcaaattattttgtttttgtaaatctgtttaattgcgtatccacatctcgtccaccgtacataacacggataatcgtaaccacttgtgtatcatcatccggaatatatagaataagataattgtctactggcgctacgcgtagccctcgacttttccatggttccaattcatattgtcgatatctcttcggcatatgatcaagatccataatacatgcttcaagcctatcaagctgaccacttgcattttctggtgcctgcagttcaaaagcaatgtattccaagattccacgaaggtctatctcggcctgatctgaaatcacgatatcataaatcataaattgtaatccttgcggagatcagcaaaaacagattttgctgatctagtgcgaccagcctgcatatccgcatatcctttctctagttctgcattcatctgtgcttctgataatgcactaacgtctacaggacgagcggatggcattttcacttcaaaaggaagtcctctttgaagaataatttgtttgtaaaacatatttattgcattggatgcaggaattcctaatgctgctaagattccttctgcctgttcttttacatcaggctcaatgcgtgcgtatacatttgctgattttgttgccatagtaaacactcctttcgagtttttctaactatattatatctatttgtacggacaaaggcaatacaaaatcaatattttacaaattgtttatactccaaaatctaccagttgattaaaatttgtcgaagtcctcctgagtcgccactttcttatatcctttataatcatcgtcactgttttcagcatacatatcattcacgaggccaatggtaagcaaatccaggtctcggatactaatccccagctgtacgcaacgaagcaaaaataaaggtgttgtcatcggacgatctgttggacgaacttttacggattggaatgtgagggaaattctcgtgtattgtgttaagcacatccctatatcctgcaatctcccgctcatttcttgtctttggcattgtcttatccaaaacaatctttttcaaacgttcatcagaagtatagataccctcaattttattagaactctctgtactttgaatcttagccacctcaacaagactttctaatacatccgcatggtgttccgcaattaagcgctgttcccccttgtattcatgaattgttgtaaggtaacgcacgatttctggcgtaagcatttttttccattttttcgtgtaatcaaattgtctcattctaattacctcattttgaactcaacttcgtcatttcattcattatgacgcaattgaaaaaggaccagcccaaactgatcctaatcctctatcacatcctcgattctattgtctctcaaataagaagaaaaagccaggcctcatgctctgcttaatctccaatgcatttcattacaaaaaatgacatcatcgtatagcaaatacataaataccccggcaccgcatgctatatgtgtaccacatccgaggcaaaccatacccttacacctcaatctcacgcccgtgaatatcggtcatacacagccggtttctcccccgcctcttcacacggtagagcgtctgatccgccacgtggaggaaatcccagttcttgttcccgttgcttgggatgtcatggcagatgccctgcgagatggtcacaccgaaagcgccctctgtatagcgctgttctatttgaagcgccatcacatcctgccgcagcttctccgcgcgctcacagacctcctccgcgctcattccactgtaaatgatgacgaattcatctccaccgtagcgcgcacagaaaatctgatcactttccatctgccggatcaatgccgcgatggcacgcacacagtcatcccccgcctgatgtccgtaacggtcgttgtactgcttaaagtaatcaatatccaaaatctcaaacgacaacggtttatgttccgcaaagcactgttccacgatcttttctgaatcatttgtcaggcggtaccggttcgccagtccggtcagcggatctctctccgacttttccgtcagctccaccgcatcctcctccagcttcctgcagcgctctcttgcccgctctaaggatttgcgcagataaagcatattgacaatcatgcttctgttttcctgttccacgatctcggtcagttcatagaatctgccagccgtcttaagatagcgttccctgtccttcgttttcttaacataatccatctctagcgctgtcatcttccgctgcatattggcgatgccggtctgctccacgagtgccttcagtttttctccgatattgcggcagacatcaccgcggtcaatctctaacatcagttcacagaaatcatacagatcatcaaacagatccagaatcagtacatccccagaaagctgattctgaatatccgcaatatactggtctctcatggaaatattgccacacagatgacagtaacgtgcacgcatacagtttacataaatgtaatccatctcctcaaaatgcgcttcgcactctgtctccagtttgcggatatattcctctgccttctccaggctgccgcttttcatataacacagggccagattgttgtaaatcgcggtaaggcttgccaggctgcgctcctcttccggtacgcgcttgtaatcgagatgtgcctgctccagataatctctggcatcactgtactgtccgcactccatatacagggaacccaggttactctcaatccggctttccacctcaatcagctcatattttttgcaatattttaatcctgccagatagtactcgatcgcaaacgacagattgcccttgccgacggatacaatcgccataagattgtaggcggctgccaccagttcccactgcccggactgttccagatatccgagtgcctcgccgatctcctcaaacacctttccggtctcattgctaagatagtaggttctgcccttgtaataatgcgaaaatccaagcagcctggcatcccccgcacgttctgcgtattcctcaatctgcgtgcagtagtcaagcatgcacgccgcatccgtgccgcggccctctctcactttctgcatcagatcttccatccggtcatcggtcttatgattttccctagcaagactcctttgcttttatctgttcgttcgcgctgcaatattttcttaacttctacacaaatacatacttccggagacgctccatcgcttcctccacaagtgaaaatggcagcgccagattcatgcggatgccgcacgggctgtggaacggtctgccatcctgccagatcacaccgatgctggcgccccgcttctgcagctcatcgatcgttatgccatgctttctgcaccactctgtgcagtctaagagcagcatgtaggttccctgtggcatagctacctgtacgcccttaaaatgggatctgatataatcatacgcatattctgcattcttcgtcaataccttacataattcatctgtccactcatagccttcctgctgatacgcaccgatgagtgcatacatggaaagcacgttcatttcattgtaatgtgacagcgatgattcctttttcacgcggtcacggataacgggattgtaaataatatgataacttcccaccagacccgcaagattaaaggtttttgacggtgcgtacattgccaccgtgtgcattctggcatactcggaaacgctctgcgtcggcacgaattggtgatccccgaggatgatatccgaccagatctcatccgcaaccacctcgacctgatacttctcatagatttccatggcacgctcgatctcccagcgctcccacaccctgccgcacggattgtgcggggagcagaaaattgccgcatgaatgtggttctcgcagatttttttctccatgtcttcataatccatgcgccacacaccattctcatccagcacaagcggactgtgcacgatctcatacccgttgtttttcaggctgaaggtaaatccgatgtaggtcggcgaatgcacgagcaccttatctccccgcgaacagaacacattgagtgcgcttaagacaccgccgagcaccccgttttcgtagccgatgcattctctcgtcagcccctgtacgccattccttttcgcatgccagcggattattgcatcgaaatattcctctcttggctcaaaatacccaaatgccggatgtgcgatacgatctgtcatcgccttctgtaccgacggcaccgtggcaaaattcatatccgccacccacatcggaagcaccgaaaatccttcctgcacctgcacgtccttgtagggaatcttatctactgccagtgcgtcttttccttttcgatccataatcgttgtaaaatcaaatttcatccttttttcctctttcttctcactgccatggtcgccgcaaagagcaccacggctgccgccgatattacggctcccgtcagaaatccggggcttttgtaccgcagttcaaactcatgtgttccttccgtcagataggtgctgataaaagcgccgccaaacgtctcactgtccgttttctttccgtccacatacagcgtccagccatcctcatccgcgatggaaaaaatcagtctgcccgcctgtgtgacgtccacgtttccctttaccctggtatcggaaacttccgtcacttccaccgtctgtgcggcaagcgcctcataggccgtacgaagcgccatgagatccagccggtaaaccacaagctgcaccagctcattggcggtgttagtaacttttacctcttctcccgcctcacaatatcccaaatccagaatatatccgtgggaaacttttgtaaagcctctggttcttcccgagcttacctgctcctgcagattgtcaacgcccgtcttgctgtaggtggcataataatatgcggaatcctgcgcgacaaaagagctctctcccgcctttgattcggattccaccgcggtaagaagcagtctgtcgcttcccagaagattggcgagctgattctgtgtgccgatgtcgcctccgccggcatagtcccatttttccgccacatcttcatccatcatgaatcccagcggcagcacatacgcattctcatacagatacgtgtctccactctgcgccacaagtgtgcggagcggtccttcctccatcgcattgtccgcaagcacatagcggatggaaagcattgccgaaagaagcggtgtcgcaccgccggcacaataaaagttcttgccgccctccattccgacatcctgataaaaatggctgacattcagattcatcagggatgagaactgtgtgccggagtggtagccggacagcgccgcatcatttttggtcttgcgctccagttcctccgtccggtaaaacacggaatcttcatcacttttttccgccgtctccgaaagaactgcccggtaatccgccagatttttcacataatccgtcctgcttatcgtgtcaagccctgtcaggttatagttgatcacaagctccgccacaaccgcaaggcacccggtcgccagcatcagctgccggattctcttttttcctatgagtatgccgagtacaatcacaaaatagcaggcaaagaatgccccgcttgcccatatggaggtctgctccatcgtcgtttcgtccataaaatgattgcagaaaagcaggaatacaacgctcattccacccgctgcaaacacctgccacagctttaattcacggatgtaaagcagcgcctcataagcaatcacaagtaccagaaacgcgtacaaaaaagactgtcttcccggaagtgatgtcgggaaatgaagaccatgccagataaaatccagcatattatttgaaaagctaagccagaaaaacacgacgagtgccagtcttggcagttttttcttccatggaaccgctctgttccacacatacagaaacagcagaaagagcgcaaaaattccgcagtacagattgggccagtgggaatctcccgtgtatacatcgactgccagaagggaccgcgccagctccgatacgatattaaaataccactccatcgtctccgggaacgatattccggatgcaccgcttaaggagagcacctttgccgtcggaaggatcagcactgcgcctgtggctcccgcaagcagcgaataccacgcaaagcggatccatgcccggtaccccgatgcccggtgttccatccagtagagcaaaaaccacagcaccagaaaaatgcagatcatgattgaaatatagtaattgctcagaatgcagaccgccagcgacacataataaagccccggtctgttatcccggatcagccgctctaatcccagaatcacaagcggcgcaagcaccatgcagtccgtccacatcagattccaggcatatgccgccataaacgcgcacagcgcatacgccgcaccgcacagagctgccgcataggatgccacatctgccggaaggcgcactgccgtcttcttctctgtccgtgtgactgccgccgcatttccggcatcctgccacacgtgaaaatgctcccccaggtaataggtaaacgtaagaccgctcagtgcaatcttaaggatggacagaaccgtcataaattcaatcacatatcccctcggccacagaatcaaaagccagtttaacgggctggcaaggtagtacgcatacagggatacaaaatccgctcccagcccgatgttccacgaatagaacggactgcctcccgttttgagtttttccatcagctctgtaaaaaacggacaatactgatggtacatatcaatatgaagcatacactgatccccgaacggatagatttcccggttcacacagatgatcagcgtgatcagaagcggtatgcaaaacgctgccagtaacggtcctctctttttcattctccagactcctcttcccagtcaaacatgaaataatactgaagtttgcggtaaatatccatctcgccgtactcctccttcgccggagtctcacttccgtccgcttccacggtacgcaccgccgatatcaccggatacgattcctttaatgtcagcagaaaattctgataggcatccgtgggtaccccggcgcgctttagcacctctgctcccagataatttgcgctggtgtccgcattctgttcctcatcaatatcgtaattcgcccagatgacatacggcacctggtagcgcagtttttgctgttcctcatccagcgcattccactgcatgccgttcatggcaagaatcggcgccgccaccgtatcgctcggctgatgatccccgaaaaagacgatgaccgtcttctcatccacaccggagaaataatcgatcagctgctctaatgcctgatccgacagctttatcagcgaaaaatattggctgactgatatactgttcacaccgtccaccgaaatacccggtgagaagttcgtgtaggtctggtcgtatcccccgtggttctgcatcgtcacattaaagacaaacagtggtctgccctcctccttctgctcatacagctggatgattttgtccgcacagcttgcatcgctcacataatctctgacaaaacgtgccccgtaatactgatctttaaaaatactctgctcaaatcccagccacggatagaccttgtcacggttccagccggtcgcataatagggatgggtcgccaccgtctcatacccgagcgactgcagataggatgctaacgacgggcgctctccgctcacatactgctgatacggaatacttccctgcggcaggaacgccatcgtattcccggtcagaaactcatactccgtatctgcggtatttccaccgcacaccgagacattcaacatgccggtcacggtattttccgccccctgctgcaggctgtgcagaaacggcatatagtcctcattggtcttaaaatcccctaatacggacagatccgaaaacgactcattcatcacgacaatgatattcggcatcccggtatctgcaccgctctgcgaagtgtcatccgaggtatctttttcctcttcctccaggattgtatcgatcgactcctccgtctcctgcggtttctcgtatttttttaaaaattcctttgcctcgcccacactgtatttctgcggtttctcaatcgacatatacgcaaggttcatcacaaaagtaaccggtattccgtccacctgtgtcataaagacgggtgtaaacagcttattgtaaagcctgtgctcgttctggaaattctcctgctgcaaggttcccgcaaacatcacaagcaccgcgccaagcaccacgcccggcaggcaccgcttaaaaaatccgggtctgccaattttaaacttcaccggctgcaatccaatgatcagcgccagaaacagaattgtcacaacgatcatgcgcgtatccggtgtaaagtcataattgccggacacacttaccgccgtcctccaggacagaatgtcccacggtaccagcgggttggtgcggaaacgcaccacataggcattagcaagcccgaatatcatcgccgcggtaccctcgatccggtatgccgcccggagccgtccggtgatgcacaaaaaaatcccggcgagcagttcaaacaatacaatattaaaaagctgcgcccatggccgtacctctgcaaacggattgtgtgtgtaaaactccagcaaataaaaaaatccggcgggaggaatcaatgccacggttccccacatcacatacttggtatattttaataaagtttttctctgactcattttgactgcctcatattattttggttcttattttagcacactgcatttgtttttcctatttaattcgcaaaaaattcacaaaggcacttctgtatgttcttccagttttccacatactttgtcgaatatgactcattttttgacacatcttgttaatagaccgctttgattcacacaattcaaacaactttcattgacatccgaaagttcttcgactatgcttacacttgtatgataaattcatggaaaaggtggctgttatgaacgagaatctcgaattgaaccgcttagcaaaagaaaacgataatttcaaaaaaattattcagacacagcagaataccatcaaccgcatgattgattattttattctgggggagaaaaaacctggactgcaaaagtagcttttttcgtgtgacgatgctataataagcacacagaaaactatcttttacaacacatgatttcacggaggataaaaccatgttccaatttacagatgactgcctgattggaatcaaggagctggacgacgagcaccgccgtctgttctcattgatcaatcaggccatggacgtactcagtcataccgattccaacgaccgctgcacccagatcacccatctgctggaggagctgactcagtatgccgatacccattttgcgcatgaggaggcttacatggagcagatccgcgatccggagctgatccgtcagcgcatgcagcactctcttttccgcgacaaaatccgcgatttttcctttgcagacattgatgacccccaaaaacagcagcaggttgtcaccgatcttttgaattttcttgccaaatggctgtatcaccatattctcggaagcgacatcatgatcggcaaactgccgccgttagaggaatggatgatccgcgacaacccgtgtgaattcacagacgattatctgactggcatcgaattagtagattccgagcatcagcagctcttttgcatcgtggagcgcgcctatcagctggtaaaatccaacgacgtcattacgtgctacgatgagcttttatccatcatccacgagctgacggattataccgtaacccacttttccgatgaggaggcttacatggagaagatcggttatgaggggcttgccgcacagaaaaatgcgcacgcttccttcatcgccagacttgagagcatcaacctgatcgagttggatgagaatccgcaaaaatatatggagagcctgatcgaattcctgctgggatggctgatcaaccatatcctctattccgataaaaagattcctgtccaggcataaccaccgcggacaggcacagacatacaccgtacacacatttatgccgtacgcatttcaagttcttaaacatgcgctgcggatccagcatacaaaaggagctgtgaataatattcacagctccttttgtatgctcttttcaatataatgccggcggccggacttgaaccggcacgaggttgcccccgtcagattttgagtctgatgcgtctgccattccgccacgccggcagtcttgcgatcggatctctccgtctcgctcacgcacgatttatcatatcataccctccttcatattgcaaccacatttttcacttttcacacctcactcctcttcctgatttcattgacaaaagttatcatatatgataactttatagcagacgattttttacggaacacctgtatttttcaggagaattgagggattcatgaaggaacaaagcccgcttaccccgcgctatgaggtcgtggaacagctaaagagcgcgcgcaaggcgcagaatgtgacgcaggaggtgctcgcagaacgcgtaggcaccaagaaatccaatatatcccgttttgagagcggccgttacaatcccagccttgattttctgattaaggttgccgacagtctcgggaagcagattcagatcaggattcgttaagcatgaaggaggagtttttatgacaaaaggaaagattttaggtgatattcaccagattgacaaagacgtggagctgtgccgcaccaccaatgaacgcatcagcaatcaggcggcacagcttctgattgagaaccagatcccctttacccggggctggatcaaggttccgttttttcttcgggaaaaataccgcggtgcacatcagatctatgtgatccgcacgaaccgcaaccgctacgggcaggcaagacgcaccatcgaccagctggacacttctttccggcgcagactgatcttaagcaactactgatccgtacgcacgccatgttcctgcactgtttgcgccatcagtttctcaaacagtgccagaaactttttttccacttcccgcatcgggcactcccggtattccggcagcaccgccgcctgcggtgccacatcaaataatttttctcccgtgaaatgttcaaattcataatacaggcaggtatcatccatgcgctttacaatctcgcgctcccgctccgtcggcggcgcaatcaggtatttttcatagatcatctcctgaagcacctgctcaatcctgcggtattcgggcagacagcccttcaccggcctggtgatatccgacagatatgcctcgctcgcatcgtgcagcagacacgccagaacctccctgctgctgcgcccttcggcctgcgccattgcagcacagtccaggctatgctgcgcaacagaataaaataccggaaaatgcccgttggcacgtgtcattaacgacagcgcatgtgcaatatcctcgatacagatttcttccggtctggggtctgccggtgacatatgtattccggaaaatgtgcgaatcttctctctcattccgtttcctccatgctcttcttcaaaagacgatacaatgctgcggtatccaccggctttgcaatatgtccgttcattcccgcattcaacgccgcactgatgtcctcggtgtatgcatttgcagtcattgcatagatcggtatctctccggcatccgggcggctgctcttctgtgcgcggatcgctttcgccgcttcatagccattcattccaggcatctggacatccatcaggactgccatataggttcccggtgctgattccatataccgctccactgcttcctcaccgttccacgcatgatccacatgcatgttcacaagctccagcagctccgtgacaatctccgcgttcatctcggtatcttccgcaagaagaatccgtctgccgccaaaatcataagactctgacgcatcttcttctgcttcaccttcccccgtctcttctgctttttgctttttctcatccactgcgtgtgccagcggcagggatactgtaaaggttgttccgacacccttcttcgactggcaggagatcgatccacccatcagttccaccagatttttggcgatagaaagtccgagtccgcttccgccgtgatgctgtgccgtctcggcctcctcctgctcaaacggcaggaacagccgctcctgcatttcctcgctcattccctcgccggtatccgtcaccacaaatttatagaagaactgttcctgctgcattggcagttcgctgaccgtcacgcggatactcccgccctctggcgtaaacttataggcgttggaaatcagattcagcaatacctgattgaggcgcagcacatcgccttggacctgctccacctgtacctcgtccatctccacggtaaaggcaatctttttctgctcacactgcgttccatatactgctgaaattgaatccaacacctcttttaaggaaaacggtgcctgcgcaattttaatcttgttgctctcgatcgcagacatatcaagtacgtcatttacaatcgcaagcagcactttggatgaggtatcgatcttatccagacactcttctacccctcccccttcatcgctgcggtgtcttgcgatctcagtcagccccacaatggcattgatcggcgtacgaatctcatggctcatccgcgcaaggaactgtccctttgcctcattggcgctgttggcctgtgccaccgccacagcgagctgctcgtttttctcttccaacttgtggtaatttctgcgtctcaaaagttcaaatgcaaccatccatgcgacaatctgcagcagaaggatgccgatcacggctatcggataacggaacttgtacaccatatcggagagtgtcggctcataggcggttgccagcgtgtgatccaccttaaactgggcaatctctttttctgatatcatcccaatgcacttgttcaaaatctttatcagcatgcggtgttcctcgctgtccaacccgacgattcccgtattttcctccataaaaaaagtcgggacagcagcaagttcctcataatagggatttgccagatacggcgtcagcacgctgacattctgcgccgcaaaatctgcttttccgtccaaaaccatggccagacagtcttctaagttcttctcctcacagatctcaaactgtggtgcattcatctggatataatgttccagcccgacatagcttgccggaattgccagacggtatgaaacatcgtccgcatccacatcatattcctgtccgtttcttccgaccagtgcgacgtcatccgtataaaagctgtccgtcagaatatagggctccttctggaaatcaggattgtccgagagcacccctgcaaccagactgtccggatacttagacagatagtccgccgtgcgcattccctgcggcatcatcacatactgaaatgtcagaccgctgcgctctgacagcagatccagaatgtcaactgtaataccgtcgacatttccttccgcgttccggtaggacaacggtgctcttgaagcaataaacgccaccgtaatcacgcctgacccttgaatgtattctgcttcctctctggtaaagacgacctctccctccgcctccttctccccgtaatatttctgatagagatccgtctgaaacgaagctccagcctcggcaatctgcccgagcgcctcgtttacctcggcaagcagttccttgttctgcctcccagtcataatatagaacggatcggaaccgaagcggcagatgatcttgtaatccgtcttgagtgcaagacttcccatggcaaccgcgtcaatctcgccgcgatcgagcgcaccaaaacatgcctcctgcgtgtcatagatgctctcctcgtaggaaaatcccttttcggcggcatagtccctgaattcctgattctggaagctgtccctaagcatacctacgcgcatgccgttataggcggcatagtcattgtagtagtaaatatcgttctctttactcacgtacagaacactcgtctccgccccgatggcatagtccgaaaaaagatactgcttctcccgctcttttgttcgctgcgcctggcagatcatatcgatctcaccggtctcaagtttttttaactgctgatcccagctgtcatactcgaattcatactcccagccggtatattctgcaattttgcgcagatattccacaccgtagcccgtgtaggttccgtccttttcttcagtaataaatccatcataatcgatatacccgactttgattacatgccttttctcctgatccgccactgccgccgtcacactcaaagcactgcacagcacacagcaaacaaagcagatcagcgccgccacgcgtctgtatcttccggtcactcttgtttctccctcataccatgcagccgctccacaaaggataccgcaaatttctgcacatccacgcctaccgcttcctcaaagctctctcccgtaacgatcgagttggagataatgcggattcccagaaacggtatgccatacgccaggcaaagctctgccggagctgcggattccatatcttctaccgcggtcttataccgctctcttagcagtgcgatccggtccagctggttgttccactcatccgccgagccgatcactcctctgcccacataaacatccgtctgtaccttcatcgccgcatccccaagcctctcatcacacgggaaatcgagtactttccttgtctgtccaagtgttttatcgaaaatttcaatcggcagcggctcaaaatcacactcatcgattccggctccctcgggcgcgtatttccggatcatggctcccatcggaaccacgcgctcccccaccacgatgtctccccgatggaaccgcgcatcatggcctccgccaatccccaggttaatcaccgcccacaggcagaactgtgtcatggcaatggcggttgccgccgccgcattcaccatcccctgataggtgcgcgagataacgaccggctccgcgtgcttccccaagaatcccgtatagaatttccagttgccgcaggttatctcctccggttcgtcaagctgtccgatcagatactccgtctccgtgtccatcgctccctgaatcagaagcaccggctgttttttgaaatcataattttgcatcttttcctcatttctgtcttttcttctagcacattctcatttctgttgtatctactatacgttgttaaacttcccgatgtcaagggacgtatttttttcttgacggataccgctttctgttttaaggttttagtataatcagacaggaggatttttatatggaaaaaattgccagttttaccatagaccacatcaaattacagccgggtgtctatgtgtccagaaaggatcatgtcggagcggaagtcatcactaccttcgatcttcgcatgacctcaccgaacgacgaaccggtcatgaacacggcggaagtgcacacgattgaacatctgggtgctaccttcctgcggaatcacaaggacttttccgataagaccgtctacttcggaccgatgggatgccgcaccggcttctatcttctccttgctggggattacgagtcgaaggacatcgttccgttaatgattgaaatgtttgaatttatccgggattttcggggcgatgtacctggtgccgcgccaaaggactgcggaaactatctggatatgaatcttggcatggcgaattatcttgcgaatcgttatctggagaataccctgtatcacattgatgcagcgcatctcatctatccggaataaaatcttatcaaagaaaaagggtgtaacgtctcaatctctcaataaagactttacaccctttgttttttataatttgatttaaatatcgtccagggattctttgatcttatccatgaatcccttctttttcttaggcttctcctgcttatcggaagaacctgccccgtcctgggcgccggttcggtttaaggaatcacccgtcagcgcatcaaactgacgtaacgcctcctttgcgtctgcggaaagcccggtcggtgtctgtaccaccagatccacatagtgatcgccgcgaaccgatttgttgcggagcgacggcacaccttttcctttcagacgaattcttgtgttcgtctgtgttccaggcttcacttcatacaacacatctccgtccaccgtatgaatacggatctctccgccaagtgctgcctgggcaaaggaaatctgtgcggtggaataaatattcatatcctgccgctgcaggctcggatgtctcgatacgacaacctctacgagcagatcgcctctcggtccgccgttgattcccggctcgcccttctcccggatacggacgctctgtccgttgtcgatacctgccggaatcgacacctgaatctttttcttgcttgcaatgtatccggtaccccggcaatccgggcacttgtctttgatgatctttccggaaccgccacagtccggacaggtctgcacattctgcaccgtaccaaagaaagactgctgtgtaaatacaacctttcccttaccgccacacttcggacaggtctccggcgttgtccccggctttgcacctgttccatggcaggtatggcactcatcctttaacaccatctcaatctctttctcacatccgaagattgcctcctcaaatgtgatgcggacactggttcttaagttggagcccttcataggaccatcatttgttcttcttctggaaccaccgccaaagaaatctccaaaaatgtctccaaaaatgtctcccatatccatgccggagaaatcgaatccgcccgctccgccaccggtgccgtcaaacgctgcatgaccaaactgatcgtactgctttctcttctctgcatcggaaagcactgcataggcttcctgtgcttccttgaacttttcttcacactctttatccccagggtgcatgtcgggatgatactttttggcaagagtacggaatgctttcttgatctcatcgtccgatgcggtcttgcttacacccaagacctcataataatctctcttatccgccataacttttcctctattcctctctactgcacacggggtttccagatgtcaccatccagaaaccccatgttttatacactgcgttgaaatatcgtaacacactctggcttctttgtaaatgccgcagcttctgtcagattatacttccttgaagtccgcatctacaacatcgtcgtttgcagcgcctgtgcttcctgtgcttcctgcaccgcccatattgctcatatcaggacctgcgcctgctgcaccctgtgctgcctgtgtctgctcatacatctttgcaaataccttctgtgcactctgtgtcagcttctcctgcaaggattttaactctgtcacatccgcctctgtcatctcttctgcattctgatgtgcatccaggaatgacttcactgcattcatgtcgttctctacttccgacttatcggctgcatccaggtttgcgccaacctgatccagtgcctgctgtgtctggaatacgaaggaatctgcatcatttcttgcatcgattgcttcttttctcttcttatcctgtgcctcgtactcagctgcctctctgactgccttatcgatctcatcatcagacatattagaaccagctgtgattgtaatatgctgctctttgcctgttcccagatcctttgcggatacgtttacaataccgtttgcatcgatatcgaatgtaacctcgatctgcggtacaccacgacgtgctggcgggataccatccagacggaactggccaagggacttgttatctcttgcaaactgtctctcaccctgtacaacgttgatgtctacagcggtctggttgtctgctgcggtggagaagatctggctcttcttggtcgggatagtcgtatttctctcgatcagtcttgttgcaataccacccatggtctcgatggacagtgacagcggtgttacatccagaagtaagatctcacccgcaccggcatcacctgcaagcttaccaccctgaatggaagcaccgatggctacacactcatccgggtttaatgatttgctcggctctttgcctgtgagctgtcttaccttatcctgtacagccgggatacgtgtcgatccacctactaacaatacctgacccagatcagcgttggtcagtccggcatctctcattgcattctgaaccgggattgcggtcttctctaccagatcatgtgtcagttcgtcgaactttgctctggtcaggttcatatcaaaatgcttcggtccctcagcagttgctgtgatgaacggaaggttgatgttggttgtggttgcggaagaaagctctttctttgccttctcagctgcttcctttaatctctgaagtgccatcttatctgtggataagtctacgccctctgccttcttgaactcatcgatcatccactgtgtcactctgttatcgaagtcatcaccgccaaggtgtgtatcaccgtttgtagaaagtacctcgatgacaccatcaccgatctcgataatagatacatcgaatgtaccaccgccgagatcgtataccatgatcttctgctctttctcattgtcaagaccgtaagcaagtgctgctgctgtcggctcgttgatgatacgctttacatccagtcctgcgatcttacctgcatccttggttgcctgacgctgtgcgtcgttgaagtaagccggaaccgtgatgactgcttctgttactttctctccgaggtatccttccgcatctgcctttaacttctgcagaatcattgcggaaatctgctgcggagaatactgtttgtcatcgattgctaccttgtaatcggttcccatatgtctcttaatggaagagattgtcttctctgcgttggtgactgcctgacgctttgccggctcaccgacgagtctctcaccggtcttcgtaaatgctacgatagacggtgttgttcttgcaccttcctggttggcgataacggtaggttttccaccttccatcactgctacacagctgtttgttgttcctaaatcaattccgataatttttcccatgatagattcctcctcatcatattctaaaaacaaatttgttacttttgctgcatttatattaacgcggacatcttacgatgccggcacgtctgactgataaaacggctgctatgataccactgcaaccatgctgtggcgcacaacagaatccttatacatataacccttctgtaactcctgtgcgaccactccggaatcgtactcctcgctttccacctgcatcactgcattgtggaagttcggatcaaattcctgaccgactgcctcgatcggctttactccgcttgcatcaagctcggtaagcatctgtctgtatactttatccatcccgacgacaaacgcatcttctcgctgctcctccggtactgctgccagtcctctctcaaaattgtcaatcactggaaggatcttctcaatgatactttttgctcccatatcgtacatctgtgttttttctttctctgtgcgcttacggaagttgtcgaattctgccatctgacgttttaatttatcattcagttcctcgatctgttcgtcttttttatctttctttttcttaaagaatcccttcttctcatcggcaggcgcttcctggccgtcctctgcctcagattcctctgtctcttctgcctgctcgccggattcagctgcttctgtttcagtctctgtctcctccgcctcgcttacctcttctgcctgcttctctgcggcatctttttcaagatcctctaatacttcttccatcatttcttcttttttctctgccattccaatcctccatctatgtctccccttttggtctgtccaaaattccatcgagagaattcttcaataccttcaggttatccatgactttctcataatccattcgcttcggtcctacaataccgatagttccgcgaatcccttctcccaattcataggttgctgtaaccacgctgcagtccttcatcgtctgaatcgggctttcatttcctatataaacctgaatccctgtgctcttatcttccaacaggttctcagtgacaagtgatgcaagctgctgcttctcctcaaatgtggagatcagttcactcgctttttctgtggaatcacttaactccgggtatttgaacaggttcgttgtcccgctcgtatagatccggatatcctcatcctgtcccatcgtctctgccacggtatccagcacatcactgatgatgtcgctgtggattcccgcctgctccttcaacttggcgatcgtgccgagattgatatcctgcaaggcaagaccgttgagattcgagttcagcagaatatttaacttcagcatcgtctcattgtcgatcggctcggatactggaataatcttgttcttgaccagattgccctccgtgacaatcactgccagtatctgttcttcattcacattggaaagctgtatgaactttaccttgttgcggtggtagctcggtgccgacaccatcgtcgcatagttggtatttgccgccagcatctttgccacctgctgaagaacctgatctactttttccgtgtgttcaatgacaaacttcttcatgtcatcaacttcacggttcttctcttccatcagatgatctacataaaaccgataccccttatcggaaggaatacgtcctgcggaagtatgtggctgcaggatataacccagttcctccaggtctgccatctcgttgcggatagtcgcagaactcagattcagatctgtatactttgaaatggttctcgacccaaccggctcgcctgtctccagataattgcggatgatcgcatctaaaatttttattttacgttcatctaattccatctcgtccatcgctggtctcctgctgcttttcctgcagttccttttgtcttattagcactcgttgctatggagtgctaacaccttacgtacttaagatagcaccaacctatttctttgtcaacaggatttttcataaaagttgtgttttatttgtgattttatagtttgtttataaatagcaaaaaatcctccgaaggttccatgtcctccagaggattcccgcatcactttcttctattataatagaatacacatttctctccatctatatccgcccgtcaggcggaaaacttccgctaaaacggccggaaacagcaacagttgcagaggagatccagacagagcaggcttaagcaccagttccctgcgctcgcatacggtctgtcgtagtcacttcccatgctggtataccatgtgccgccatactgaagatgctgtaaaaactgccggtattccatattgctcggctccatctccaccgcacgctttgcgtgttccatcgcgttgatgttattgcccatgccctgattggcaatcgcgctgaaatagtaccagcgcgcccggcgttccccaaacggaattccgttcagcacattcaacgcctccacatagtgtctgcttgcaatataatttgcagccgcctgcatcttcggcgattcattctgaccgaatccatggctgccggcgtaactgtagccgccggaattgctgctgtagccgccgccataaccgtatccaccgccctgctgcttctccttcatgatctggtcatatgcctgctgtacttccttaaaatgctcctcagcctcatccctgttcggattgttcacattcgcatctggatggtattttctgctgagtgctctgtatgccttttttatctcttcatctgaggctccccgcgatacgccgagcacctgatatggatctgtcatatatgtgtaacctcgctatttgcgcgcttttttcttattcttctcttccgccttgcgttttttcagctgaagatactcgtattttgaccatacgccggaatacagcacattccgtagtatatccgcatgtaataaaatcggaaggcgctcaaacgacttggcgcactcggacatcatgctcgtgagcagcagacggcagagcgtatccatgtcatccgcactctcccgcatcgcatagacgagtggattgtactcctttttcctgcgatcctcatcgtaatcctcataggcatccataatgtagatgaactttcccatgtaaaagccaagtgtgcgcagctcttcctgccactcatcctctctccagcagaaaatctcacccagcatctctccggtcagacctgccaccacatcaaggttcgtctcgcctcttgcctccacctcgtctgtttttcgcatgaactcttccactgcgtgaacctggcgcggatacttctctatcacgcgcgcatagtccttatccagcatctttgcaaacgccttcttcgtataggctttctcgtccttccagtcgtcaatcagattatgataggctacaatcagattcatatccgccgcataatctgtcgcctcattgatccacacctgtcgcttcctggtcggatgcagcgcgcatgtaatctcggaggattcattcgtaagctcatacaagcccgtcagaagaacgatcagaaatgtcatatcatagttgagcagcatctgtccttttgcaccacagttggatttgagtctctggcacagtccgcagtaatatgcctgatatgccttccggttctcctctgtcatgatcttctgattgatatttatgtaaccgaacattccaagttctcctttgccctgccagatcagcttcttctgatgaattctctcctgcacttcgggcaggtaatacagattttgcctcttcccttcggcacccgcactctctgcctgcatccaggacacttgaaaaagcggtaggtatctctctgtgcgaagcgcttcttccactgatcccgcttcacaactgctttgtagcgcctgctcagataccgctgattctcctcgtaacgcttcgagacgttctttgaaaacatacggaaacaattataaatcatcagcgcaattccaaaccagtaaaaaacggaaagcaccggcagaagcccgctaaacatcgacacaaccagactcaccaataccacgatgttcaaggttctcccaagctcatccgctccataccgtccagtcataaaacgctgcagtttttctctcatatccattccttcctttccggatcatgagatcatgttaagccctgcaaaatagactgtcaaccttcctatcgtctttttagaaacattttagactttgattagatttcaggctgcctgtcaaaacaggcgcacctttctcctcatatcctccggatcttttgctcctgcgatcgccgtcccggacgtaatgcagctcttcatataaagattgtaaatcgcatcatccatctgcactctgccacgctccttctctgctccggcggacgtatccagctgctgtatccggttctccgcaatcagactgcgcaccccggcatccgccaccagaacctcataggcagccacgcgcccggcttcatcctgccgccgcagcagcttctgcgccatagcccccgccagtccctgcgccagactttccagaaggatctgcgaaccggatgtgctcccgccgcactgtaccagatggagcaatgccgccgtcacactgtcctccttctctgccagaatcacaaactgccctctcctgactgctgcaaacaaaagcccggcctcccgctcattcccgattccatccagaaggatcacatcggcatcctgctgcagcgccatcgcaagggcttcctccctggaagcgcagtccgctccgatctcccgctgcacaaccagtccccttccctgcggaaggatgtattctgtcgtatcctccacagagacaatgacctttgactgtgttgctgcaatctgtgcggcaagtgatgccaccgtcgtcgtcactccgcttcctctgcctcctgtgacaagaagcagcccgcgcccgtttttcacaagctccgtaatctcctccggtaacagaagtttctccggcatcggaaccccggccggatgcagtcttacggacatggcatctctcccctgctgtctgtatacggacacgcgcagacgcagcgctttggaaaatgaatagctgcataccagcgcgcctttcgtgcggtactcttccagctgatccccggacaagatctgctccgtcacctctgtaagatccgcatcctgccattctgcggcgtcctcctgccctgcggcagtcagttctccgtcaatccgaagcatcgccgttcttcccgggacaaggtgtacatccgatgcacctttgccatccgcatattccataagatcattaaaaagttttatgccgttcatagaaaaactccttcttattgcttcatagggaaatgcaatgcatccccgcagagcgttttttatttctaggaaggttctactttcacacattaatgtatcacggtattccctatgaaataaaaagagccgctgcgcgactctcagatacttctatgtgacaatgataagcagaacgataagccgggttatgtctaaaccgtggcaagccacggtcggaatgatcatctatctaggatgactgttgccagccacctcaagcaacctacctaaagctggcgggccgcgtcaacgcttttgttcggtcttgcttcggatggggtttacatatgcccgctctgttaccagcgcggcggtagtctcttacactgcccttccacccttaccgtattccggcattaccggaaccggcggtatatttctgttgcactatccttggagtcgcctccaccggacgttatccggcatcctgccctgtgaagcccggactttcctcaccccagcaatgctgggccgcgatcatttgttctacttatcaccgcaactattgcttattataatgtgctttccgcaaaatgtcaaagcaatcctatacattgaagcaggaaccgccgatgaattcgcggataatcgaattctggctgataccgtcgctcggcatcggaaggaaataatccagaaacttgagcaggcgctttgcctccagatattccggacaatccttgtcaatggcaaacagcagcggctcggcatacatctttaacactgccagttcatagatcagcgccgagttaaacatcacgtccgccccctcctggaacgggaaaatgtagcgctcctcaccgcggcgcaccgaatcccacatggcaatggtctcctttgcggaagttcctctcgtgcgcgcatctctcacaatccggcggatcattctgccgtccgttgttggcaggcagttgtgctcgtcgatgttgagctgggtcagcgcactgatgtagattttgaacttgctctccaccgggagcgagcaggacagcctgtcgttgagtccgtggattccctcgatgaccagtacgtcctcttttccaagttgcatgtagcggtccttgtattcccgcttgccggtcttaaaattgaagaccggcagattgacgcgcttgcccgcaagcagttcattcatgtcgtggttaaacagctccacatccagcgcttccagacattccagatcgagttccccgttctcatcgcgcgggcactgatccctgttcacataataatcatcgagagggaacggatgcggctttaatcccttcgcagcaagctggatagaaaggcggtgtgaaaaggtggtctttccggaggaagacggtccggcaatcatgataaactttttgcctcccgactttacaatcgtatctgccagatgaccgatccgttcctcaaacagtgcctcctgcgtcagaataatttcctgcatgcgtccttccgcaatcgcgtcattaagcgcgccaatcgtgccgatctctagcatgcgcccccactcacgcgaagccttcagcgtgtggaacagcttcccggaaggtgcaaactctgccacttctcttgtattctcattcgggaacagaagtacaaatccatcctcatacgtcacaatatcgtagtagcggagatagcccgtagacggcaccatgaatccgtaaaaatagtccttatagtgatcaagcacatagatattaactctggaactgcggcggtatttaaaaagcttttccttatcctccatcccgaggtcatggaacagtgcaatcgcatcatctgtgttcatgctgcgcttctcaatctcgatatcctccgtcaccagacggtacatctcctttttcagcgctatggcgcgctcttcgtccaccgcaatcacgcgctcctgtccgtctgccttttcacgcagctcgcagtaatatccctgaccgatggaatagagtacacggacgctgatatgttcgcttccccagagattgtagaccgccttctgcatcagaagcgtgacgcttctgcggtatgtcttttttcccgtcttatcggctgttgtcacaaacgaaagcgttccgtcccgctgtgccgtcttattcaattcccgcagccggttattatacaccacaagcacgatgtcatccggatatttttcctgatattcctgcgaaattgcaaggaaactggttcccgccggatattgtcttacttccccttcaattgtcaagctgaccatatctttccccatacgaatctctccccctctgccttttcttcaaggctttttgtcattcataatacgcaagcgccctggcgttctgcgcgaggatctgttttacgtcgtcaatccgggctgcaatctgctccgtcgccggctgaccggatagctgtgttaaaatatcctgctggatctgcgcttcccagcggagatacgccagaagcaccggatgtttttctgtaagaagctgctttccatagcggaattccagttcctgttcttctgtaaagctgtctgcatgagagactgcggaagcatcaaagtgaacgcgcatcatggggtaatattttccatcctccatgaccatctcttctctctctgtgacataaccgttctccatcagaaaacgccgcaccttcggaagctctgactgcggctgcaaaaccagcccatgtgcctgctcacagatgactctcccgctctccagaatatgtttgaccagtccgccgcccatccccgcaatcaggatggtgtccgcctcacccggctttagcgccgcaacgccgtccgacagacgagtctgtatgtagtcttccatgccgtacatccggatgtgttccctggcacgctccagcggtcccgtccggatatccatcgcaatcgcactggggatgtgctttcgttccaccagataaatcggtacatacccgtgatcggttcccacatccgccagccgctctccctctccgatgagtcctgccgccgttcttaaacgttctgatatttttaccatagattactccagataatcctttaatttgcggcttctgctcggatgacgcagcttgcgcagcgccttcgcctcgatctgacggatacgctcacgtgtgacattgaactcttttccgacttcctcaagtgtcctcgcacgtccgtcctccagtccaaaacgcagtgtcagcaccttctgctcacgctctgtcagcgttccgagcacttcctccaactgttcttttaacagggtaaatgccgctgcatccgccggtaccggaacgttgtcgtcctggataaaatcaccgagatggctgtcctcctcctcaccgatcggagtctctaaggataccggctcctgcgaaatctttaagatctcacgcacacgctccaccggcatgttcatctccgcagcgatctcctccggagtaggttcgcgtcccagctcctgcagcaactgtctgctgacacggatcagcttgttgatcgtctcgaccatatgcaccggaatacggatggttctcgcctgatctgcaatggctctcgtgattgcctgacggatccaccatgtcgcgtaggtggagaacttatatcccttgcggtaatcaaacttttccaccgccttgatcagtcctaaatttccctcctgaatcagatccagaaacaacattccacgaccgacatagcgctttgcaatgctgacaaccagacgaagattggcctctgccagtctctttttcgcctcctgatcgccgagttccatacgctttgccagctcaatctcctcctccgcagacagaagcggcacttttccgatctcttttaaatacatacgcaccggatcttcaatggagacaccgtccggaacggaaagatcaatcttctcgacctcaatctcatcctcatcatcgacgtcaagaagcatctcatcgtcaacgtcgtcatccgtaatacgaagcacgtcgatgttgtttgcctcaaggaaatcaagaatcttctcaaactgctctgcatccagctgcatgtcggaaaagaagtcgctgatctcctgatactccagcatgtttttcttcttttttgccagcgcaagcagttctcttaactttatctggaacttctcctgggcgcttgccaccccgttctctgctcccgcatcggcagttttcgcagcagagttctccttgttttctcccagaacttccttattgtcggtgttttctttcttttttgccattttcgcttcatcctctcatagttcgttactattttgtccttaaatgcagattttcatccacattcctgcttctttgcccgctctcattcctccagcggaatatgaaccgttcccggcagctcattcttttcttttgccagagccgccatctcctgaacgtcaaacgtgtttgccagcttatgattgatgctgttctcccgcacgcggatcacggtctctcgcagcgctttttcgcgttcctccctggtatccacccggtggattgtcgcgtttaagattcccgctgcctcccgctgctgctcctcatcctcgtaggtgctgatgatccgcgcaggattgactgtcccgtccttctcatactgttcaaacagcatttttgccacactgtggcagatcgggtccgtaaaatcatctgcaccaacatatctttgcacctttggaaacaacgccggactgttcgtcagccacgtcagcagaagcttctgcgactgcaccatgccgtcctcgcgctttttcgcactctttttgtattctgtgcgcgcaccgtcctgtgcgtccgcgacgctctgcagcgccctgcctcctccggcaagtccggcctttaatccctgctggttgaccagccttctcaaatcgtccggcgagatcatgtatttggctgcaaccgcctcgatataattatcgcgctctaacttctccgtaaatccgcaaagcatcttcgcgaccgcattgtaaaaggccgtcttgccctccggatcgtgcatgtcgtgctgctgctcttccatgcgcacctcaaacagaaaactgttctccgcctggtcgatgcgctcctgatacgcctccgcgccaagcgccttgataaactcatcgggatccttatacggcttcatgttgatgatcttggtcgtgattccgacttcttttaaaatcgggatggccctgagcgccgccttgatccccgccccgtcgctgtcatacgtcagatagacttccttggtatagcgcttgagcagattggcatgaccgcttgtgagcgccgtaccgagcgacgccacggcattgtcaaaccctgcctggtgcagtgcaatcacatccatatatccctcgcacaagagcagctgcggcttttttgtcgcccgtgcgaaattgagtccgtaaagattgcggctcttgtcgaaaatcttcgtctcgggggaattgagatactttggctctccatctcccatgacgcgcccgccaaatccgatcaccttattgtgcacatccatgatcggaaacatggcacggttccagaacttatcatgtccgccccgcacctcatcgatcgtgacaagaccggaatcctttaagatctcgtcgtcatagcccttcgaccgcagataccggtacagatcatcgctgtactgatccgaatatcccagcccgaacttgtggatcgtctcatcggacaacgccctctttttaaaataatcaagcgcacgttttccgcgttccccgcgaagcagcacgaaaaaatactttgccgcctccttgttgatctccaaaagacgtgccctccggtccgcctcctgccgctgcgccgccgtatattcctgcttcgggaggtcgacgcccgcccgctcggcaagcgcttccattgcttccccaaacgtgtaattctcgtactgcatcaggaaggtaaaaacattgcctcccgcgtggcagccaaaacaatagtacatctgtttattgggagagaccgaaaaagaaccggtcttctcattatggaaagggcacagcccgaagtaggtactgcccttttttgacagccgcacatactgcgaaatgacgtccacgatatcgttgcgcgaacgcacttcttctatcaattcatccgaataacgcggcatcttccgctcctttcttcccgctttttatttccattctaatagccgtccacctgccaggcctgagggagaaagtactccgaaaacttggtgatggcatactgatccgtcattcctgcgatgtagtccgcgaccacgcgctccgcgctctcgccctcgtccatcatgcgcagatattttgccgggagctgatccagatgctccttgtaaaagtaaaagagctgctcgatcatcgccttcgccttgacttcctctccctttgccacagggttcttgtagacgttctcaaacatgaacttgcgcagatcgatcatcgcctcctcgatctccggcgacatcatgatgtcatccttctccctgctgttcatgataatgttatgtatcagcgtattgaggcgctgcttggtggaaaaaccaagggtctttctgagttcaagcggaatatcgtcctccgttaagaccagcgcacggatcgcatcgtcaatatcgtggttgatataggcaatcttatccgaaaaacgcacaatctttccctcgagcgtatgcggcatcagtctggactgatggttcaaaataccgtcccgcacttcccatgtgagattcagcccctttccatccttctccagcttctccacgatacgcacactctgttcgttgtgccggaatccattctcgcagagcccgtttaacacgaactcgccggcatgtccaaacggcgtatgcccgatatcgtgtccgagcgcaatcgcctcgaccagatcctcattgaggcgcagtgcctttgcgatcgttctggcattctgcgatacctcgagtgtatgggacagcctcgtccggtaatgatcgcccttcggcgtcagaaacacctgcgttttgttcttgagacgccggaacgccttgctgtgcaggatgcggtctctgtcacgctgaaataccggtctgatatcacacggctcctcatacacatctctgcccttagaatgaatgctgagcgtggcgtacggacttaaggtctcgcactccattctctctatttcttcccgtatcgacatgtattatctcctctttttcgtcacgcactacgcagtgactccatatatataattctgcgtccggagtggatttcctctatttttttcgacacagtttgaaaaaatcatgtttccttgcgctaaaaatgctatactataaccaccaaatgaacaaggagtgtggtaccatggttttatttctgctcatcatccttattatgatttcggtatattggagaccaatgtggggaattctaagaggtctgctgctcggctttctttttttaatcgggggcagttccctgaacgtcccggttccggtttcgtttgtggtatttgttctctactgccagctgggcaccccctggcttcgcaagacaaactaccggcagacaaaagcgacaagaacatttcacgaatcgataaccaccgacgcggatcactccacgtacaccacggagcagtactattatgcctatgaggtggacggcacggattataccaacgtgcatagcatctatccgtacaataagaagctgcatgcggaagccaaaagcgcagaatgtgaaattttctaccatccgaaaaagccgaagaagatgttctgcccggaagatatcgcaaaagattactacacgatatggattctccggttcctgatcggcggcactatcattgcaacagatttttatttttaatttattataaaatgagaaaggcaggtcaataagcatgaaaataacaatcgcaagacagtgtggaagcggcgggcacaaagtcgccgacattctgtctgaaaaactgggtatggagatttttgacaaaaaaagatttatcgaagagtctaaaagaagaaacgtctatgatgaaaacgcaaattttctgaacgagaaaccgatcgacagttttctttacagtcttatcatgagctacggttccaaaaatccgcgtgaacgatatatccgttttgtaaaggatgtcacggagcaggaatcctgtattatcatcggcagatgcgcaaacataatctacaaggatgacccggactgtgtgtccgtttatctccacgccgatccggacatacggaaaaagagaatccaggagcgcgaccacgtatctgaaaaagaggctgcggagacattgcgggaagtagatgaaaagcgttctgcatttcaggaacagtgcacggcaacccgctggggcgacggcaacgagtatgacctttgtattgatacagggaaaatcggtatcgagaaagctgccgaattaattttgcagtatatagaatacaggaaatgaaaaaacgggaagccttcactctcaaggcttcccgcaaataaaaaatgcaggagatgggacttgaacccacacgatattgctaccacaggcacctgaagcctgcgcgtctgccaattccgccactcctgcataatctccacgaatatttgtgatgtaatgcggaagatgggacttgaacccacacgttcgcaatgaacacaagatccttagtcttgctcgtctgccagttccgacacttccgcatttcggtcactcatcgtgacgacttgataataataacaaacgtattttaaaatgtcaatgcttttttcaaaaaattttaaataaattgttcaaacaattcgtgcaactacagatatttctcgtcaaactcctctttatgcagcggctttccaaagtaaaatccctgaatcaactggattttcgtctgcttgagcgcatcaacctgttctttcgtctcgacgccctccacacagacatgaacgccgatcgtccgggcaagttccgccaccattttcacgaaagcggcggaaaattcatccttcccgatgtcaatgataaaacagcggtcaatcttgatgacgtcgatcggcatttcccggatatgattaagtgaggaataccccgtcccgaaatcatccagcgccacacgcacgccaagtgcgcgaatctcggaaagaatcttcttcatccggctcatatcgttgatcgccagcccctccgtgacctccagggtcagattctccggtacaatccccgtccgtttgatgaccgagcgcacctgctctacaatgtcattctgcagcagctgcaccacggagagattgacatttaccttgtaatccggatgccccatatcgttccagtatttgcaccgcttgcacgcctcctcgaggacatacgcaccgatcgggttaatcagccccagatactccgccagcggtataaaatccgtcggagcaatcaatcccagttccccggaattccagcggatcaacgcctccgcacccacgcacggattggattccctggtcacatccacgatcggctgatagaccacctcaaactcggaaaatgcattgttggtcgcattgcgcatatttttttccatatcgaggcggcggaacgatgtggactccacgttctcatcgtagaactccacacggttcttgccggaacattttgcggcgtaaagcgcaatatccgccttcttgatcagctcctccaccgtgtcgccctctgtcggaaaacgcacaacgcccatactcatcgtacagtagtaatccgcccccttaagcatccacggcttggaaaacagcgtgcggatgtcgttcagaatcttctgcagcatcatgatctgccgatgtgcaagaataatgataaactcatctccgcccatgcggtaacagttattttccacacccggaatccgacgcaggctgtccgatatattttttaacaggatatccccgtactggtgtcccagtccgtcgttgatatgcttaaaatcatcgagatcaatgtagagcaatgcaccctcaccgccgaactcctttgtctgttcaatgcagtgcgcaagatcctgctcaaaccgcatacggttgtaaagcccggtcaaaaaatcgttgtttgcctgccgttcgatcttctgctgatacagctttttgtccgtcacctcatagatggtatacaaaaatacacttcttccgtcgacccagtggattcctgtgcggtgatagtcaaaccagcgtttttcctgctccagatagatctcgcggaagcagtccgtatcaatgccgcccgattcttcccgccagcagttctccagcatgtccggcgcggcatcgtccggcagaaatgcgcgcagccgctggttgctgtagagaatccttccactgaccggatccttcacatagattccgcagcccacgttctctaaaatcgcctcaagggacgcatacgaactcgccagcgaattttttgcaatacgcttcagaagaatactctgaataatccgtctgacatcgttgacgaacttgacgtccgtcacttcccagttccgctcctcgtgttcttccaaaaagcacaggtacatctccgccctggtattgacctcgaccggcagaaaaatgcctgccaaaagcccgtgcgcatcaaaaaactgccggaacacctccggcatcatactgtttgaagaaatcatatacggttttccgttaaaaaagggcatcttctcacgcgacacgccggaccattccccacgcactgagtccattccgggcgccgcatattcacagatcatctcgatcttcgagtgctctttgttctcttttaagagcgcaccgcgcgaaatctccatatacgcgcagcattcccgcagaatgtcgtgcacgatctcctcaaagctgttttccgactctaacatctttacgatggaagtcatcacctcattcctgtgaagttccgcttccatctgcgtctcagactcgcggctctttaacaccgcctcctgtgccatcagttcttccatcttcacggcgaacatctgcttggacaatgtctccagaaattccagtgacttatcataccgttccggcgtcgtgcgcatgacataggacggaacatccgcgccttcccgatccataattccgatgacgatccagattgccgccgtcttcccgccgatcttgatggacacgccgcacattttcaccagatcatttccacaatcctcttcgagcacactttcgattccgtcatctaaaagccggttcatgagtgtcatatgccgttccactccggtcagtccgtgaatgtacgccagttcctccttagaaccgtatgcctttgtgacaactccgcgcgttctgctcagacacaccagatacacattattggcatcgcaaaaccggtcctgcagattctgcatcaatgtcgcatctaacaatcccagatcggtatcctgcgacgcttcctgattcatcccccttgaaagtgccatatcttcctcatcctttatactgaattacaaacagataaaactgatccttttcccggatacactgctcggcaagcagccggtaagcgcttcttatgcgaagctgttttctgataaatccctgctcattggaatagagcacaagaattccgtccgcttttaaaagtccggctgatttttcaaaaaatctgccgtaaaaagtgtccgtctcttcctttgactttcttccccggacaggcatattggtgatgatctcgtcaaatagatatgcatgtgtaaaatcaaaataatcacggttgataaaattgattttctcccccgcatatgatgcattctccctggctccccggatcgcctcgccaaagatatcaattccgtatttttcccgtgccgggacacggatatcccgctcgatcaacatcgtgccgacaccgcagaacggatcgagaatctgcgcgttttcttttaaatacggctctgccagcgccacaatcattgccgccgtcgccggatgaatcgaagctgccaccgcatttttgcggtaggcaaagcgtccatgcgcaatcgtaagaagtttcagaaagcaggcgtaaccgccgtctcttttctccagaagccgcagttcaatctcataatccgacggtgcattcacaagcatcctgccggacagccgctccagctccgcggaaaaccgtctggcaaacgtgctctttttgtctaacggcatgtggctctttatttccagtctgaaataaaacggcgtcgtctcccggtgcgcctgtgtaaggagctcccgcagattggaatcccagaccgcctccgcggctcctaaggcatcttccggcaccggctgcgccgtgcgcaccggaaacaataactcgcggtaagtccttatcgacgcaaacgggcggacgtccttcgcatgaaccagcacaccgagcgggtgcagtttctcactgcgtctgaccgatgcggacaccgcttttacctcctcaagcgtcacgccgcgctgctcccggtttgtcgcgagcagaaaatcctgcggctctgtgaatcccacaaacgtgtgacgggtaattccctccgccgccgtaatgatacgttccagttcccgcagttcctcattcacatgctttttctcattctcgggaatctcccgcgccaaaagtgcatccctgtgttcttttaacgcttccagatacggggatacctccatccctgacaaagccgtgagatacgcgctccttacgaacagcgtctgctctctctcgtatgcatgaaaaagagaacctgccgtctgtaaaagcccgagacttccaagcagaagcgccgcatttttgcgcaccttcggctcatcgctctccagcagtcctgtgagcagtgccccgtctcccaccagagacagcagggtttcccttgcctgtgggtccttgcactcgcttcgcagcagactcaagttctctcttatattctgattgttctgtaattctttataatattcgtgaatcataccgtatacctactacccttgatactaggtattctacgatatttcctcatttttggcaataccattcacatcaatgtaggtcagcaggtcctgcttgaacacaagccacgcatcctcatgctccacatagtatttcgggcacattttccccgtcacatcatagtggcggatcacatcatccgtagtcaggtcatagcgtcccatcagccaggcggtaagctctatcagcgactggtaggtcgcatcggtaaactctcccgtctcatccggaatacagcactcgatggctatcgtgtcttcattccggtcattcgacgcgtaagcaatctcgttgcacggaatgcactgcacgatctccccgtccatgccgatgacaaaatggctgctggcatatgtctcccctgtgtccttcagattctcaaaatagctgcggttctgctcagccgtcgtgcccggattcgcagtatagtggatcacgatcccgtttacctgggaaagcgccgttcccggtcgcgaatattcgttgtaatccagcagttctacctgatagtccggtgcctgtgccacatactttacctcgtacgccatcaccggcttttcttcatatagaagctttttgatctgtcgtgtgccaaaccagaccgccagcaccaaaagcagcggaatgccgatcaaaagcactatgcgcagccggcgtcttctccgaagccttttgcgccgtctccgccttttctcctcatacctacgccgttcttcgcgcctgtatttctcttcctgttcctctcgcattgctccatcttcccatctgtccgttcgtcctgtcgtactctctttgcggttccacgcgcgcctcttttttcattttacacaattttttcgtgattttttacaaaatttttactatctttttgttgctttcttccaaaacaagtgctatactctgtcaaggaaaaagaaaggaggcgtatcacgatgaaatataccatagatccaactatgacttacagcgaagcagttctcttttatgaagaatatctcactgctgccaaggctgctgggaaaaagccggtatctttcctgcactttatcacaggtcgttactagaaggcttttcccttcttttttatcttacatcagatgagaatttctgtgttttaaatttgtcttaatttctcttaatttccactgaacttttaccgaataaaatttgttttcattgcaggttcccgctccgggaatgtgattcccgctgccgcccctgcctgaatacatttgagcagccatgccatattgctgcccagcgtgcgcatggtctgcagtccctctgcgtcctgccgtacctcgtccggcgtatttccgtgtacctggttccagtactgggaggaaaccaccggcatggaattgatcgtgaaatatttgttcagctgatcaaacgcggatgccgcgccgccgcgtctgcagctcaccactgctgcccccggctttccggcaaacacatttccctttccgtagaatgcgcggtcgagaaacgaggtgatggcaccggatgccgccgcataatgcaccggcgagccgaacacaaaaccgtccgccgtttttgctttctcaacaaattcattgaccggatcgtccacaaagcagcgtccgttcttaagacagacattgcagccgatgcagccggcgatcggctttgcacccacctgaaaaatctcggtctcaatgccgttcttctcgagagcccctgccacctcgcagagcgctgtataagtacatcccttttccctcggacttccgtttaccaatattactttcatgttctttcctccatcctggcagatttcctgccttctattctatgccactttccctgtgatcgtacgcttatgaaatataaagtgcttcctgccttgggtgggtcggaatcgctccattgatgttctccgtcttccctatgaagcaaagaaaagctgccgtatcatctgttccggtgcaaaaatatcctcaaactggaaatcctcctccagaaattccatattttcctcggaatgttctacttcctttgaatacagctttgccactgccacccggtcctccacggagaatgttcctccgttctccagaaaacgcaatgcatccatatcgcggatcatcagaatactcgccaccgcaaactgtgccttgtttaaaatgttgtcatcataataggatctcataaaataccggaatgtaaagtagaccagcagatgctcatactcatattcccgtccctgctgcgctgtgtgaaagttctggatgcattccagataattgtcctcatggaatgccgcacgaagacgtttcttttcttcctcccagttctggtcgagcacttccagttgttcgtagcgctccatgcgggcaagaaacgccgcatacgcctcctgaggcgttacctctttctccctgcactcggcaatcagccggctctcacgctgctcctgctcctgcccgcttacttccccgtccatgtggtatccgtaaagctcctgctgcatcctcttacaatatagaagatactccgccgcgcgctctgccaccggcttctcccggttctgaagcaatgccaccgccgccttagaaacggcattcagctgatcggcatccacagacacttcctcatcgtcgtcatacccctcaccgtcggaggtatcatcctcacacgctgcctcatcattaccgtacaatgccccgtcggcatcataagctgcctcggcatcgtccccggtcccgcagaaatccggcatctcatgctcctgccaggtgatcttctcgtcggtggaaaacataatgtttccgacctcctcacatgccagacttaagatcttctcccggacgtcctcatactccatggtaaagcgtgggaactcggtgcagatctcgctcagtgcttcctcgcccatcttaatgcagatgtcgcagagctttttttcatttaaaaacgggcagtacccgtcctcgcgcataatcatggtgttctcctcaccctccctgatatgcgaggtaatctcttttcccagctctccgcccagactgtggtagtaatccatcgtaccctcgtcgatatcgatctcccagccgtaacagcaattgtccttacactgatctgcaatacagtgaaacttttcatagtaagacggtacttttaatatcatcgtttgctcctgtctgcgcctcttcctgcgccattttatatccatttacggtgcaaaaaggtgcgtcatccgccgcacctttttgtaatcctactcatctttccggaaatgatcgctcaacatatagccgatacaccagatacctcccgccagtgagagatacacaaacccctgcaccagtgcgaccgccagcttgatcagagacaaatctcctgccatatgcgccagaatcactcctctgaccggtcctcttaagatcatccatcctcctacatagaaccagccaacaacccccagcgtgtaaaaaaacaacgccagcaatgccttccatgttattttcatatctaattctcccttgttgatcctgcaataccgcgtttattgtaacacaaaccgcaggaagatgcaaaatccttccctcttctacatcagctcccggatctctcccgaccggcaatactctgcacagtcgatcacccgctggttggaagaccccttaaacagcagagatatatcatgaagctccgtcacaaacggtccgtccaccagcacatcgatcgtgtgaagcagctccgcggtatctgcggtgcagcattttccgcccggcacaagatcccggtctaacacatagccggtgtatgcccacacatccttccccggacactccgccttcactctccgcataaacggaagcagcgccttctgattctctggttcaaaaggatctcctccgagcaacgtcagtccccggatgtaatccggcttcaaggacgcaatgatctcatcttccacctcgccggtgaaaggattcccgtattcaaaagcccacgtctccggctgaaaacagtctttgcagtgatttctgcagcccgacacaaagagaacggtgcgcacaccggttccgtttgcaatatcacaatatttgattgccgaataattcatatcttttctcctcgacagggaaagaaagactgtggctgcacaatcccgtgcacgccacagtccccctgttttttataaatgtaatacccgttccttgatctcctgtgttctgccctgattccagaactgtgttccgatatagccgcaggtacgtctcgccacgctcatcttattctgatcgcggttgccgcagttcgggcactcccataccagcttgccgtcccggtctgtcacaatcttgatctctccggcatatccgcactccatgcagtagtcactctttgtgttgagttccgcgtacatgatattttcatagatgtactgcatcacggaaagcaccgcttccagattgttctgcatattcggaacctccacgtagctgattgctccgcccggggacagttcctggaactgtgactcgaactttaacttatcgaacgcgttgatctgctctgtcacatgtacatgatagctatttgtgatgtagttcttgtccgtcacacccgggataatgccgaaacgcttctgtaagcattttgcgaacttgtaggtcgtcgactcaagcggggttccgtagaggctgaaatcaatgtccgtctccttcttccacttggcgcatgcatcattcagacgacgcatcactgcaagcgcgaattccgtgccttccggctccgtgtgggatacgcccttcatatagcgtgtgcactcgcagagtcccgcatagccgagagaaatcgtcgagtaaccgtgatagagaagttcatcgatcgtctcgcctttcttcagacgtgcaagcgcaccgttctgccagagaatcggcgccacgtcggaaggtgttccctttaagcggttgtggcggatcatcaatgcctgatagcacatttccagacgctcatccatgatctcccagaacttcttctcatctcctccggaagagcatgccgcatccaccaggttcaatgtcactacgccctggttaaagcgtccgtaatacttgtgctttccttctttataattcttggcatgtgccagattgcccgtcgtgcggtctaccgtcaggaaagaacggcatcccatacaggtatagcagtcgccgtcttttaactttttcatcatcttctcagagatataatccggcaccatgcgctttgcggtacactcagccgcaagcctggtcaggtaccagtatttggacccctccctgatattgtcctcctcaagcacatagatcagtttcgggaacgccggcgtaatataaacgccctgctcattcttgacccctaaaattctctgatgaagcatctcctcgatcactgctgccagatcgtcccgaagctgtccctccggcacctcatccagatacataaacaccgtgataaacggagcctgtccattggtcgtcatcagcgtgatgacctgatactggatcatctgcacaccgcggttaatctcctctttgacccgcatttccgccatctggttgactttctcttccgtcgcctcgattccggcagtctcaagctccttgcgcacctgcttgcggaacttctcacggctcacctgcacaaacggagccagatgggacagggaaatactctgtccgccgtactgggaacttgcaatctgcgcgattgcctgtgtggcaatgttgcaggcagtggaaaagctcttcggcgtatcgatcatcgtctcgctaatgaccgtaccgttctgaagcatgtcctccagattgaccagacagcagttgtgcatgtgctgcgcaaaataatccgcgtcatgaaaatggatgattcctttctcatgcgcctctacgatctccggtggcagaaggaatcttctggtgatatccttgctgacctcaccggccatataatctctttgtacgctgtttacagtcggattcttgttggagttctcctgttttacttcctcgttattgcattccagcagacttaaaatctgctcatcggtagagttggacttgcgcaccagttctctcttataacgataagtaatatagttgcgggcaacattaaacgctttctgactcatgatctggttctccaccatatcctgaatctcctccacactcggggagcgcttcatattctcgcaggctttctcaacattggaaagaatcgcctgaatcttgtcgtctccaagcttttcataatcaatgacgctgtcgtttgccttgcggattgcagcctcgatcttgctgatgtcaaaaatgtcctcgctgccacttctcttaataatcttcataaccgttcagaatcctttctgctaattgctttttcattatacaatatctagtattgttgtcaatgcgttttcctagattctgtggttattttaccttttgaacaaaattcatcccgaaactttgtcactttttatcgctttggtttacaacaacatcttgtgtcttctgctattgtcacatccagattttgtagcatctgatccaggcagcgcttcaggtgctccacatcctccgccgaaagccccgccgtcagacgcgcttccatctcccgtatatcgcgctccgcgccatccaaaagcgcagcggccttatctgtgagcaccagacgttttaagcgcgcgtcgtgtgagactgccacacgctttatcagccccttgcgctccatcacaccaagcatattagaagcggtcgctcttgaaatggaaaaagcctcctcgatatccttctggtagacttcacagtcgctgtgatctttcaaaaaaccaagtgtccagcgctgcattcctgtcaggttatcctcattttccatacgctttgcttccatattcttatggatctgattgtggagcaggcgtattttgtatccgatggtctctgaccttttgattcgttccatctcttcctctcttctgtctgttttctaaaataatcattgacttctgtttttaattatcgtataacattattgttagcacactaacaattaaaaatcaacagaaaattcaaaaaggatgtgaaattatgttaaaaacacttggagcacagatcagggagttcaaaaaagattccctgcttactcccgtcttcatgattctggaagtcttcatggaaacaatcattcctctgatgatggcttccattatcgatcagggtgtggaagcgggcaacatccaccatatctacgtcatgggtgcctggatggttgtcgccgcctgtttctccctcttctgcggtgtcatgggcggaaaatacggtgcaagagcctccgcaggttttgcacgtaacttaagaaaagcgatgtacgagaacatccagagtttttcgttttccaacatcgacaaattcagtaccgcaggtcttgtcacccgtctgaccacagatgtgaccaacctgcagaatgcctaccagatgctgctgcgcatgtgtgtgcgtgcgccgatcagtctgatctgcgcgatgtgcatggcgtttttcatcagcccgagactggcgagcatctatcttgttgccgtcatcattctgggcatcattctcgccatcatcaccgtgcgcgcacatcactattttatggaagtttttccaaagtacgatgacctaaatgcctccgtgcaggaaaacgtatccgccatccgcgtggtcaaggcttatgtgcgtgaagattacgagaaaaacaagttccgcaaagccagccagaatatttacaacatgtttgtcaaggcggaaagcattctggctttcaacaacccggtcatgcagatcaccgtttacagctgtattcttgcgatcagctgggtgggcgcaaaaatgattgtcggcggaacattgacaaccggagaactgatgagtcttcttacctattgtatgaatatcatgatgagtctgatgatgctgtccatggtgttcgtcatgctggcgatgagtgtggcaagcgccgagcgtatctgtgaagtattaaatgagaagagcgacatcaccaatccggaaaatgcggataagaccgtgccggacggaagcatcacctttgaccatgtgaccttccgttacagcaagacatccgcaaagccggtgctctccgatattgacctctccataaaatccggcgagacgatcggtatcattggcggaaccggaagttccaagtcctcgctcgtcaacctcatcagccgcctctacgatgtgtccgaaggccgtgttctcgtcggcggaaaagacgtccgttcctacgatcttgacaccctccgcaacgaggtctctgtcgtattgcagaacaacgtgctcttctccggaaccatctatgagaatctgcgctggggagatgcacatgcgaccgacgaagaatgccgtcacgcgtgcagactggcatgcgccgacgaattcatcgagcgttttccggatggttacaacacctacatcgagcagggcggaaccaacgtctccggcggtcagaagcagcgtctgtgtattgcccgcgcgctcttaaagaagccgaagattctgattttagacgacagcaccagcgcggtggacaccgctaccgatgccaagatccgtcgcgcttttctcacggagattccgaacacgaccaagctgattatcgcacagcggatctcctccgttcaggatgccgaccgcatcattgtgctggataacggagagttgaacggtttcggcacacacgaagaattattgcagaccaatgccatttaccgcgatgtctacgagtcacagaccggcggcggcggtgattttgatgaaggaggtgctgcctgatgccacagaatgaaaaaaatgcaaagccgatcggcggacctggcggccgcggcggtcatggtccaagaccgaatgtcaaaaatccgggaaagctttttatgcgcctgctttcctatattatgaaaaattatgccgtacactgcgtcattgttgtgatctgtatttttatcacggttctcgcaagtgtgcagggaacctggtttatgcagaccttaatcgacggctatatcctgccgctgatgaagcagagcgatccggacttttccggtctcgcacacgccattttacgcgttgccgtcttctacggcatcggcgctatcgcagcctacatatacacaagaattatggtcaatgtctcacagggtactttaaagcatctgcgcgacgacatgttcacccacatggaagagcttcccatccggtattttgacacacactcccatggagacattatgtcaacttataccaacgatattgataccctgcgccagatgatcagccagagtatgccgcagtttttgaacagcatcatctccatcgtgagcgtctttatcagtatgcttcttctcaacattccgctgacgctcgtcacacttgtaatggtcggtgtcacactgtttgccacaaagaagatcggtgccttaagtgcccgctactttatcgcacaacagaaagatattgcgacggtcaacggctacattgaagagatgatgaacggtcagaaggtggtcaaggtcttcacccatgaagaggaaagtatcgccgatttcaaccggctcaatgaccagctgttccacagtgcagacaatgccaataagttcggtaacattttaatgccggtcaatgcacagatcggtaatatcagctacgtgctctgcgcgatcgtcggcggtattcttgctctgggcggatatggcggatttacgctcggaaagctcgcaagttttcttacctataataagagcttcgggcagccgatcaaccagctctccatgcagcttaacaatatcgtgatggcactcgccggttccgagcgtatcttcgctctgctcgatgagcagccggaagtggacgatggttacgtcacacttgtccgcgccaagtgggaaaacggtcagattgtggaatccaaagagcgtacgggtatgtgggcatggaagcacacccatcaggcagacggcagtgtcgattatattgaattaaagggcgacgtggtatttgatgatgtcgatttcggctatgttccagagaagaccgttcttcacaacgtagatctctacgctacgccgggtcagaaaattgcctttgtcggcagcaccggcgccggaaagacgaccatcaccaacctgatcaaccgtttctacgatatccaggacggcaagatccgctatgacggcatcaatatcaacaagatcaaaaaagatgacctgcgccactctctcggaatcgtgctgcaggacacccatctttttactgctacggttatggaaaatatccgttacggcaagctggatgccacggatgaggaagtcatggcagctgccagactcgccaacgcagatacatttatccagcagcttccgaacggctatgacaccctgctgaccggcgatggtgccaacctaagccagggacagcgccagctgcttgccatcgcaagagctgccatcgccgatccaccggttctgattctggatgaagcgacaagttccatcgatacccgcaccgaaaagattgtgcaggacggtatggataagctgatggcgggacgcaccacgttcgtgatcgcgcaccgactctcgaccgtgcgcaacagtgactgcatcattgtcctggaacagggacgtgtcattgagcgcggcagccacgatcagctgatcgaaaaacacggcaaatactatcagctgtataccgggaatttagccgaaggctaaatttccgtgtaattccagcggaagattaagttcctgaaaaaatagaactgttgcactaagcacagcgtgctttgctctgataagtaatattacagagatatcagagaacaaaaaagttccagaataaacagacggcggcagattctttgaagcaaaattcatgtatttcttccatgccgtggctggcatcccgttctgtgtctcttccacgtttgaacactcacggagtgtgtccgacaagccgcagacaatgggcggactttctggtgtccctaatggcacctcttcacagacaatataaaaccgcgcgaaccgaactcgccggcatctgctattgaaaatagggcagatgccgactcagacagcggcttcgcgcggttatgttttgttcagaggtgccaacaagggacacacacgaaagtcctacaaattgtctgccggcttgcggacacagtccgtagagtgctccaaacttggaaagacacggatcatcacagatgccagctgcggcatggttagaaataccggattttgcggtcagaatttgccgccgcatgtttatctggaacttttaagtatctatttctcataatattacttatcaaagcaaatagcgatatgcttattgcggcaattctattttatgaaggattcctaatctcctcaaacttctcccaaaatccttcgacagtctccccgccggagcagatcttatccgccagtgtcacaatccacgcctccctgcagcgcggcggaatcggattgagcggaaacatatgccggcggatcgtctccttctcaatctcactcaacgcaaaatcttccatcgcattctgcagcgcttttcctgcatgataaaatccatgccacttatgggaatcgtccttctcatgccagtcgtatagaaaatagtcatgcagtaacgccccgcggatcagcgcatgacagttcacgcggattctatacttttccgcaatgtaaaaactgacgtacgccaccgccacgctgtggcggaatacgctcgtggaaccatgctgcataaaccggctggaggagagaaacctggaatttttgcatacctccgtaagaatctcccgaaaaactttctcattctcttttgacaaatgaatccgcttcttttttctgtccatttcccttaaacacttcctctgtcagatctgataaccaccggatctcattcggctgcatggcaagatcaaaaccacctctgtttcaagtcctacctgtccacttcgattgtgattacaattccatctcccgcatcttcctgaatcgcttcctgcacaccctgaatcacatcttcctgcagcgcatccttgttagtagaagattttgcataaatttttatctccggattgccgagacttctcacatcatcccacgtaaattcagccaggttgatcccggtcgggttgttcaaaatctccagatcatccatatcacagtagatttctgtcccgctcagtgtggtcactgccccgaagttctgggtgtcgccgttctcatctacatacttatactgtgtcgtcgtacggcgcatcagacgctcgatctcataggtaatctgcccccatacctgcgatgccatccagtcgtcatcctcgtatgttccgtttgcgaccagatacgtgctgatataccaggagtgggaattgttatatccgtaatcaatgctgtaataatcataggtgtcgtatacgtatccgtctaaagtaggatgattattgctggtataatagtgttttccgtttaccttatcttccttctcggtccttgtgatctcatacccgtccggcaaaaacgatttcaaaacgtcgccgtatttccgctccagatgatagcttttatgatatccgcagccgccaataaggctgactgctgtcagacatgccagtgccactctgtatttgcggtgcaaaaaatgttttttctctctgcttaactgcatcattttctcttcctgtcctatacgttattgtctaatatacttcggcttattttaacatatctaattacaaacgtgcaagtataacacaaaaaggatcgcagtccatggaaacatgaactgcgacccttctatgcattacacaacctgctgatcgggctgattatttgtacagctctaccagtctctgtaagtgctcgtaacgagcctttgcagcttcctcagaagccttgaacagtctttctgctctctccgggaatgctctggtcagacggctgtaacgtgtctcgttgttcaggaaatcctgataagaaccgtcgcccggcttggatgtcagagtgaacggattcttgccctctgccttgagctgcggattgaaggagaagaggttccagtaacctgctgctactgctttcttcatctcatcctggcagtggttcataccaccctttacaccgtgcagctcacatggagcgtaaccgatgatcagagacggtccgttgtaagcctcagcctcagcgataaccttgacagcctgagccatgtttgcaccgagagcgatctgtgctacatatacataaccgtagctcatagcgatctctgcaaggctcttcttgccaacttccttaccagaagctgcgaactggcaaacctcaccgatgttggaagccttggaagcctgaccacctgtattggagtacatctcggtatcgaataccataacgtttacgttctcaccggaagcaagtacgtgatccagaccgccgaatccgatatcgtatgcccaaccgtcaccaccgaagatccatacggacttcttagcgaggtaatctttcttctcaactgcagcctttgcatccgggcatccggctgctgctgccttctctaactctgctacaagagctgctgctgcaggagtatttgcctttgtatcgttctttgtctcaacgaacttgtcaaatgctgcctttaactcagcgcttgccttgtcagatgttgcgcacttctctgcagaagcgattgcctgctcacgaagtaccttctgaccgatttccataccaagaccatgctcagcgttatcctcgaataaggagtttgcccatgccggtcccttcttggaatctttgtttaccgtatatggtgatgtagctgccgggccaccccagatagaggaacatccggttgcgttactgatgtacatatgctcaccgaacagctgtgtgatcagacgagcgtaagatgtctcagcacatcctgcacaggaaccagagaactcaagcagcggctggttgaactgggatccctttacagtgttgtctgccggcatgccaggcttcttgcctacgtttgctaccaggtaatcgaataccggctgctcttctgcctgagactcctgcggaaccatctcgattgcgcctaccgggcagacagtgatacactcaccgcatcccatacagtctaacggagatacgctcatggtgtacttgtactcgcttgccttcggctttgtatctgcaagcttgatgttggaaggagctgccttcacctcatcctcgctcagcatgaacggacgaatggttgcatgagaacatacaaatgcacactgattacactggatacacttctcagcattccatgtcggaacggttacagctgtaccacgcttctcatatgcagcagcgccaagctcgaactgtccgtccgggttctccttgaatgcggataccggaagggaatcgccatccattaaggagatcggctccattaagtctcttaccatcttaacagtcttcggaagacccttaagctctgcaggagctgcgtctgcctccggattcttccaggaagccggaacctctaccttatgtactgcgtctacaccggcatcaattgccttgtagttcatctctacaactgcgtcgcccttcttaccgtaggacttcttagctgcagctttcatgaactctactgcctgatcgatcggcataacgtttgcaagtttgaagaatgcagactgtaagatcgtgttggtacgcttgcccataccgatctcgattgccttgtcgattgcgttgattgtatataactgaatgttgttctctgcgatgtacttcttcgcatctgcattcagatgatgagctaactcttcatcagaccactggcagttgatcatgaatactccgcccggcttaacgtcctgaaccatcttgaatcccttggttacataagacgggttatgacatgcaacgaagtctgcctggttgatgtagtacgggcttctgattggcttgtcaccgaatcttaagtgggaaatggtaacaccaccggtcttcttggagtcatactggaagtatgcctggatgtacttgtctgtgtggtcaccgatgatcttggtggagttcttgtttgcaccaacagtaccatcaccgccgagaccccagaacttacactctaccgtaccttctgcagatgtgatcggagccggcttaacctctggtaagcttaagttcgtaacatcatctacgataccgattgtgaaacgagccttcggagcatctttctccagctctttgtatacagcgaatacacttgaaggaggtgtatccttggaacctaatccgtaacgtccgcctgtcaggacaacagtgtcgagaccagcctcacggagtgtggttgcaacatcaaggtataacggatcaccaagtgcgcccggctcctttgttctgtcaagaacagcaaccttcttagcggtcttaggaagagcctttaaaaatgcctcggatacccacggacgatacagacgaacctttacaagtccgaccttctcacccttagcggttaagtagtcgattacctcttcagctacgtcgttgatggaacccatagctacgataacgcgctctgcgtccggtgctccgtagtagttgaacagatcatagtttgtgccaagcttctcgttgactttcttcatgtacttctcaacgattgctgggagttcattgtaagctgtgttgcaagcctcacgatgctggaagaaaacatctccgttctcgtgtgaaccacgcatagccggatgctccggattcagtgcatgtgcacggaactctgcaactgcatccatgttgcacatctctttgagatctgcataatcccacttctcgatcttctggatctcatgggaagtacggaatccgtcgaagaaattgatgaacggaaccttaccctcgattgtagcaagatgagctaccgggcttaagtccataacttcctgcgggttggtctcgcacagcatagcgaaaccggtctgacgacaggcgtaaacatcgctgtgatcaccaaaaatatttaaagactgggtagctacggtacgcgcggatacgtcgaatacacaaggaagctgctcgcctgcgattttgtacatgttcgggatcataagtaacagaccctgagatgctgtaaaggttgtggtcagcgcacctgctgcaagggaaccatgtacggcacctgctgcacctgcctcagactccatctctacgactttgacctgattgccaaaaatattctcctgtcctgctgcagaccactgatctacggtatctgccatcgggctggaaggtgtaattgggtaaatagctgcaacatctgtaaacgcataagctacgtgagctgccgctgtattaccgtccattgactgttttgctctggacattattattcctccttaaattaaaatagagtgtcatattccgacttaagactaattttagcatttaatttgtcgattgtaaaggtttcagactgtacgaaaacgtgtgcaatctatatttgtcatgttctgtttgtccccggtcagatatactttttttcaaactcctccaggggcagcgggcggtcaaaataatagccctgaccgtagttaaaaccgcactccatcaaaaacgtccgctgctgctcctcctcgattccctcaaaaatcacctcctcctttgccgactggatgaactgccccatctgatagacaaaagcactctgtccgttctggtggattttgtcggtaaagctcttgtcgatcttcactacattcgccgggatttccaacagcacgctcagcgacgagtagccggttccaaaatcatcgatggcgatgcggtagccgagtttgccaagtctggtaagacacgcctttaagctgtctaacttctccacaatcacactctccgtcacctcgatctctatgtagcacggatcaatcccgtaccgctgcagggtattctgcaggcgctcgataaaatcatcgccgccgttctcaaaatttctcctggaaaaattggtggagatcgtaaacaattctcttccggaatccctccagcggcacattgcccgaagcagctgttccagaatataaaaatccagatctacaatatatcctatattttccagtgcagggataaaccgtgcgggagacaggacctccccggattccagccgccagcgtgcgagcgcctcggcgccgtagaccctctcctcgcggagcagaaacttcggctgtaaatatacctcgaactcgccccgctgcagtgccgcgtaaaatcttccggtaatccgaattccctcatcgcggtttttcctcatatcctcccggtaaacgaccgctcccgcattctgttccttggcaagctttcgcgccagattggctccctccagtatcttctcaaacgtctcttccccgtcatcgataaagcagattccagccgaaagctgcatggctcccgccggatagcggatctttaactgttcgccaaacatctgatcctctctctccacgagctccagaatgctctttttgtccgttcctctgaccagctcaatgaaataatccgaatacattctgcatgcctccacgacatgggactcgctgcggattaacgctgcaagctcctgcagaatactgtcgccggcctcctgtccataattttcatttacataggcaaagttgttcacgtccagatttaccagcgcgtacaccatgttctcatcctgcgcaagcccaccgctctttaattttttccggatcagcctgcggaatgtgtccagattatacagttccgtcagcatatcctgattctgcagatgccgtatctctgcctggtcatcgctctgcctgctgcgaagggagacaaatacagcaaccacccgcgcgagttcactgagcatccctgcttcctctttggaaaatccctctgcactgctgcttcccacacacaggcagccacttctgttaccggaaaattcaaactttacatttccacagtttttgatggaagttccatgatatttctccgcccccaactggggaacctccgttaaaatatcttccgttggcgtcgagacaaaacgcccgatttccgcctcccggaacactgtaaccgattgtgggaaaacctgttgttccacccggctgccatcccggttccagtaattcatcagcaccatttcctgctgttcttcccggtactcaaacaccatggcaaagcccagcccgtattttttcccaatctgttcgatcaatacgtttaatgatccgttgatatctttcgcatgcgagagaaggctgaacgcaaaattcaggaactctttatccaccttctgcccgctttccggagcatattcaatcctgtcgcgcctgcgctcccgctctgctccctcttgctgttttttgcccgcaaacgaatagtgatccttaccctcccgctttgtggcatacatcgcccggtcagccatcgcaaacagggtctcatagtctcttccatcctcaccgtataccgccatgccgatgctgagcgtcacctcaacgatggcgtcatcgccgatcagcttttttcttgcttcccgtcccagcgccgcggcgcacgcttctgcctcctccggcgtcgcatcccgcatcagcgccagaaattcatctcctccgactcttgcggtgacatctgtctcctgaaactggctttgcagcacgccggcaatatcagtaattaccgtatctccgacggtatgcccgaatgtatcgttgatccgcttaaaattatcaatatcgatcaggaacagcacatgctgtttttccggctcactttttaaaatccgttctacctctccggatgccgccaccttattataaagccttgtcagcgggtcgcgcttcgcctcctccgacagttcctcctgaatcctgcggtcggagctgacatcatagctgcgtccgatgatgcggataatctgtccattgtccccgacaatgctccggtaaatcgtccggtaccacacatatacaggttcctccccgggagccgccacattcatccggtaatcaatacttcctgtctgcacatccctgctggctgcctccagcaccctggcatacgcggcacgatcctcctcgcagatatccgcgagcatctcctcataatccatatatctgcgccctgccgttcccggctgcccgttcccgcgatatttgcgcggcaccctgaaacgccgctgtgcaacgtcgtactctagcgggaattcatcggtgacctcttctaacatgctgtactgctcctccatcaggcgcagttcttcctccagattcttccgcttgtctatgttccagcttaccaggatatagtaaggtaccgcgtcccggtaataatacagtctgcaccgcatcagttcccagcagacgccgccgctcttcgtgcggatgcgcagttcaatctcctccgtggttcttagtttccggcacacttcgatggcatcctcgaacacaccggtatcgtcccggtacaaatactccacaaacggcgtatttccggtcagttcctccctgtcatacccctctgcatgcaaaaattcccggttcaccatctcaatatacagctcattcccgccgcggactaccgctattccgaccggcatctcgccgatcagatcttttctctgcccccgctccatgtctattgtatttatttgcgtatccccatactccataaaatcaatctcccgagatgcaatttcctctgtcatacttaagataactccgattgccttcccgtacattatatcaaatttttaacgaaatccaaacaatttgtcacagcgtgaaagccctttttaataagaagttccggttgcatttctccgtattttttagtatgatacgaattggtgcaataaaagcaggtgatttacaagaaaagttaggagaacataaatatgatcagtacaagcaacatcactttacgaatcggaaaaaaagctctctttgaagatgtcaacatcaaattcacagagggctgctgctacggtctgatcggtgcaaacggtgccggaaaatctacgttcctcaagattctgtccggccagcttgaaccgacaagcggagaagtcatcatcacgccgggccagcgtctttcctttttgcagcaggatcattttaaatatgacgagtacacggtactcgataccgttatcatgggcaacaagcgtctctacgatatcatgaaagaaaaagacgcgatctacatgaaagaggatttcacggacgaggacggtatccgcgccagtgaacttgaagcagaattcgcagatatggacggctggaatgccgagtccgatgcagccaccatgttaaatggtcttggcatcccgacggaggatcactacacactcatggcggatatgccaagtgccttaaaggtcaaggttctccttgcacaggcgctcttcggcaacccggacattcttcttttggatgagccgaccaaccatctggatctcgatgcgatcagctggttagaagaattcttaatcaactttgagaacacggtcatcgttgtttcccacgaccgctacttcttaaacaaagtctgcacaaacattgcagatatcgactacggaaagatccagctctatgccggcaactatgatttctggtatgagtccagccagcttctcgtaaagcagatgaaggaagccaacaagaaaaaagaggagaagatcaaggagctgcaggaattcatctcccgtttctccgcgaatgcttccaaatccaagcaggcgacttccagaaagcgtgccctggaaaagattcagctcgacgagatccgtccgtccagccgtaaatacccgtatatcgatttccgtccgaaccgtgagatcggcaatgaagttctgaccgtcgacggcattaccaagaccatcgacggcgtcaaggtgctcgacaatgtctcctttatcgtcggacacgacgacaagatcgcgtttgtcggaagcaacgagctggcaaagacaacgctctttaagattcttgccggtgagatggagccggattccggcacctacaagtggggcgtgacgaccagccagtcctacttcccgaaggataacaccgagatctttgataccgatcttctgatcgttgactggctgacacagttctccgagatcaaggatgcaacctatgtccgcggtttcctcggacgtatgctgttcgccggagatgacggtaccaagaagatgcgcgttctctccggtggagaaaaagtacgtgtcctgctctcccgcatgatgattatgggaagcaacgtgctgatcttagatgagccgaccgaccatctggatatggagtccatcaccgcattaaacaacggactcatcaagttcccgggcgttattctatttgcctcccgcgaccatcaggttgtccagactacagcgaaccgtatcatcgagttcctgccggacggcacctttgtcgacaaggtatccacctacgacgaatacctcgagaatgatgagatggcaagaaaacgtcaggtatactccatgtcatcagatgacgagggcgataactaagacccgatcttttttacaaaatcacacgggagcgctgtgccagaaaaatctccggcatagcgctcccgttttctgttcttctaaattctgttttcactcccgccgattccgcgatcctgttctccggcgcccctacgcttccttcggcttccggtactctgcctcccgcataccgagcgcaaacgctcccataatacccggattttctccaagtgccggcggcacgaggtaggtatcgatctcctttaagattttctcattggaaatatacccgcccagcagttcctgcacttttgcgcgcaccatcgaaaagagctggctctggtgcataattccgccccacagcacaatcttctgcggagaatatgtcagaacataatttgcaaccgcctccgcgagatagaacgcctccatctcccagacatcctcccggtccgccagttcctttgccggtctgccccaacgcgcctccaccgccggaccgcttgcaagcccttccagacagttggcatggtacgggcattttccggcgtaggtgtctttcggatgacgctgcagaagaagatgtcctgcctccgggtgcaccagcccgtgcatgagcgccccgttacagtagacgcccacgccaacgccggtgccgacggtaatatagattgccgtgtcgcagtcttttgcggctccccaggtaacttcgccaagcaccgccgcattcacgtccgtatcaaatccgaccgggacgccgagcgcccgtgaaaaaattcccaccatatcgacgttctgccattccagcttcggcgtgctggtgatatatccataggtcggggacgcacggtgcagatccaccggtccgaaacacccgattccgagtgacgagattccttttccctcaaaaaacgcagccatgcgcggcagggtaatcttgggcttctctgtgggaatcgtcacacgctctgtgattgtgacctgactttctcccggctgtcctttgtctgtctgcacttccccgatcgcgcacaccatcttggtgccgcccgcttctattccaccaatccgcatccttctcttcctcccttttcttatatataccacttcggagttctctccgccagtcatatttcaaggaaccggaatatttaagagacagcagccctcccggatggattagaaaattctccgcaccgccagcacgctgcggtaggttaccggagaagtcagcgtaatgcctatcttttcattgctcgcatgaatcagtgtgttgttgcccgcatagatgccgacgtggccgctatagcagacaatgtcgcccggctggatttccgacagactgacggcatatcccacactccgctgttccgacgatgtgcgcggcagattgattccaaatgccgcatacacgcccttgacaaatccggagcagtcggttccgtttgtcaggctgttgccgccgtatacataagggtttcccagaaactgtctcgcgtaatcgaccaccgcctgaccgttggaggaagccgtctgcgcactttgccccgcactgctgccggagccgcttcccgtgctgctgccgcctgctgccgcactgcttcccgcgccggattttttcacctcctgtttttctgccgctctgcgggctgcttcctgttctgctgccgcacgtgccgcctccacctctctggctttgcgcgcttcctccgccgcacgggctgccgcctgccgttctgcttcctctctggcaagccgcgcctcttcctccgcttttgactctgcatgaatgtactctgtggacagcgtcacataatccagtgccacataaccgtcaccgtccgcggtggacaccttcgcccagccttccgtcgactcgtcggttaccacaacgtcatcgccgtccggcagcatggtgagcaccttcgcctcggttgtcggctccgtccgcacgaacagggtcgtcgttgtgacggtcgccaggcgtgttcccacacttctggcaagctcctcatcccccacgaccacatattccgccttgacatatccgttcacatttccggacgtaatccggtaccacccgtcctccgtcgtctccagcacagtggctgcggatttgtcgtaaagttttccaagaatttcactctccgtatccggttcctgccgcacgttgacatagtgattcacctgcgccactgcaatatccgcaaactccgatgcggtctgcggaagttcattttccgcaatctccgccgtctcccacgcttcctctgccaccatctccggttccatcatccgcgccacagccgcgttactttgcagttcctccacggcatccgccgtctgcgcctgcactccttgggcttccttaagcacctgtgccagcgtctgtgtcacgcccgccaccggcacctcccgtttttcctgtcctgcctgcaccattccatagcttcccagtgtgacggctcccgccagcagaagcgccagtattgtcattcttttcttcattatgtagaatcctcccgatttattccatatgcttccatattgttacttatttgttacaaaaatatttcatttctgcaacaaccgtattgtaacaaaggaaccacatggaatctacagggaactctttccatttttcgctctcttttgtccggtctgccgctttgtcccgcaacgcaaaaggaacccgcaggttctttcgtccctgcgggttcccttcgtattttccttccggtttaacccaaacttccttactaatagcagaagctgtgtccgccgatctttcggtccagtctcggcgtcaacggttccgtagaaaaatataacgtatcatttcttaatatatgtgtatttccattcaatacctcatgaatcgaagtgtattccttctctgtggggttcgcccgctctctgttcttccaggaacagaactgcgtcgggtttccctgactgagcacgtcatacaaggtatctggatatttttcggaagccatccggttaaaaactacctcgaccacggcttcctgcccttctgtcggctcgccctgcgattccagccagacgatttttgccaacaaatctatctcctcctgcgtcaatgtgatattccagcggttctctgcaccggtcgtcgtctctaccgttgcaggcttgctctctgccgcctccggcgcctctgcttcccccgatgctgcctgtactttggcttccggtgtctctgcttcctccaggggtgcctgtacttcttctgccgcatcggacggcgccgtgcttgctaccattattctggggttctttgtgattcctgtcgcttcatctgattctgtcgtaaatgaatatccggataaaacacggcacacacccgcaaccggaacctctgctttgtctgccgcagaaattacatacgcgctgctgatctcttctctgctctcctgtatcgtgttcttctcctcaatgttggccgcaaccatgagacaaatgcataaagtgcacagcattgtcacgtccaatatttttctgttcattttgctcctttcctcaagaatgatactctgtgagctgctctcgcactcgttgtttcatcatactagattcttcccaaaagtcaaatttcccattcacaaaattctggaaaaattttctttacattttcccagaaatgcggcaaaagcgtgttctgtcgtatccaataattccgaggaatgctttgatgtgttaaaatagaactgctcaaactcacaaaaaaaacatcccgaaacgggatgttttctatattccttccaatattcctgcgcggtttctgctgtcgcaaatcccgccatttttgtaccttttccggcacaatcttcctctgctaccgtgtgagaaacagttcttcaaacaccgggattttgtgttccggatccgcctgaaagatcgcaacatgcgcatcgtctgtgctcctgtcggcaaatgccgggtataaaaacccacagaccggccgccccggctcgtactctcccaccaacggagcgactgcaccgatcagatattcatatacctcctccgactccccctgccgctccttgtccgatgcctttaccggcacatcatagcggtcgtgaaagaccagaatcgcatacggctccctgctacggtaccgggcacccacgagctcataaaacgtgtacagcagcgcatcgtttttcagtccgcactcgcgcattccgtacaacagctggcgcattttcctctgttctgcgccatccccgaacgcgtagctgcgcaggtttacattggttgctgcaaacggaaccgccttggcaatcgccagatttttctccttttccgccgcggacaaattgagaaaattcacattaaagctctcatcgatctctccgtccggctccatgtatccgcctgccacacgtgtaaaggaagtgcggctgggcgtcattctgcgcgtcagttccagcatatcttctctgtttatcatcgtttctccagtcccgtgtttttatgacagcatttcgttgccggcacatccatgcttgtcttcgccacatttatgttccccacaggaatgttcatgctcgtgatgagaacatctcacatcgggattgtaatctaattttcctgcaagataagcttctaccgcttcatctgccgcaccggacactccgccatacagctttatgccagccgctgcaagcgcactttgcgcaccgccgccgattccgccacagatcagtacatccgcacccgcctctgtcaaaaatccggcaagtgccccatgtccctgtccattcgtgttgacaatctggtattttaccacctgattattctcaatatcatataatttaaactgttccgtgtgtccaaaatgctgaaatatctctccattttcataggtaactgcaattctcatctgatctgtttcctttctctgaatatcatcttttccgacggatgttgaggtgcgcctgcatattttattgtagcaaaacagggcggttccatcacacaatcgataattcccgcctgaaatctccagtgtctttccgtttacgatgctgtctgccattttgtatctggctgactcgtaaatttcagtcaccgttgtgcgggcaatgcccatctgcttcgcacattgttcgtgcgtacgcttctcaaggtctacaagacgaatcgtttcgtactcatccatcgtcataatgactttttctcctgccggaacaccctccgggcaaaaattatcatatgccgcttccatacagattcttcttgcttttgtcggtcgtgccatcttttctcctcatgcctatttccgtcatatgtcaaaaactattataccgcaattttccttttttcacaactccctatgaaaattgatatactgaccgtctgccgccatcacaatgcgatcccgtttacaatctgtaagaatatgtaaaacgcccgtattatagtcccgcctttgcatatactatcctgtaggaggtgagatcatgatcgcctggtttctttatctgatcttaactgtaaaaaaagattcaccggctcagaattgagccggttgttttatcgtagggcacaaatacaaaaatataacgagaaataggattcttacagaaggaaaaagaaaggatatgatatgacacgaaatatgacacaaaaaaataaagccttgaaaactcaaggctttacgcacaggggatgagagaatcgaactcccaccaaaggttttggagacccctatcataccatttgaccaatcccctatatttataaaaatgacgtatcagatacgtcatttattatcttactagatatcttacaaaaaatcaatggtatattgtaccttcaaaacttcatacagattccgataaacctatttggtcaagccctcgatcgattagtaacagtcagctccacacgttaccgtgcttccacctctgccctat

SEQ ID NO: 11562 - DNA, 4515 bp, Unknown
  gut microbiota DNA sequence
atgacgatcgtgatcgtatcacctgttttttccttatcacctgcggacggtgtctgggaaatgacttttccctcctccacactgtcatcgtaagcgtatgtcttgttcggcttgaaaccttccttttccaatgcagacactgcatcatcctcagagtctccggtcacgctcggcacttccacactgcccttgccgttgctgatcacgacgccgatcgtcgtgccctcttcgacttccttgccgctctccgggtcctgattggcaatctctccctcatcatagtcgtcagaggatacctcccctttgttctccagctttaatccatttttttccgccttggtctgcgcattcgcataagtcatgcctcgaaaatctggaacggtaaccttatcctcgttctggctctcggtctgcgtggtctctgtgcgcgacgtctcggtgtcagactgctttttggacttgattccgccgaacagatttaccacaatcacaatgatgataatcacaatcacgactgccgcaacaattcccatgatcgtgatcgctttctccatcttcggattcagatcgccgtcatcctcgtcatccagctcatcatcgtccacatcttcttcgtcgtcctcatcctcatcgtagcggttcatctcctccgctctcgcgtgcaccgcctgatctgccttaagatagaggctgtctgcctcctccttgatctgctttaagtcatcctctccgataatgcgtgtcttgtcctgattggttgcaggaaccatcacgacaaaatcctcattcgggctgacaagcgccttgcgcagatccgtcaaaagtgccgtcatggactcatagcggcggtccggattcttctgcgtacattttaagatgatcttctccatgctgatcggaagattcggcgcgtaggcactcggcggaacgatctcctcctgcagatgctggatggcaaccgccacagtcgtatccccgtcaaacggcacacgtcccgtcaccatctcatacatcacaataccgagggaatagatatcgctcttgccgtccacaaatccgttgcgtgcctgctccggagaagaatagtgcacggatcccatcacatcggaactgatcgtgttgctgcttgctgcgcgcgcgataccgaaatctgttacttttacttttccttctgtggaaataataatattctgtggcttaatgtcccggtggatgatacccttgctatgcgccgcctcaatacctcttcccacctgaatggcaatgctgactgcctccttaaaagaaagctgaccctttttctcaatatatgtctttaacgtgatgccttccacatactccatcacgatataatgcattcctttttcgcttccgacatcgtagatatttacgatgttcggatgctctaatcccgcagcagactgtgcctccgtgcggaactttgtcacaaaattcagatcctccgaaaactccggctttaaaaccttgattgccacaaaacgtccgagcgtcagatcttttgccttatatacgtcagacattccgccggcaccaattttccctatgatttcataacggtccgctatatacattccctctgttaacatattaaacctccaacctgatttacaaagaattccatcctctatctagtctcatctgaaaacggctcaatcaaaaccaccgttatattatccttaccgccattctcgttcgcggcgtcgatcagccgttgtgttttctccacaatatcacgctgtcccagcacgatccgcttgatatccgtatcatcgaccatattggtcagaccgtccgaacacaacagaaccgtatctcccggcacaagcaccgtctcgaagaaatccgccgacacctccggaagcacgccgatcgctctcgtaataatatttttatccgggtgcacttttgcatcctctttgtccatctctcccagtcgaaccatctcttctaccagagagtgatctcttgtaatctgtgtgatacgttcctggttgatcacatacaaccggctgtcgccgacattcgccgtgtagagcttatcgccaaccacgactgccgcaacaatcgtcgtgcccatgcccgctttgctcgcatccgcgttcgcctccgcaagcaaatgttcatttgcatatctgactgcctcaccgagcacggtcaccggctcgctctcctcggattctgttacgtattccacaatcttttcaactgtgaagcgcgaagcataatctccagccgcatggcctcccataccgtctgctaccagaaataaatccggaagcctgcccacggaggtctctgatgtgtacatataatcctggttcgtctcacgccgctgtcccacatgcgtcatggaaaacgtcttcattctattcctccattattagaatagcagtacctgcctgccatttatccaattaccaatgttagcatacaacgcgaaaaagggcaagacttactgctcctgcccgacatgccccgtctcctgcccggtatgctccatttcctgctctttgtgcatatgcttgcgtctcagctgcccgcatgcaccgtcaatatccctgcccatctcccggcgcacggtcacagtgagcccgtttctctccagctttttctggaatgcatgcactgcaccgtcatccggctgtctatagctgcgttccttgatcggattgaccggaatcagattgatatggcagttgatcccgcgcacaagctctgccagttctgcggcatcctcagccgtgtcatttacacccgccaccagactgtactcaaacgtgatgcgccggccggtctgttcaaaatagtaacggcaggcatcgaccgcttccttaatgtcatatttgttcgccacaggcatcagctgcaggcgcttttcctggttggatgcatgaagcgaaagcgccagcgtgatctgcagctttttatccgcaagctcccgcatgcgcggaacgatcccgcaggtggagaccgtcaggttccgctggctgatattgagtccgttttcatcgctcagcagttcgatgaattttaacaggttgtcataattatccaaaggctcgccggttcccatcaccacaacattggagatccgctcgccgatgtccgttccgatctgatagatctgatcgagcatctcggacgtccgcagaccgcgcaccaggccatccagcgtggaggcgcagaaacggcagcccatccggcagccgacctgcgaggaaatacagacggagttcccgtgcttataacgcattaagacactctcgatgacattgccgtcgtccagaagaaacaggtactttctggtaccgtcaatcttcgagatctgcacatccgccttttttaagctggtcagcgtacagttctgattcaatttttcaatgagagccgcagaaatattggtcatctccgaaaaggatgccacatgctttctgtgcatccactcgtaaatctgttttgcccggaactttttttctccgagcgactcgacaaatgcggtcagttcttccagattcaacgatttaatgtctgtcttttccattccttatccgttgtcctgctttcgcttaaattttgctataaaaaatccgtccccgagatgttcttccgggaacatctgccgcatcgtatcgagggcgaactccgggtgcgtctgctcaaaccatctggcattcccctcgttctccgccgtgtgaatcgtacaggtggaataaatcagtgtcccgcccggcttcacatattcacacaccacagacagtatctgcctctgcagcgccacaagcgattcctccccttccgggttcatgcggtacttgatatcggtctttctgcgcagcaccccgagtcccgagcagggaagatccgcaatcagcacatccgccgtgcgaaccgacgcctcgtccaaaacagtcgcatcctgacacttcgccgtgatattcgtaaggcggcatctttttatattctcatcaatcagcgccactttctgttcgctgacgtcccgcgcctccacatgaccggtacctcttaacttttccgcaagatgaatgctcttgccgcccggcgccgcacagacgtcaatgcagtggtcgccctccctgggtgccgcatattccgccaccatcatggagctgatgtcctgcacatagaacagtccttcctgaaaactggaaagaccgtttaaatgatcaaacccaaagatcgtatatgcatacgaaagtccgggatatttttccgtatccagcggaaccgcggtaacgccctcctccttaaaacgctctgcgagcgcctccggcgtgatccgttccagattcgcacggacggtgatcggcgcttccaaaagggacgctgcaagaatctcttttgtgcgttcctttccgtaatcgccgatccactgcgcaacgatccattccggcatcgagtagcacaccgaccaggcttttacggcatcgacgctctcctttggatatgtaagctgatccagaccgcgcgaaacac

SEQ ID NO: 11563 - DNA, 9065 bp, Unknown
  gut microbiota DNA sequence
ctgtccgaacccctttttcttcgcaagctttaccgcctcgttgcaggcggcggatgccggaacactgtccatatatttcaactggtatacgcccatcctgagaatggcgcggatcaccggcttcatttttctgacttttacttttgagaactgatccagaatatagtccagctcgatctggcgctgaatggtgccctccgccactctcgttaaaaaggcacgctctcttttgtccagatactggtacttctccagcaccgaacggatcaccagatggctgtactgtcccctctccgtcacttctaaaaggatctcaagaatcagttcccgcgtattcacggaatcagtcgtcacgtcttcttcctccaaataataacaccagacgaagcagctgcagaatcgatgccgccgcactcgccacgtaagtaagtgccgccgccttcaacacttttcgcgtataaggcagctcactgtcgcttaagattccctgctctcctaaaatgcgcagcgcgcggtgcgatgcattgaactccaccggaagcgtcacaagctgaaacagaacagcgaacgaaaaacaaagaattccaaggtcgattaaaaatgtccctgtattgctggtaaaaaataatccgattaaaattaaaggccacgccagcgtagaaccgagatttgccaccggcacgatcgccgagcggagcgtgagcggcacatatccctgctggtgctgaatggcatgtccgcactcatgcgccgccacaccgacagccgccaccgacgtgcttccatacacagaatccgacagattcagcgtcttgttcgacggattgtagtgatcggtcagattgcccgatacatgctgcaccgacacgtcgtagattcctgccgagtgcagaatccgttccgccgcctgtgctccggtcatgccggacatgctgcggtaggaagcatatttgttgtatgtcgacttcaccctcgcagatgcaaccagacagatgactgctccgatgagcacgagtatatacgtcggatcaaatccccagtaatagtatgaatatggcatagtaatcaccctttcttaaaatatgtgccctcttcgatctcatatccgttcagaaatgcctccaccggcatacgcttcttgccctcaagctgaagttcactgatggcaagcattccctttccggtctgcaccagaatatgatctttttccactttcacaatgcagcccggctccgccccggactcctcagaaacgacctgcgccttccagatctttaacatcttatcgcccagtctggtataggcactcggccacggatccagtccgcggatcaggcactcaatctcttttgcgccctgtttccagtcaatgcttcccatttctttgtaaatcttggcggtatgcgttgcctgggagttgtcctgcggcgtgtaggttgccgttcccgcatcgatcgcctccatcgtgcgcacgcacagcttcgcgccgacctcggacagccggtcgaacagactgccgcccgtctcatccgcacggatcttcacttcttcctttaagatcatatctccggtatcaagtccctcgtccatgcgcatcgtcgtcactccggtgacggcgtcgccgtttatgaccgcccactgaatcggtgcggcaccgcggtacttcggaagcagcgacgcgtgcacattcacacacccgtagcgcggcatatccagaatcgctctcggtataatctgcccaaaagcctccacaattatgatatccggatgatatgtccgcagacgctcgatacactcgctgtctctgactttctgcggctgatatacttcaatgccgtgctcgagcgcacatgccttgaccggtgtatagcggagtgccttgcttcttcccactgccttatccggctgggagacaaccagcaccacctcatgtcccgcttttatgatttcttccaacgttcccaccgcgaaatccggtgttcccatgaatatgactctcatcactgacctccattttcacagatcatccatgctttattcttcctcatcactctcataggtgacttcgtgaagcggaccttccaccttctcagtgtacatgtgtccgtccagatgatccagctcatgacagatggcacgcgccatcagctctgtcccctcaatctcatactcttccatatccagatcaaacgcccgcgctttcacgtagttcggtctggtcacggtgcctgccttgcccggaaggctcagacagccctcgtcgcctgtctgctcgccggaagtctctaagatcaccgggttgatcatcacaaccggtccttcgccgatgtcgatgacgacgatgcgctttaacacgccgacctgcggacctgcaagtcccacgccgttcgcctcgtacatcgtatcaagcatatcctctgccagttctctgatcttcggtgtaatctctgtaatctctctgcattttttggtcaatacaggatctccctgtattctgattgtcctaagtgccatctttcctccattctgcctaaaagccgttcaccggattgaaatcaaacatcacagtcacattcttatagtaccggctctctctggcatacacttctgtcctattttttatctttaccagcgtgtcataattttctgccttgagataaattatttttttataaatatcattcacttttgcgatcgccgcgtcgacgggtcccacgagatagaccttctctttcgtattccgccctgtatacgcatccgctgccgccgcaagctctgccgccatggaatccgccgcctcctcactcttagaggcgcacaagatcacaagcatattccagaccggcgggtaaagcatgatcttgcggtacgcgatctcctgctcgtaaaacgcatcatagtcctgcgccttcgccgtctctatgctgtaatgctccgggtcatacgtctggatgacgacctcacccggcttattccctctgccagctctacccgctgcctgcgtcagaagctggaacgtccgctccgccgcgcggtagtctccgacatgcagcgagagatccgctgcgagaacaccgaccagcgtcacatccgggaaatcatgcccctttacgatcatctgcgtaccgatcaggatatccgcctcatgattggcaaatgctgataaaatctgctcgtagtcttccttgccccgcgtggtatccatatccatgcgcagcacgcgcgcctcagggaatcgttttctgacaaccatctcgatcttctctgttcccgccttaaacccgctgatgtacttcgatccacacgccggacattgtaccggcaccggctccgtatacccgcagtaatggcagaccatctgcccgttcgcatgctggctcagcgatacatcgcaatgcggacattttatcacatgtccgcaggctctgcaagagacaaagcccgccacgcccctgcggttgataaagagcatggtctgttctcccgcccgcaggcgctgctccatcagcccgtctaacctgcggcttaggatggagcggttgccctctcttaattcctgccgcagatccaccaccccgcatgccggaagcggtctttccttcacgcgctttgtgagcgtaagcaaccggtattctccgcgcttcgcccggtaatagctgtccaccgacggcgttgccgatcccagcacaacgctcgcgtccagcatggctgcccgcgcaatggcggtctccctggcatgatagcgtggaaccgtctcactcttataggaagtctcatgctcctcgtcaatgatgataagccccagattggcaaacggtgtaaacagtgctgacctcggaccgatcatcacgtcgatctccccgttttttgccctaaggaactgatcgtagcgctcccccggtgacattctggaattcagtatggatacccggtcgccaaaccggttatagaaccgcagcaccgtctgatacgtcagcgcaatctccggaatcaggacgatggcctgccgccccgccttctgcatcttcgcgatcagttccatatagacttcggtcttgccgctgcccgtcacaccctttatcagataggtcgaccggattcccttctcgtaatccgcccagaccgcatccaccgcttcctgctgttcatcgtttaaagtgagcccatatcctctgctggtcaggtgggacaccggattgcggtactgcgtttcccgaattactttgacgacgccggattcctccatcgctcggatcacacttcccgacaccccaagcttgtgtgtgacaagatcccagtccagctcctcctcttccagcagcgcacgaagcagcttggcgcgggcggtgctgtggcgtctctcatacgctcccagctggttcttcgcctccaccggatgaagcgcaagccgcacccttttatgttccacggcttttttcttctccttgatcggaagtaccatctttagcgcctggttcatcgtgccgccgtaatgttcccgcatccagcccgcaagcgcgatcagatgggactcgatcggcacactgtccgtcacgatccccgcaatatttttcagcttatcctcgtcatactccgcctcatcggaaagctcgaccacatagccggtgatcctgcggctgccaaacggaatatagacctgcattccgactgcgatccgctgtgtgagatacggcggaatgcggtactcaaatgtcttatccagtttttcctgtgaaatatccacaatcaccttcgcatattccgccatctgtccacctcgtttctgtctatattctcccccatgtcagggcttcgtctcgcgtcctccaccagcccgtattcactgagcggatagcgcacgccgcgaatctcctgatatgcctcgtgcccttttcccgcaagcacaagcatgtcattctccatggcttgcgccatggcataccgcacggcttccctccggtccgcaatgcgcacatactgtccgccggtttcccggatcccgtcctcaatgtcgtccagaatctcctccggatcttcccagcgcgggttgtcggaagtcagtatcgtaagatccgccagatgtcccgccgtctctcccatcttcgaccgcctgagcttcgaccggttgccgccgcacccgaacagtacaataagacgccgcggcttaaacccgcgcagcatttccagaagattttttaagctcatctcattgtgtgcatagtcaatcagaatgacataatcttcggaccgcttcacattctcgcatcttccggggacttttgcgctgcggagtgcaaggcagatatcgctctccgcggctcccaggtgtcctgccgcctttatggccgccagtgcattgtagacgttaaacgttccggggagctgcattctcaccggatacaccgccgtcttcccgcgcaccagaaagcttccccaaagttctcccgactgcataaaaaagcggatattctccgccgtcacatccgccggatgccgcagggaaaacgtctccacgctgcaggtatgtccctgcagtatgcgctccgtgtgcggatcatcccgattgacaatcccgatccggcactggcgcatcaggcggctcttgcagaacagatattccgcaaacgaagcatgctcgccctccccgatatgatccggctcgatgtttaagaacatgccgatgtcaaaaaatatcccctccacccgctgcatcttcaacccctgggaagagacctccatcacgcaggtatcacagccgttgtccaccatctgcgccagatacttctgtatctcgtaggcttccggcgtcgtatgtaccgctggaagaacgccgtctccggtatcgattgcgatcgttccgatcattccggtcttatgcccgctctctcgaagaatcgcagaaagcagatacgccgtcgttgtcttccccttggttcccgtaattccaaccatacgaagctttgccgccggataatcaaaaaaagctgccgcaagctctgcgagcgcgtgtctggtatccgccgcaatcacaacggagacctgccaccggtctatgacctccgagatccgcacaccaaactgttccgtgtacaaaagtgcatcattgtccagtggaaccacattctccgccgcaaccacaactgctgccgccccggcttccagcgctccctgcagatagtcatgcccgtcggcatgcagcccttttaggcaaacaaatagggagccctccctgacattcccggaatggtaacagatgtctgttatctcacggctctggcttccctgcacatgttcatatgtaagatgtttcaataattgattcagccgcatgtcatcctctgccgaattcgcttttttcattatatgccagatcttatggttttacaagttatcccgatttatttcattttaatttcagaaaatgtacatattttgtcaggaaccggaaatactgaaataaacgaaaaccggaggaatctctcatatgcgcggacgtaattttctcatctgcggactgaccggctggtgcatggaaattctgttcacctccgcaggctccctcgcacgacatgacggccgtctgatcggtcagacctccctgtggatgttccccatctacggtatggctgcctgtatcggtccggtctatgcaaaaataaaaaagctgccggcactcctgcgcggcagcatctatacagtgggtattttttcattcgagtacttaagcggttctctcttaaggcggcatcatttctgcccctgggactacagcagcgccagggcaaacgtcaacgggctgatccggctggattatgccccgttgtggcttggcgcaggtctgctcttcgagcgcattctcgtgcacgcaaaccggctcacatagccagaccgcgcatggcgctctttcccggcacgcattcctgcgccctgtgaaagcagcggcttttcctacagatccacatcgtctgcaaggcttgcaccgatgtcctgcatgtttaacgtgcgtctcttgatgcgcgccgcctcggatgccttcagaagataattcttaatctcctttgcatgcttgatatgactcaggcgaagttccttgtctgtcacgtctccggtgtagcagatgatcgttcccagcccgaaaatccgctccggcagtgtggctgtcagcttgacatcctgcactttgtacatgtagcagtcattctcttccaccttgatcaatccctcatcgacggtaatcatatcctgactgatcgtatattttgtaaatgtccatggaagtccgaagaaaagtaaccgtttgcgctcctgatactttacctcctccgcttctccctgactaaaatttgtctcttctgccatgtctgttcttcctttccttgtatgttccgccccaggcgaaactttttgcattcttttctgcgtacctgtagtttacttcatttttctttttcgcgcaaccaaatatcagaaaatggcttccatcttttgaaatatcatgccaaacagcccgtcttttcccgattcgtgcgtaaatatttttccccttgaattcgcagagtgattattatatgatagaaaaaatgcctggagacagacagatttgttctgccgtttccggtcaatacaaggaggattttatgcgtcatttaatgagcccattggacttctccgtcgatgagttggacaagcttttggatcttgccaacgatatcgagaagtacccacagaagtatgcccatgcatgcgaagggaaaaagctggcgacctgtttttatgagccaagcacccgtaccagattaagttttgaagctgccatgttaaatctcggcggttctgttttaggtttcgccagtgccgattccagttcggcatccaaaggtgaaagtgtttccgataccattcgtattatttcctgctatgcagatatctgtgctatgcgtcatccaaaggaaggtgcacctcttgttgcctcccagaaatcccgaattcccgttatcaatgccggcgacggcggtcatcagcatcccacccagactcttaccgatctgttaaccatccgttctttaaaaggacgccttggcaatctcacgatcggactctgcggcgacttaaaattcggacgcaccgtacattctctgatctctgcactaatccgctacccgggcatccgcttcgtgctgatctccccggaagagcttagaatcccgagctacatccgcgaggacgtgcttgcggcgaacaacatcccgttcaccgaggtggagcgtctggaggatgccatgccggatctggatgttttatacatgacccgtgtacagaaggagcgtttcttcaacgaggaagactacgtccgcttaaagaatttctacattctgaccaaagcgaagatggagctcgccaaggaggatatgctggtgctccacccgcttccgagagtcaacgagatctccgtcgaggtcgacgacgacccgagagccgcctacttcaagcaggcacagtacggcgtctatgtccgcatggcgctgatcttaacactcttagacatcaaggtcgattaacatcggcagaaaggacagatacatgttaaatatcagtggaatccacgagggttttgtattagaccatatcaaagccggcatgagcctgcagatctaccacgatctgaagctcgacgagcttgactgcacggttgccatcatcaaaaatgcgaagagcagcaagatgggcaagaaggatatcttaaaggtggaatgcccgatcgaagcgctggatctcgacatcctcggcttcatcgatcacaatatcacagtcaacgtcatcaaggacgacaagatctatgagaaaaaggagctgcaccttccaaagcaggtcaagaatgtcatcacctgcaggaatccgcgctgcattacttccatcgagcaggaactcgaccagatcttcctcctgaccgatgaggaaaaggaagtctaccgctgcaaatactgcgaagaaaaataccggaatcccaaccgcagataaaccgactgtgccttttgaagggataagcagtactattagaaacagat

SEQ ID NO: 11564 - DNA, 66604 bp, Unknown
  gut microbiota DNA sequence
taatatagtattgtcaatattattattcaaaaaaatgatacatttattttccaaaaaaagaatcctgtttgcaggattctcctatgaatcaaaaaatcgtacatgcatgtgtaacgcttacacaacatgtacgatttacatttttgattcgctttatctccggcttctgtctgccctacgcttcccagtctgcgcgtttgataatccccacgccgatcggatacggtccggtatgaacgccgatcgttgcgccgatctggtaaatctcaatctcatcgatccccaggcgctccctcacaagatcttttaacatctcacgaaaatgacaggcttcctcataatcatagccatagccgatggcaaaactgtattcgcccggctttgcggtgcgttcgtccagataagccttgagcatctcaattactttctgcatggatttttcccggctccgcgcaatgccggaggcaaaaatctcgccctccttcagtgtgatgagcggcttaattttcaacgcgcttcccgcaattcccatcacttttccgattcttccgccatgctttaagtaatcaatgttgccgatcgtaaagaagattctgccgctctcccttatggcaaggagcctctccaccatgcggtcatactcccagccgaggtcgcgcagccggcatgcttcaagtacatacaagccctgcagcaccgtgttgatctctgcgtcaatgactgtgatgcgcgcctttggatattcctctaaaatcatatttctggcagtcgtcgctgactgcatggagccgctgaacttcgtcgtgatacagatacagatcatcggaacatcctgctttgcgagcgggagaaaaacctgataataatcatccaccgacggcatcgacgtcttcggaaatacatccggatgatccaccattctctgatagaactcgcggatatccagttccaccccctctttcagataagtttctccatcaaaagatacatagaaaggcaccaccagaatatcgcgctctcttgtgagctctcttgaaaggtctaatgacccgtcgctgataatttgaatcttttcctgcataaatctccttcataatctgttcatcagaataaataaacaccgcgctccgtgacacggatctccgggattaccgtaagcgccataaaagaaagggtaacaaacggatctacattctctgagataccaagttctctcgtctccttctgcatggcagagagcttttccgtgacttcctcataccgtctgtcgctcataagacccgcgatcggcagcggcagtacatcgattacctttccgccggacacgatcgcatagccgccctgctgctcctccacagtccggatggcaagcagaatgtcatcgtcattgtctcccgccacaatcagattgtgggaatcgtgcgcaacggacgtcgctacggcaccgccttttacgccaaagcccttgagcggtgccacaccgatctctccggtcttgccgtggcgttccaccacacagatcttattgtatacttcattcgggacaaaatatccgttttctgtcggcacttcttccaccagatgcgtcgtcacgatctgatgcgcattcatctgtatcacatcggtctttccgttgcatgcaagctgaatccgctctctggaaagctccccgacatgaaccgtgtgaagcagttcctccggcactggaacccagtaatccttcttatagtcttcctctcccaggatcctgccgtccttcatcacatcggtcggacgcacctcctccagattatcgaggaacacaatgtcggcgtgatatccagctccgatggcaccgtatcccttgagcccgtaaaacattgccggctggtagcttcccatcttgtatgcctttgccaccggaaccccaagtgcaatcgccttgcggatacaggtgctgatatgtccttccttgcggatttcctcgatatgcttatcgtcggtgcagaatgcgcactggtcgagcgccacattggcatctaaaagcgtgcggattaacgtttcaagattcttggcaccgcttccctcacggatatagatgtgaaaaccggcgcgcagcttgtcgagcacttcctcggagttcgcacactcatgatcattctccacgccagccagacggtacgcctgtaccgcctttcctgtaatgcccggcgcatgtccgtcgatgtgcttctttgcaaaaagttccagcttatccgacatccggcgctcgccctggtaacactccacaaaacgcatggtctccccgagtcccagcactctcgcatcatccacatacttcatcatatcggacgccagaaactccccgcatccgtttgtctccacatcggttgccggaacagaggacggaatcatgaagaaaatatgtaccagcgccttgcccgcacatttcagaaaataatccattcccttcacaccgcacacattgacaatctcgtgcggatccgcaacaatggtcgtcgttcccgcctgcaccagcaccttggacaattcgcccggagataccatactggattcaatatgcatatgggcatccagaaatcccggtaccagatattttccggtacagtcgatctcccgctcaccctcgtaggaaccgactcccacgatcgtatcgccgcagattgccacatccgcttccagaatctcctccgtgaatacgttcaatactttgccgtgctttaatacaatgtctgctttccggattccgttcgcgcaatccagccgtctctttctgtctaccatagattccttcctctcctccgtttacgaaaacaatcccttaaagaagtccgcgatcgagctgaatacatttgagaaaaatgtgcctacgctcgagagcacgctgctgtctcctccgccgtccttaaaggaatggtacagtgactccgcataatccacaaggctgtcaagattgattcccagagatgtaatctttaagagcagatccacgatctgctgacgctcggaatctgacagtgtcacattatatttgctgcaggcatcatcaattgcctggttgatgctcgcctcatctttcagatcattctgtgcaatgaccgacttgatgtaagcgataaactcttccacttcctcatcggaaagtccggcaatcgactgttctaactgcccggtaaccacgagctcatttaaggatgcgtcgatgatatccgcattgatcgtctcacctgtcatctcctggtatgccttgaatacgccgacaagcgccgccgtaccggagatctcctgcggtcctgcaacgatgatatccgcatcggtaatacccgccgttgtcaacgcatttttgtacatgccgactgtacagtaattgatattcctggttgaaatatttaatccgtttcccttatcgcgttttacgatcacaacagaagaccatgacttgcttccgatctgtgaggaactgatataggaatccagatactgatgctcctctgcattcgttgtgtagaccacatcataattgccaaggttcgccggatcaatccccatcagggaaagcaccgtattcttctgggcatccgtcagatccgctcccagcgcaagatatggcttatcatccgcctggattgtcacgttatcactgtttgctcccgtggcagcgtcctccgctgccgaagcctgtgactgatcctgcgcctctgccgaagtctgatcctgccctgcctgattctgcgactctgctgaagtctgatcctgacttgtctggtctacgacaacctctccctctacattcgctgatgtatccgccgcggatgccgtcacaggcgccgatgcaagcatcaccgcagccagaaataaactggtaactctcattccattctttttcatgtgaaatcctccttccaaaacaagtctctattttactacgaactttccctaaaaacaaccggcgttttccctccagtagttttatttatataaatttaagaaacctgtccggcaagattacagttccacatgcacgttcagccaagccgcaatatccgccatgacctgatcgcggtctgtctcgtttaaaatctcatggcggtcatcctcgtacaggcggtaggtaatatccgaaacccccgcatctttgtacatcccgtacaccttcttaactccctctcccagatctccgaccgggtcatccgcaccggatacaaaaaacagcggcagatttttcgggaccttttttatattctccatctgattgtcaaacaataccgcctccatcaggcctttgtagccgtttacggtaaacagaaaagtacagcgcggatcagcatagtatgtcttgacattctccacgttcttggaaagccagctgttggcataatcctttccatataaatcgtagcgcttgtacggcttgctgtaggaaaggctctgcatcaggcggcttctgtaatgccatccacggaatagtgcgatcgtacggcataaaaacagtccaaacttcatcgtgctatccggcattgccccggttcccatgatgacggcgccagccactccctccgggtgaatacacaggtatttgcgcagcatgtaagatcccatgctgtgtcccatcataaaatacggcacgccggggttctctgcctggaccgtcgtgcgcagcgtgtgcatatcctcgacgagcgtgtcactcggatccggctctgcaaaatatcccaattcctcctcggatgtaaccgacgcaccatgtcccagatgatcatgtccgaccacaaggaccccctggtcatttaaaaattccgcgaacggcttatagcgttcaatatactccaccatgccgtgcgtgatctgcaagaccgcccggtactctccgctctccggcatccactttaccgcatgaatcttcgtcttcccgtcctttgataaaaaactgaactgtttttcttttgtcatagcattgttccctcactttttattatttatactctctgattcctactctctgctctgtattctttgcagcaaaaccggcatcatccggcttcccctgccgactgcaggatgctcttgcagacattctccagttcatccgcgctgctcttctgctctgccagttcctcctgcatgccggatacatatttcaggaatgcctccctggcgcgcacattttcgtccgccgactgctgcagcacatctgctctcgcgaccgccgtatcctggatcagccccctcagcccgatctgtccggtctcataagccaccatattctgcgcacagtcgcggtagagttttcccatggaaatattattctccttgagcagctcgtttaagtggtgtacctgctcctccagcgacgtgatccgttcttctgcctccccaagctgggcttttaacgccagcgcctcctgctcataatcgtccgcatatgcacgcacctgctctgccgccgtcacaaaccgggttccgctctcccccattcttcctgcttcgatcgcagaattgagcgccagcacccccatcgttttcgacagttcctccatgcgctctgccctctcaccaagtgcctggcgcatctcgcgaagcgcctgcggagcctccgaaatatgcttcatcggcgtcgtaaagtgcttgttgttctccacgatctcgacgaccttttcattctgccccttcacctgctccataaaaacgctgtggttggcgtcgaacgtcgcgattccgttattcattgtgatcaacgtattgtgaagttctcccgccgcctgcgcgccgttctcagacaactccccgttctgctgcatctgctgttcgatctcttcgatctctttttccatctgtgcacgcgaggctgtcatgcgtgcaaactgttcctccgcggtatccttctgtcctgcgatcttatggagcagctccctctcgcgcttctccgtctcccttaatgccgcaagttcctcttctaataaagccttttctctctttccactaaacatagctactccttctgtccacccgccacgttctatttatagttgcgaatgatgagctggacactctccattccctgatatacattgatttccggatagtaaatcaccgacatccggatggcattcgcccttccgcgaagcgcagcgtccacctccgtctgcccgtatttttcgctgtaatactgcttccatgcctccacatccccaaaatagaccgcagagacatgttctcccgccgccgtcataagggacagcttcagcacattctggttcctgcccaccacagacgcccgcagaagcgcaagctccctgtccgcgaactgtggcttactgttgccatttccaaacggctctaagcgcgccagctcccggatcagcccgatcgtcggatacgcggcaggcattgccatatctatccttatcttaggtataaaatcttcttctgtcaattcacagcaggcatttattttgccgcggaataccgccacatcctcgcacagagacagccctgccgccatcggatgtccgccgaattttgaaaaacattcccggcacttgcacatctcgtcatacatcgagtacgcttccgtggatctgccggaccccttcaccccttcctcgccgtccgtcagaacaaataccggcttgtggtaggactcccggattctccccgcaatgatccccgccaggctttcatgcaccccgggcaaatagatcaccagcaccttctcgcccgctgttccctcgtcgacgatctgttttgccagttccacgccgtctgccgtcatgcttttgcgctgtgcgttcagttccacgagttcttttgcaatttttcctgcataaatctcgtttttttgcaagaaaagattcagcgcaattttggctgtctccaaccgcccgctggcgttgacgcagggaccaagcacaaatccgatatggtacgatgtgatctgctccggcgtcagctgattctgtaaaatcaaggcgcgcatgccaaggttcgctgtccggtgcagccgctttaatccctcccgcaccagaatccggttctcatccgtcagttccatgacatcgcccactgtcgcaaacgccacaaattccagaaacgcgaatgcctcctccgcgtcaatacaaaacttctcgtaaagcagctgtataatcttccacgccaccgtcgccccgcagagccctttgtacggataggaacactcctgctgcttcggattcacaatggcatccgccgcgctccgcagataccgccgcactccctgctcctccacatagggaatctcatggtgatccgtcaccagaaccgtcatccccagctctttcgcatgcgcaatctcattgatggctgcaatgccgttgtcgcaggtgatgatcgtgtccatcccctcctcatacgccgcatcgatcagatgctcattgatgccgtagccgtcacgcatgcggtcgggaatcgcgcaggacacactgccgccgcatcgtgtaatcccctgatacagaatataggtagacatcacgccgtcgatgtcgtaatctccaatgatccggatcggtcttccctgccttatcttttctgacaggatacaaaccagcttctctgactcataaagcagatgcggatcatacagatccctgcatgtgccgttcagatatttatcaatcgccgcatcaccgatcaccccgcggttgcggatcagccgcgctgtcacgggactgatgccaaaccgttctgcaatcgcctgaaaatcggcgcctttttttatttcataccacttttccatcttcacttatgcctgttccatcgtattctgcccgtcgccttcgtattccacggagagaagcgccagccccagcgccggtgccgtgtagcccgccgcctgtctgtccctcctggcaagcacgtccgtcatactccccggctctcttctgccgtctcccacctcaatcagtgtccccgtcagaatccgcaccatattctgtaaaaaaccgttccccgtgaaaaaaagatctatctccgattcgtgttcctccacacgaatctcataaagcgtccgcactgtggactttttcattcttgtattgccgcagaacgacttaaaatcatgctcccccagaagaagtcccgccgcctcccgcatcctttccacatcaagcggaatcctgtaatcatacacatacctgcgcgcaaaaacatccggcaccgcgcccgtatgaatccggtagcggtaggttttgcacactgcctgatagcggctgtgaaaccgctcgtccacctctgtcaggctgcttacggcaatatcctccggaaggtaacagttcaatccatccagcagctcccccgtattgcgcggctgcttaagatgaaaattggcaacctgcccgatggcatgtactcccgcatcggttctcccggaacctatgacatccacctgctgtcccgtcatccgtgtcagaacagtctcaagcttgccctggatcgtcgcgtccgtcgcatgctggctctgccatccgctgtagcgcgtgccgtcatactgtattgtcatcctgtaattcgccataaaattctccaaaaaaaatccccagtttgtaacttattctatcacaaaccggggaaaaaaccaacctctaaaccagctccgcaatgcgcgtaaccgcgacataaatctcggaaatacggtaccaggtccgaaagtcgatcactcccgtgaccggaagtccgaagatactctggaaacgctccaccgcctccctggtttccggcccgtagattccgtccggcgtaatcgtcggaatggccgggtaggaacgcgagatgcgcgccagctgttcctgaatctgccggaccttttctcccgtcgatccgaccgacagatcgactctcggccaggacgccgggatgcccgagacctcctccgccgtgttgatgaacatgttattgccgtaatagtagcgcagaatctcaatcgtctcataattctgatcgccgagatacttgctgccccactggctcagccagttgctgcaggtcacgcgctgcccgtcgcaatactgcgttaagatcggctgtctgacattcggtctggagagatagttctggaacatctcatccaccacgtccgagatgctctggtaaatgttgcgcccgtacatgaatttctgatcatatgccgtggaggacgtgatcgtaaagctgtagcctttgttgcggtacatcggggctatcgttttcaagtaatttttcgtccaaaaaattatcaagacgaatcttgaattttatggtaatatcatcatcttttactatgattttatctatcagagttgatagtatcatttgttttgtcgctacatctgaactcttaaaaatctcactccattttggcatcgcatccacataagccagtaattcattagattgtacagacacctcatccaactgcttttgcaatctgattttgtttgcttctatttccttttttgaagtctctttatcagatattataacagataatttatctacactaaacgcaaattctcctcgaattgcttcgggtaatttttcttccagtgtttctatatctgctgtaagactttttattgtcttttctaagtccttgatttcacgcttgatgtcctttgtctgctgtgcctgcatatcttccaattccttagagatatctattttctttagattttcaagatatgattctactgtagcaaatactatgctttctaaatattcctgtgaataagtgcttctaggcttacacccatttggacatccataacgccctacataggagacttttttctcccctgttttcttgcaagtccagtggtttgcatagccagtgttttttaatctctttccacagtacccacaataaaccatgcctgtaagtgccaatcttccccttgtagagaatggcacattatattgctccatatacaactcatttgtagcctgccttgcagcattgattttattctttctggcttctctgatttcctgcgctctctcccacaattcctgagacactattgttatctctggattctgctctctggcataagtccattcttttctgtctaagcgtgtactgtttgcatgactattttttcttctgttgtatgctacgacccccatgtaaataggatttgtgagaatgcttcgcactgttccatttttccattgttctaatataggtgctggtacaccattctcattcagcgtttttgctatcttctggaatcccattccttgattcactgcatagccaaaaatctgtctgactacttctgcttgctctggcacaatcactaatttatgtaatgctcttccatgattgcttatctctccagacaggactagcttataaccataaggtgcactgccacctacaaaccttccatcccttaccatttccaccatggtatcatggactcgcatacctgtctttttgctctctccctcgttctgccagaaacgaatatagttgagaagcttatctatatgttcctctgtttttaactgaccatcctttatcgtccagacttcaattcccatgcggttaagttctgccacatagaaactgtattcttcctgcctgccgattctatcagacatataggtaagcagaatttcaaactctccttgttttgcgtcctgcatgatttcttgaagtactgctctgtcctccactccattgtggtaggctgatattcctttttccaagtattccttatcaaaaacccagtctttttgttttgcgataaactgctccgcttctgcacgctgaataggtatgtcatcatcatgcaactgttgtcttgatgatactctaagcaacgttcttgctcttttactcatggctcattcctccttgtgaacttgtttcacaatgtgaacttgtttcacatgcaaacttgctttgcattttcccctttggggttgggaatgataccgcttgcaaactcctttgtaaagaccctatttgaattttgtttaaataaacttcttttagcatatgctcaaatcggtctgcatccctaggatctacagtatatggaaattctaaggtgatttgcacctttttatttccctgcactatctcttgtgaatatgtttccatattctgcatattgttttgttctcttatcttactttttacatctttatgactatctgcagattgatattcattccattgcttttccatgataaataatctgtttttctgttaactctaccacttctccctttggcaagctgtacgcttcataacagatagctcttgctcctaaaaagatttcatttgttactactaattttctacacatattgttttccttctgcgcttcgcatttattatcttgtttcgggcttttcttttactgccctccttacatttaatacaataacgcgtggaaagtgtggtgtcagtggtggtaatagccaaggattttgatatgggattagtgatgttgtagaaatataaaaggcacacattttactgtgcgccttcataatttagataattgaattttcgtagtcctgtaactcatggtacatgccttcaataattacttttttatcaatgatacgataaacaaacagatatctatgcttaacaaatttaattttatgcaatcccatttctttcaatcgtttactgttacaatatccaaagctgtctgccatcttctctaatttctcaatcgtatcatcaaaatcatttattacattttccaatgcctgttgatttttcaatacgttagaaatataggagagaatattatcatattgagtttctgccaattctgaaagttctacattaaactgcatacttctccctcatgctcttcgatactgctcgtgctgactttgttgctcccatgtcactttttctgattgattcagacaactcttctactaactcgtcctcactgatccttttaagtccacttgcttctgatttctcggacagtctgtttacaagcatgattaccatattataatcttctgctgacaggctctctattttagccgtcaattctgcgatacccatgtacaaaccagctcctttcgtgaatctgtgttcaattttattataagtgctattttcagaaaaatctataacaatttattccaagtttctaactattatacaagcctgcaattctataatactgcctgcttgtcctatattttcttttctccggataaaccaccagttccctacagaagtacttactttttctctccaagactttacttgaaactattcgcctacctaccactccgtgtatacacgattgagcgtaaacgacatgatggcaagaacattcgcccggatcgttgtgtccggccaggtcgagtagatctcgctggaggcaacattcttgatataatctcggtaacggacatagtagtctctggctgtcggatcactcggagcgccgtcatgtacaatcacatattccgggatcaccacacggcttaaaacgatctctccggtttccgtgacgggtttgatctcggcttccgcgatcttgggcggatattccgcaaaaagggtatgtgccggaatgacgatattatcggtcatgctttcggtggcttcctctgcgtccatccggatttcctgcagcgacagctgacccgaaaagacctcaatgccggagatattgatcggacgatatccttttgcagtgacctgaatggtatactccgcgtaaggctgcacctcgctcggctgcattgacagttcaagcggaggcgtatcaagcgtaagtgtttcggacattccggaagcatccgtgttcacctcctcgaccgtgctgtcgggatctccggaataggagatcgatattttcgcatcgtcgatcggtgtactggttccccgctcgatgacctgcatcctgagatctccgcgatccacattctcgttctgtgcatatctgatgtctggcataacaacctcatcgattcttttcgtattatcatatgccggtgccaaatgaaatgtgcgcatccgccctgccgaatccggtcacaaaaaacgggttgtcactttaagcagacatctcctttggcgcagtaggtaatatgacaagaagatcatgcctatcgatttctgagggaatgcagctggaacattcgttgaaaaaaatgcgtacattttttcctgtcggatctttgcatcggattccgtgtctcttccacgttttgacaatccacggaatgtgtccgacaaaccgcagacaatgagcggattccctagtatccctagcggcactgcttcacagacaatataaaaccgcgcgaaccgaactcgccagcatctgctattgaagtcagggcagatgccggctcagacagcggcttcgcgcagttatgttttgctcagcagtgtcgcaagggacacacgagaatcctaaaattgtctgcgggttgcggacacacccgtggagtgttcaaaacttggaaaaacacggattatcgcagatgcaaaaaccggcaggttagaaatcacattttttgatccgaatgttccagatgcatcccatctgaaatcgaaggacatgttcttttccgcatattccttcgcacgccaaaaagggattgtctgctcaaagcggcaatccctttttccttccgttatatgctaagacacgcgcgtctcatccacaccttccacagatcttctgctttattctacggtaacaaccttcgccagatttcttggcttatctacatcgaatcccttatcggaagacacatagtacgcgagcagctgcaatgccaccgatgccggcagcaccatgaactcatcccgcatatccggcagcgtgaaaatctcgtactccttcgctaaatctcccgcaatgctttccttgataaaaacgacaacgtccgctcctctggactttacctccttaatgttggaaagctccttggacatcagtttttcctgcgtcaccgttgccaccaccggcgtatcctgcgtgatcagcgcgatcgggccgtgctttaattctccggatgcgtacgcctccgagtggatgtaggatacctcctttaacttcagcgatccctccagaagaatcgagtaatccagtcctcttccaatcatgaacaaatccttagcgccgagcacctttttggcaaccacatggatatccctgcggcgctccagcaccttcttcatgacctccggtgtccgctgcagctcccgcacaaagctctgggtctgcgcgtcgtcaaagacacctctgctgtgcgccatacgcgccacgatcagataaaataccgcaagctgtgtcgtatacgccttggtacttgccaccgcgatctccggtcccgcattggtgtagagcacatagtcgctctctcttgcaatggaggaacccttgacgttgatgatcgcaagacactttgccccgcggttcttcgcatacttcaccgcctctaacgtatcgatcgtctcaccggactgcgacacggcaatcacaagcgtcttctcgtcgatgaccggatccgaatacatgaactcggaagccatctgcacctcaatgtgcatgtgaagaatggacttgacgagcgcctgtgccaccagtcccgcgtgcattgcggttccgcacgctacgatgcagatatgctcgcactctgtaaaaagagtgtccggcacgccgtccgctgtaaaatccggcatacctccgacgatacggttcctgatggtattctcgatggcttccggctgctccataatctctttttccatatagaacggatagccgttcttcccggcgctgtttaattcccagtccacggtcagatactttggcagcacctcattgccgtcaaaatccgtcagcgtcagtttgtcagcggagagctttaagatatgatactctggcacgacaaaataacggttcgtaaaacggcagagcgccgtcagatcactggcaagcatcgcgccttccttacagatcgtcgccacgatcgggctgacattgcgcgttgaatagatcacatccttctgatcttcaaataaaatgacaagcgcaaatgttcctttcagcttggagacggtctttttgatcgcttcctccggttttccttcatagaaccggtttaaaagcgctgccaccacctcgctgtccgtctcggacttcaatgtatccgccaggtcgtaatccacaatcagttccctgtaattctcaataatgccgttgtgtacgagcgtgacttttcccacttgatgcgggtgtgcattgcagtcgttcacaccaccatgcgtcgcccatctcgtatgaccgattccgcactgtgacaccactttttctgacgcgcagatcgcccgcagatcactgactcttccggcacatttgcggacttctgttttcccgctctcctcgtcgcgcagggcgataccggcgctgtcgtatcctctgtactccaacagttccagcgcatccaaaaggacttctcttacgtcctcacttcctgtataacctataattccacacatatgatttccccatttctattacaatctgtatataacaatatttttattcaggtctcttctgtttctattccatcaaagtctgttccatcaaacatcgtatttgttttgcagtcacccgcatatttgccgatgtgtctcgcactggaacggtacggaaaggcatccgccgaattttcgatcacctttctcctcgttaacctgccagggcaggtgcatggcgcttagggaatctctgtggattacggtacagatcagattgcgtatctgaacacataacgttccccttatgcagttatcaaggttcaacgtgtttactatactatgatacgtgaaaaaagtccagaggggattctgttttgccgccgggtatgctatacttagctcatacaacagtgaaagaaggaacctcattcatgctcctgaaaaaccaaaaagaagacaccaccgactacaccaaagactggcccgcgcgctactacgacattcctaccggcacactgcggcgcgaacacctcaagcgtgcaagatccgagggctttgccgttcctgcagattcctaccgggaaatgctctgcgagcggcgctttttttccgaaaaaaaagacggcactgtggatgggtttttccgcgcctggaccatgatcaaggcttccgcagccgcaggtgtctcttttttccagaaaaagcgtcagaaaaaagaactgctcacttacatgaaggatctttgtctctccccggatgatctgcttcccgaatccgcggatgcggttctcatcgaagagtggcaggattttgcgcggggactcatctcctcctgcaccgggagcaaagcctactgttcgacgctctttggttttgtgccgatcaaggatgccaaggtggcggaaaagctcgccgcagagatccttctggtgaccagggattatccggcgctctttgatctggctgacgagtttgccccgttccgcaaagtcatgatcgagactttctgccagatgattgagaacggcgagacctatctgcaagcataaaaaacagccgcacagaatgttttacacactctgtgcggctgttttctgcttatactttcctgtattttatttcatataattcttcacgtctctcgatcctaccttagaatacggaagtctgatgtattttccgttctccagattgaggtcgtctaacgtatcccccacggagagcgcgtaggcaagatcgagcattgcctgtgcctgcccttccttgtcgttgtagacggttcccaccatctcgccggatgccacggcggcaagtcccacatcagttccgtcaattccgaccaccaccggccagtccgcccgcttcagatccgaggttttcaacgcatcgatggctccgagcgccatatcatcattgttggcgattacaagctcgatctccccgtcatattccgcaagcatctgcgtcatcttggtctgcgcctgcgcccggttccagttcgcaatcccgtacgcgagcttttccacctccacgccgttgtctatgatcgttgagaccgcatactcggtgcgcacgatcgcatcctgatgcccggcttctccctccagcaccacatactggaagacaccgtcaccgttcttatcggcatccggattctccttgaacgcatccgccgcaatctccccctgcatgattccggactcgaatgctttcgccccgacataatagaccctgtcccagcgctccagatcctcctccaccagttccctgttgaagaaaatgaccggcacattatttttttccgccatatcgatgatcgttgtcggctctgtccggtcgaccagattcacacagatcacattgcagccggcatctaacatttcctcgacctgactgttctgcgtcgactggcttccggccgcattgtagacttccacgttgatggcaatgcccgtctgttcttcctgctctgccgcatattcgttaaaatccgtcatcatctgcgatacaaacgtgtcatactgatcatatacggtgacgccgatcttaatgcttgtcactttctgtacctggccgtctgtcccgcagcccgccatgcttcccagtgtcaccagcgcaccaagcccggccgccattcctcttagcatcctctgtgacataacacccttcctcacttctcctgtttctctctgctactgcacaatcgggaacagcactttctggatatccgcatcatacagatgttcccggtcgaccaccagataattgaccttgctgcttctcgtggtatccatgtgataaatcagctgctttgcgattgcctccatgctctgataccccatattgaattcattgggaaccacgagcgtctgtatccagcccttgtccagatagtatacatttttctcggaactgcccacgccgtacagcgagcaccggtcaagtctccagcccagctcatccccggcaaaaaaatccaccatcatctccgtctcgtcattgccgagtgcaatcagaatgtccaccggtttgtcctgctctaacgtatagaacgcgtccttgatgctctccgcctttccttccaggctccactcgacgactgcaccgctctcgcgcaatccctgcgatacccccgtataacgctgctgcatggagcgctggctctggctgcacgcaagaattcccacgcgcttgccggcgaggtcatccccgaaatcggactgcaccgcctgtgcgagcgctgctcccatctcctcattatccggcgccaccaacgcgtagaccccttccggatcaacgtccgtctccagcagaagcaccgccgtctgaccggagagatcctccagctcctgtccggcgtgatccgtattcatctgcaggataatgccgttggctccatttgtaacctgctttttgaccacatccatctcttccattgcggtggaaaagctccccgtcgacacaaagctcaaactgatgttgtaatcccgcgctgcctgctcaagcccctgtctgagggaagtccagcggtcgctgttgctgttctcgacaaccacggagacgcggtaggacgtctcctgcttaccgacgtttagcatattgtaaaacgcccagataatcaccgccaccagcatcaggatcaacataccaaaataaagtctatttttcttcatcctgccgttcccccttcagctgttttagtcttcctccctccagcagttccgtattttctggtgagtacgcaatgtacggaaggtgaatccgcacggtcgtcccctcatccagacagctctcaatctcaagaccatacggctccccgaagcggagtctgatccggttatgtacattgatgagtcccacaccggagccgtgcttgcgcactctgttgttctctgtcaggagcgcatctaccatctcatccggcataccgagtccgttgtcgcgcacttcaacatagacatcgtctcccttccggtatcccacaaccgtaatctcaccgtcgccgtccatggattccattccgtaatagattgcattctcaagtaaaggctggatcacgagttttaccgtacagcagcttaaaatagcatcctccacctgaaattccacagtgaatttattcttatagcggatcttctggatattcatataatttctggcatgttttaattcgtcctccatggagatgatcgtctttccacggcttaaggaaatgcggaacaggctggcaagctgcgtcaccataaacaccgcgtcctcataccgctcgccctcaatcatccagacgatggagtccagcgtattatataaaaagtgcgggttgatctgtgactgcaaggcgtctagctcgctcttccgcttttcttcctgctccaccagaatatcatgcatgagttcctggatctgcgccaccgtagaacgcagcgtcttcccgagatgttccacctcaagcgaaccgcccacatagatatccgggttcatatttcccgcttcccagtccttcaccgaatcgttcaggcgctttagcggctttgcaatattcgcagagacaaactggtttaaaagaataatcatcagcatggacagcgacatcagaagaatcacgaacatccgcatccctgagattcccatatcaaaagaactcatcggaaccacactcacgatcttccagccggtgtaactgatggtcttgaccgtgacaatgcgcttttccccgtcatattcctccttgtggctgccatcctcgtaggatgctgccacaagattgttctccgaaaacagatccgtgtagatcagcttctgcttcgggtgatagatcagttccccgctgccgtccatcagatagacatactccgacgcattgtccgtatttgccttggtcaaaagctgctcgatactgctgtaattcatatccacaagcagcacaccaagtgtcgaattgccgccgcttgtcagctccaccgcctggcttagcgatacgacccagtaatagcggtaactcggatcgtcaaacaaattctgtacatgcggcgtggaaaaatgcacgttctccatctgtcccgtcgcctccgtaaaccattcctgatccacgatgtcgaggttgttcttctccgtggcaaccggcgctgcagcaaccagtcttccgtcgttggtatagcaggcgatgctgatcagattgtccttgttcgcctcatagagaaggttcatctcctcatcaagcgagtccgtcgccagatccttgtccttaataacgctgtagtacatggcatcggaaatacgccgcatgttgcgcagataactctccagattgattgccgtctggttcagcagctgctccgcgctctgcgtcgtcatatcttccattttattgacaaaacggttgtacagggaaatccccagaatacccatactgatgaccgatacaatcgtaaaagacaatgcaatcgtcatctgaatggactgcggcttgatgtgtttttccaggaaggaagtgaccttctgccgccactgttttactctttctctcatcctctttgcaccctatgcgccctatgcatcctgcgcagcttccatccggcttgtcttatacttggacggcgacatgccgaactgctttttgaatacatagctgaaatagttcggatcggtatatccgactttctccgcaatcacgtaagtcttctcgttctgtgtcagaagcagctccaccgcctcctccatccggtaatctgtcagatagttgatgaacgtcttcccggtctctttcttgaacaccgtggaaaaataggcggcgctcacattgaggtatccgcagatcgtctcaattccaaggtcggtatccgcataatgctctttcacatagtcgattgctttcgacacaaaggacttcgtcgtatcctggcgctcgttctgcacctgtttttgtaatttcagacagttctcacacagccattcccggagtgcatccgtcgactccagctgcatggcgcgtgtatacacatccccgttgccgccgaacacatcttccaggttgatctgattgttcgccccgaaacgcgacagctccgtgatcagctccataatgagaatccggtaccgctgcagcgacatcttgctgcccgcaagcttctccgtaaattccgcaatcgcatccagaagcggctgttcctctcccaccttgacctttttgatgatcttctggataaagggctcctcccacggcagatcggcattctcctgagggtcgatctccgcaatattgatggctctggtattgccgtagagcacacggtaggacacggcattcttcgcgccgagataggacatctgcagttcttccggaccgctgcacacatgcccgattcccgccgtgatcttcgccttgcagacacgctttgccatcttgcagatcttatccatgcagtcggtaaaacgtgtgatcgcctcctctgcgggcagctgggtaatcacaatgccatcccccagatatgtcacgatcttgctgtcatattcagaagctgccagctgctcctccgccagctttttcacggagaccgccagcagaaacggatcgatcggaagcgccccctccatcgggttggtcgtgctgatatgcaacacggtcaccacaaaatagggtccctttagcgtaagactgcagtttcttgcatattcctcaatggagtcctccggaatccgtccgtcgatgagcgacgtcaggaaattttcctgcagcatcggaagactctccagataatattcccgaagcttgtcaatattgcgcttttcgtccagttccttgtccagattgttcttgatccgctcaaagacctcgcgcagttcgttggcattgatcggctttaaaatgtattcttccgcctcgattttaatcgcttccctggcatactcaaattcatcaaaaccggagaaaataatgaccttgatcttctggtactgctcctttagcttccggcagagcgtaaggccatccatgtagggcatcttaatgtccgtcatgaccacatccacggaaagctcttccgccatctcaagcgcttccacaccgtttcttgcatagcccgcaatgcgaaagcccatgccttcccagtccagcttcttcatgatgacctggaagacctcttcctcatcatccaccagcaaaacggaatacaaactcatattctcccgctccttttcactcacactcatccattcaacctccgtactgatcctccatccgcttccagagaatgccgagaatcaccgtacagataatgatctccgccactgccacatagacattcacaaacaccagaatcgccatcaaaaaggtagccgcaccgaagaacagcagcagctttcctcccgccttgcagtacgcttcctcgtccttcaccggcggcttatgtttcccgcggattgcctggctgtcgtgcaaaacgatcagccggattgcataatacacacagatcacaagtaaaagcagcggaatccccgcctgctcaataatcgtatcaaccgtcaccttaaaaatcctcctgtactctcaaatctaaaatagcggctggttctaatgtcccagccgctattcattataatatactttttactttcttgctatatactttctgatatccagagagattgcgatgaagataacaacaccgattgcaatgtactgtgcgtttgcattcatacccaggtactggagagctacctttaacagctcgaatacggcaacaccgataattgcggatgatactttaccacgaccacctgttacagatacaccaccaatcgtacaagctgcgattgcttccatctcgtaaccatatccggtctggacggatgcaccgccggcttttgcaccgagcatgaaacctgcaagaccatacatagctgctgctttcatgtagattaagatcagagttgcttttaccggaacaccggcaacctctgctgcctgtgggttaccaccgattgcatacatgtacttgccgtgacgggtcatgttgaaaatgaaccatgtgatcgccgccacaataattgcgatccagatcaggtagttgatgccgaggaacttaccgttagatacgttcgtgtactgctctacatagccgccgagcggtgttgcattggttacgataagtccgataccatagacgatctccatcattgccagtgtggcgatgaaaggcggaacgtttaagtaagcaatgaaaaatccggtaaccgtaccgaatgccgcacataccagcatggcaatcagtgctacgacgaatacgttgagcggctgcatatccgggaagaattttccggaataatccatacgctgtaacagcataccggagatacatgcaccgaaaccgatcatacgtcctgcagaaagatcacatcctgctgtgataacacagcctgcgataccaagtgcaatgacgagtcgtgaactcatattcatcagaatattcatgaagttgttctttgtgaagaagttatcggatgtgaatccggtatagattaccaggatgaacatgacgatgataactccgttgttgattaagaaatcttttactttctgttgatttgtctttgtcattttcgtctcctcctatctcatcagaatctcgttgcaaagttcataaccattgcctgtgtcatctcttccggctggtcgatctcgccggtaatcttaccgttacacataacacagatgcggtctgccataccaagcagctcagacatttctgatgaaatcatgatgattgccttaccctgtgccgccagttcattcatgatctcgtagatctcatgctttgcaccgacatcgatacctcttgtcggctcatccatgatcagcacatccggatcattggcaagccatctggaaataataactttctgctgattaccaccggataagtttgaaatgtgctcgttcatgctcggtgtcttgatggacagcttcttgatgctgtcatccacaactttgttcatcttcttatgatccagcacaaatcctgctttcaggtacttgttataaatggagacgccaacgttgtccttgatggacagacagccgaagataccgttgccgcggcggtcctctgtgatgagtccgattcctgcattcatcgcatcgatcggatgcttgatctttaacttcttgccatgcatgtagatctcaccagatgcgataccgcggataccgaagataccttccatcagctctgttctctgggctccgaccagtccgccaaagcctaggatttcgcccttgcgaagtgtaaagttcacattctggaatgaatttgcatggattgagcagaggttcttgacctccatgatgacctcacctggggtattcttcttcgccggatatacgtttgtgagctcacgtcctaccatctttgcgatgatctgatcggtcgtcagctctgacgccggccaggttcctacataggtaccgtcccgcatgatcgtgatgtcgtccgcgatgcgcttgatctcatccatcttgtgggatatgtataccatcgcaacacccttatcacgaaggtcattcatgatacggaagagtgcttctacctcattatcggaaagagaggaggtcggctcatcaaagatcacgaccttcgcctgctgggataccgcttttgcgatctccacggactgcatctgaccgatggaaagtgtgccgagctgtgccttcggatcaaaatccatctttacctctttcagccacttctccgtctccgcatacatcttcttgtggtcaatcaccttgagcagtccataattctttgtcgggaatcttcccagatacaggttctcagccacgcttctcgccggaacaggctgtaattcctgatgtaccatggcgatgccgtatttcattgcttcatccgggttgttgacctcaatcttctgcccgtccagataaacctctcccgcgtccatcttgtaaataccgaaaagacatttcatcaaggtagacttgccggctccgttctcacccatcagtgcatggacggttccgggacgaagggaaagctgtacattgtcaagtgccttaacacctgggaacgatttgcagataccctttagctccagtttgtactcagccatgtttctcctccttctatattgatacagattctgttgttatctgtgtactgtcgatgttattgtcgatgttttctaatttttctaatctgttctgtcacacaactatttcatatctttaagacaggtgcggatgcccgaaaacacccgcaccttctgcttatctgctatcaatcatcctgcgtggtaattattttaccatgtcaaggatttcctgtgcattgtcttttgtaacctttacataatcacaaccaatgtaatactcgttggtctcaccgttgatgaagttgattgctgcatcagctgcaccgtgggactgtgagaagtgatcgttgaatacggtacctgtcatggttccggctacaacatcctcaagagcctcggataatgcatcaacacctactaagaagatatcggtacctacggtacgtcctgcagactggattgcctgtaatgcgccaagtgccattgcatcgttgttacagaatacaacttctactttatcgccgtactgtccaagagcgtttgctacgatctgctgtgcctgatcctgctgccagttaccaacctgatcggagaggcattcaacctcaagacctgcatcggtaagagcctttacggaatactcggtacgatactgagcatcaacgttctccggatcaccttctaccataacgtactggatctttccatcgccgtttaagtctactgtgtcaagaccaaggtctgcgatcatctcgccctggaaagtaccggactgacgtgcgtcacatccaacgtatgtaacattccaaccgttgtcttcccatctctgctcttcctctgcatccggctcacggttgatgtatacgagcgggatatctgctgctacaaccttgtctgtgatggtagctgcggatgaagagtttaccgggttaacaatgagaacatctacgccctcggaaatgaagttgtcgatctgacctgtctgtgtcgcctgatcgtttgctccatcaacgattgtgagtaccggaagttccgcaggaacttctaagatgaactcgtcagagttcattgtagtaccttttccgcgatcgcaaccgcatcgcggatacagtccggacagctccgcaaaaccacgccggtttccacacccttcaattccttacagacaagcgcatggttcttctcggcaaactgtctggtgatctctctggtcagctgataggttgccgccttggtcttcgggttcttcggatcggcacagctgttcttgaagcccgcaagcatcaccgcaccggagaccgctccgcaggttgcctccatgccgcccatgccgagtccgaatccttccgccgcggcaaacagcgtctcttccggcacgccgatctcctccgcaaacgcacacgccaccgcctgtgcacagttgcatcccctgtcatgcaattcgattgctttttcctgttttgtcattttataacttcctttccgttccttataaaatccttataatttgcctgtatgctgtttctgtgaacatcttatcacaacttatcacaagaagtaaacaaggaggattccagaacgtatgaatcagacaacaatcacaaaacaacggggactctcagactttgcgctcaaatattttgccatggtctgcatgattctcgaccacattcactattttttctcatttacagggaagatcccactgttcttttcgtggatcggcaggcttgccgccccgctgttcctcttctgtatcgtggagggttttcttcacacgcacgaccggaaaaaatattttctgcgtatttacgccatcgccattttcatgggactggtgcagttttccttctataatattgcatccggcctcgtccggccggacggctttttcccgcagaatcagatgcttgcatccttttccgtcctgctcgtcgttctttggggcatcgaccggtgtcagaagaagcagtggatccggggactttctgccatcctgattccggtctttctgccctttcttctgtacgggctgttcgccgtatctgcagcctttggcattccctacggcaattttctcttaaaccttctggtgtacagtgtcctgccctgccacactgcgatcatcgacggtggcaccgccacactgctcggcggcgtgattctctacctgacgcacagacaccgccgattgcaggcaggtgcctttgcacttttcgtgcttgcgtgggacatcctgcccgtgctgctttttatgcccgcaggaacttctgcctctttcttttttaccgatgcttatgagtggctggaagtttttgccgttatccctatgttatgttacaatggaacccgtggacacggctccaaaaagctgttctactggttttatccgacgcacatttacgtgctgtacgcactttcgttccttttgtacctgaccctttatggaatgggttcttgatagaaatgaggtttttatggctcacattctcgcaattgacgatgatcccggcatcctcgcgctgattgaacatgcactccgccgggaggggcataccattacctgcatgccgcatgtcccggcggatcttgcggcgcacctcgcagagtatgatctcatccttctcgatgtcatgatgccgcagacggacggctatgaactctgcagcgccatccgcgacgacacggactgcccgattctgttcctgaccgcaaagaccatggaggaggacgtcgactacggtttttccgtcggtgcggacgactatatcaaaaagcccttctccatcgttgaactgcgtgcgcgcgttgccgcacatctgcgccgggagcagcgcgaaaaacaccactgtctctccatacagggcatccgctttctgctcgcctcccgcgaggtcgcagcaggcggtgtcacgctccccttcaccaggacggaatatgagatcacacttctgctcgccaaaaaccgcgggcagacattttccagggagcagatctacgaagcggtcttaggatacgacaagacaggcgacgagtctgccattacagagcatattaaaaatatccggaaaaaattcgccgcagtaaatatggcgccaattcagacagtatgggggatcggttatcgatggaacgcatgaaaaaaaaggaaaaagaaatccggctgcgcacattttttgtgcgctttttactaaagcttgtcgctgcggtgcttctggcgttcctgctgtggcttttccagattaccgtctccgtcggtacggggctgatcctgcctgcggacaccgccgaaaaagaagctcttgcctaccttcacaccatcgatgcacatacagacatcgtgtcttccgggattccatccgcctgcagctacgccatctatgacacatctggagcgcttcttgagacggacatgtccgattccctccgcgaaaacgcggatcttctcgcgctttccgggcaggattctctctccgcaaatatgctcggacgaacctatgtcaaacgccagaccgacacccggattgtggtgctcacctacgatttccggtctgcctttgcaaatcccacgttccggcgtctctttccgagcgctgaactgttggaagtgtttctcctgctgttcctgcttcttgcagcttttgtactcgtcatcacacggcaggcaaaatacctgtcgcgggagctttttcatctgcaggaagccgccgacgaaatccgcaatcagaatctcgactttaccatccggccaactgccatccgcgaattcaaccaggttgccgcttctttggacgcgctgaaatccgaactttccgcctccttaaaagagcagtggcacatgcagcaacagcgcagacgtcaattttccgcgctcgcccatgacatcaagacgccgcttacgatcgtccgcgggaacgcggagcttttatccgagacagcgctcgatgagacgcagcaatcctgcaaccggtttattctggaaaatgccgcgcagatccaggactatctgtcgagaattatcgagctcgcaaagacggatgatcccgctgcattttccgcagagtgccgttttcaggcgcagcttcacacggcatcgtttttcgacgatctgctcgggaatacaaaaagtctcggtcagaaaaaagaactgcatgttcttttttccaccgagactcttccagccgttctgccactgccggaacatccgctgcggcgtattttaaacaatctgctcgacaatgccgtgtgctactcaccgcacaaaggaacggtcactttagatgcctccatccgcgattatagggatgcacccgagaaagaaagcacgctctttctcactgtatccgatgagggacccggcttctgcgaggacgccctgctctacggcacggaagccttttacagggaatccgccgaccggaatgacaaaagccacttcggtctcgggctctccatcgccgaccagcttgcccgtggacttggcggatcgatcgctctgtgtaatgcaccggcaggtggagccgtcgtaatcgtaaagcttcctctgaccgggcagctactgcgcaatgcggaataaatcctattctaccggaacggtccagccgtacttatccggaagcttaccccactggataccggtcagtgtgtcgtacagcttctgtgtcagctcgccgatcttgaagtcgttgatcgtgacaacgtcatccttgtaacggagctcgccgaccggagagatcacggctgcggtacccgttccgaatacttcctctaaggttccgtcatgtcctgccttcatcaggtcatcgacggataatctggtctcgtttaccttgtaaccccagtctctcaacagatgaatcatggaatctctggtaacgcccggaagtaccgtaccctcgatcggtgctgtgtagatctcaccggcgatcttgaacatgatgttcattgtaccgacttcctcgacgtatttgcggtgctcaccgtccagccagagtacctgggagtaaccaagcttttctgcctttacctgtcctaagatggagcctgcatagttgccgccgcacttggtgaatccggtaccgcccttgactgcacgcaccaactcgtcctcgacaagaatcttcaccggattgatgccctctgcatagtaagcgccgaccgggcagcagataatcatgaatttgtaagcggacgccatatgtacgccgagcgcagcctctgttgcgaacatgaacgggcggatataaagagaggtctccggctcagacggaacccagtctgcctccacctttacaagtgcttttaccgcttctacgaacatatccaccgggaactccggcatgcagagtctcgcgttggaattgatcattctcttcgcattcatctccggacggaacagctggatcttcccctctgccgtgcggtatgctttcataccctcaaatgtctcctgcgcatagtgcagtgtcacacaggcaggatccagactgatcggtccttccggcacgattctcgcatccttccagccgtcttccttcgtccagtccatgacgaacatgtaatcggtcatatacttgccgaatccgagatgtttctgatccggtttctcctttaatacgtctctttttacaaatctgatatccattatgctaccattcctttcccgacatataaaattcttgaaatcaattatgatactttcttttttcagtgtcaagattattccagccgcttatgccgctcatgattgtaagttatacattagtcatcttcccatacccatatggaatgaagagatcaagaacaaggtgtgcgctcgccgcacacttgcgcgcccgagcggtatgcaaagcattatttacctcaccgcgaggtgcgcatccccgcggtgcatttttgtgtaataggaacgaagtttcctattacacaaaaacgcggagcaggatctttcctcccgctccgccatcagagtctctttttcctattttaccacttttttcaacggaatccagagaataaatgcatacacgcttccgatcagggaagtcacaagctgcgtcacggaaaaggtcgtctggaacactgccatctttgcctccatcggtgccggcagcaggttcggaatcagaatcagtgagatcacaattcccatgaacagtgcctttatgacagatcctgccgccatgccggcaatcagtccgccgtttcctttgcattttttcgtgaccagtcccacacccaagaccagaagggcattgcccgccatgatacacggcatgatcgccggaatggcaccgatgatcgggcttcccgtaataaagaatgatgtaaccggcgtgatcacagagagaataatgccgcagggaattcccacacttaacaccgctaagatcaggcatgcattgatgaccggtccggtaatatagacgctcgtgttcttaaaaaactggctcacgatacagatcgccagaagaaccgctgtcgttgtgatttgttttgttgtgattttcatcgcttcctccttctgatgcagcactccttcgcagatgtaatgcactctcccgtcactgcaccaaagcaagcataatacttctctcttataaaatcaagccgtcactccgccagcagattctccacaagtgcgcagaactcgtcccggctcagtccttccgactgcacattcacggtcacaccgtttttcttataggtcgccagatacccgtccgtgaacgttcctccactgctgcccgccggataatgtgctgctgtcaccttcacaccggaaaccgtcatcggctttaatccgccggatacataggacgtcatctcccccatgtccgttgagcgtgcgcgaatggtaaaccatcccgctgtctcactgttctcataacgcatgacacagttgtcatcgatcacattgccatctgcatcatagccaatctgatacgttttctcctcatccgtctgcacatagccatccggaattgcatccggaatcaccttgattccgtaatagttctgaagctgttcctctgtgagtgaaaccgtcttcgccgcttccgccccgcaggcaatcgatgtctgaagttcctccacttcgttaaaataccagtcaattcccgcagcgctctccggctgggcagcctcttgtataccgttgccatcccccgcagtgctttgtgcagccgcctcatattcctccgcactctctgcggtaccgtccggcgctgccgcatcagatgtcacggcaccgtcggataccgcagtatcataagcttccgccgtttccgcgctctctgtctttgccatgtccgtgcgcgccgtactctcatactgctgccatattccgtaggaacctccgatcaaaagaagtgccacgcaggcagccatctgcataaagtgctttttccgtgctccgagatagcgcacgtcctcggcttcctgtatgtatgtcggatccgcttcgccgagcgcatccagtaaatcgtccgtcttcatattttccgctcctttccgccgctatgaaagcagcccctcgcgctccagatgcatccgcagttttccccgggaccggtacagcgaagattttaccttactctcgctgaccgcaagcctcccggcaatcgctccgatgccatccatataccagtatctgcgcatgaaaataatccggctctcacggtctaacccctccaggaaccggttgatggacgccgccagttcctttcgctctatctgcgtcagcggctcctcgcccccggcgcagtcatgcagttcttcatatatatccggcatgacgcctccgcctctcttttcggagtgctttctgcggtagcagtccagcgacagattgcgcgtgatcgcacccagaaaagctgccagaagatgcgggcgctccctgggcatggaattccacgcgcgcatccaggtgtcgttcacgcactcctctgcatcctgcgcatcatgtacaatgttgtgcgcgatgctcccgcagtaacgtccgtacttctgctgtgtctctgcaatcgccgtctgatccctgtcccagtacagcgctatgattttttcatcctccatgccttctccctctcagttaaaagctctccaccgttccgatgaacaccggaataccggtgtccttctccacgatcgcatataaaaacggcctgtctaaaataatgcgctccggctgttcaaccattgccgtctccttgcacatctccacaaccgtggccgctccggctttcgttccaagcccgtccacatcgatgtgggtcttgtgcagtaccctgctgatgctgatatttcttccgtccgggcagtaccccattttggaaaaatccgcctgttcctcatcaaacgcgagcggcattccaagcgccgtgagcgtatcttttagttccagatcggtctcgcctgtaaattgcggcagccccgtctctatcattgtatcattttcctgccggattgtctcgtgaaacgtttccccgtccagttcttccagccattcgctcagtgacagtccctcctccggaagcagcgccacaaaatcatagccctccttgtaagcccgacaaaagcccttggcatgttccatggtcagatagcggtacgtggtatcgtacatcatggaaacctcctgcccgcttccgtcctccgcataaaatgtggcatcctgtatctggctctcatcatagggtgtttcccactccgcatcaaacgccaccgcattcaccaggtacatgaccgcaagctccggaatctgatccagaatctctgttatcatgccgtctgtctcctgctccaccaggcggttgatgtcccggcaggtcgtctcgtcaaacggggcgccaaagacttctgcgtcatacgccatttttacggtgtcaaggaaattctcatccggcacaaatgcatcgcccgccgtcttcacccacaccgaatcagacatgtggaatctggcgccctctgcatccggcaggctcttgcagatcctgccaagcaccatactgccatcctccgccgacattcccgggtacaaaaccgctcccatctgctgcttcgtgtcgccgtccgctccggtccgcgccatctcgagcgccatcatcacagagagtggacacaccatcgtattcttcgcgccctcgccggtctgcacctgctttctgctctcccgcagcagatttaaggaaaactgcgtataggaatcctcaaatgcttccctgatagcaccgagatctttttcttccattgcagtatcctccgttcctgtatcttctgcctgtcctgtctgtccgtttgctccggttccttccgtctgaccttcctctttggtcccgtattgtccggtaagatcggtggttgtaccggacattccgctgttcgcacagcctgtcatccccactgccatcactgccgcaagcacacctgccgtcacccgttccattccttttctcctcataagcttctccctctcttttctatcatccggtttttgtctttcatataataagacgcaaaaaaccgaaaacggttgcacccatttccggtttttgtaaaaattttctatctcacatcttctgttctctctacagccttaaatactcaaacgcctgatagacatccagcgcaccgtacccccactcccggttcgggtaccccctgtcctccgagcgctttgcaccgcggatgagcatatttttgatcgcggcgttggacatcactggatcgttctgctgcaccagcgcccactgcatgatctgcgcgaccgcccctgccgtcaccgccgccgcggcgctggttcccgtgtaggtcacataattttggcgcagccccggtccatatacactcaccgcaggtgccgcaaagtccggcttgatctcacccgccaccgtgtagccgcgcccggaatccgcatacatgctgttgttggaaacctggtacccgccgaccgtgatgacctgtgccgctgtccccggcgcagtgagcgtcgtgtccggattggatcttagaaaaatcacatttccgtccgtaagcttctgcatcgggagccacatgttatagttgccgctcacaagattttccggataaacccgcacaatccaaagccccttgcgcacatccgaaaagcgcagatagatcaactggtttgccgtctccttcgtctcaatgcggtaatccaccgacacggtcgtcccctcaaagacaaaccggaaggtctgggagacaccggaacgcagcggcactttcggaagccgttcgcccgtcggcgagatcacagatatcgtgtacagttccggcgcgcccgcccacagctctatgaaaaagcccgccatatcctgctccacgctgatctccacatcctcatattccatctcacggcggatcgccccctgaaaatggtgcctggtgttcgcctcgtttcccgttgctgtcacaatcgagcgtctccgcctggtgctgatatagttcaggaaattggacagcgggccgtccgtcccgtgtccccccatgctgttgccgagtgcaagacagatcacaagcggcatatttaacacatttgcaacgtcatttaaataggataccgccatcatcaggtccgtctcctgataggcaggcactccctccggcacgaagaaaaattcccgcagataacgctttgcctcttttagctttacaacggcaatcccagcgtttggcaccgccccgataaagccgttcgggatatcctctcccccgcacacgactcccgtcacgaatgttccgtgcccgttttcatcgcgggacggcaccacatcatacggccgctctgcttgcagcgcttcatcaatctcctctttacggtactctgcaccgtacagaattccctccggcggcgttccgtcctgtaccgtctgatcccagatccgcaggattctgctgctgccgtccgaataccggaacagcgggtttgtgtaatctacgccggtatcgatgatgcccaccaggaccccttcgccttttaacgcaagcaccggctgattctgcagccgggtgattcccgatgcatcgagcgccgtcgtatcgagcagtgcgtagcattttggtatcgccgtgtaggtataattcccgatagaaagcggcggcagtccctctcgcgggtagaaaaaaatgtcgtaatcctccgcgatgcgctgcacgcatccgggcgtggacggaacctctgcctccaccccgtacggaatcaaaaaatcataatactcctctgaatatacctgctccctgcaatcttgcataaaaaactccggtcatccattgctttcttaacaatagatgccggagtgtaactatttattccatattatcagttgctggctgcaatctgcggattctccgtactcccaataccgatgcagccgcgcagtgtgatgaccgggctgcccttcttctccacatagtccttcgtgatcgtgaccatgccgatgttgtcgtccttcggaatctcatacatgatatccagcatgaattcctctatcaccgcgcggagcgcacgcgctcccaccttcttctctttcgccttgtgtgcgatcgcgcgcagcgcatcctcatcgaacgccagcttgacctcgtccatggcgagaagcttctcatactgctttaagatcgcattcttcggctcctgcaaaatccgcaccagcgtatcctccgagagcggctctagtgtaaacaggatcggcagacgtcccaaaaactccgggatcataccgaacttgcgcacatcctccaccgtaaccttggagagcagcttctcgtccttgtcgtactcatcctttaacttcgcgcggaatccgatcgaagcctcctgattcagtcgctccttgatgatctcctccagctccggaaatgctccgccgcagatgaacaggatattcttcgtgttgaccatcgtcatcggcaccatcgcgtttttgctgctggctcccaccggcacctcgacctcggcgccctctaaaagctttaacattccctgctgtacggattctccgctgacatcccgctggttcgtattgcgcttcttcgcaatcttatcgatctcgtcgataaaaatgatgccgtgctccgcacgctccacatcattgtccgcagccgcaagcagcttgctgactacgctctcaatgtcgtcgcctatgtagcctgcctccgtgagtgacgtcgcgtccgtgatcgcaagcggcacatccaaaagccgcgcaagcgtcttgaccagatatgtcttgccgcagccggtcggtccgatcataagcatgttggacttctcaatctccacgccgtccttttcatccgccgcaatccgcttgtagtgattatagaccgcaaccgacatcaccttttttgcctgctcctgtccgaccacatattcatcgagcgacgccttgatcttgtgcggtgccgggatcttcttaatgtcgataaccggctctgactgcgccttcggctttttcttcttcagcttctgattgttcggcagtccgccctgcagatccgacagattgatcatgctgatgttcggaattcttcccatgttcatattcatcatatcatccatggaaaaaccgcttccgttcatgctgtcaaacgtcttctgcatacagtcctggcagatgcagatattgttcggaatacggatcatctttcccgcaatatgttccgggcgtctacagatgtagcagatgccctcatactccgtgtcctgattccggtctgtgtcatccgaagcggaactctgtgtcacctctccggtgcctgatgtgctctcatgctccgccacatcttctgcacggggagcctcacttcccgtctgcgcaccgtgagccgcgtttcccgccggcacaccgttatccgcgcttcccggctgtctgctgcctgcagttcctgtatttgtatctgcgcccgtctccggcgcatcatctataatctctctgaaatcattgtgattcatactaatcctccattcttgcgctgcttctaagcgcatctcaagtttgtgcgaagcacaaatcttgcgtgtgaaaaatcttatttttcacactaatatcccctattcgctttctatcatgaaatttaggttcattataatgcaaacattgtttaatcacaaggaaattacggagatttcatagttattttaggaattcatcaaaaatggcgaaagcctcttttgctttcgccattctctatttccctcatccgtaaaacgcgctctatctgccgtttccgttattatctgtggttccgttgttattattgtcattgccggtcagatcatccacaccgttctccactccgttgatgacatcctttccagcctcaccgacaccgtctaccacgtcgtccacaacattgccgtttccgttgttatcagctgcgccgttgttgtccatcgcaccgttatcgtttaaagttccattggtatcgttcactgtgccgttggttgttccgtttgtgccgttggtcgttccgtttgtgccattggtcgtgccgttggttgttccgtttgtgccggttccgtctacggtgctctccgtgccggttccgttcgtcgtgtcattgactttgtcattgttcgtaccgcaggcagccatcgcgctcaccgcgaaagtaagtaccagtcctgcaagcagtgttctccactttctcatagtcatattctcctttttctcagaatcacttctgttttcaaggatagtatgaccctggcgctttccttttattcccgcagccgatgtttttcttttgaattttatttttgaaaattcaatcttaagatttgtaataaccaagctctctcgacagttcttcctgtacttttttcacatccaccgcaagttccttaacgcgctctctcgtcatgcggctggtcggtccagaaatactgaacgcgtattttacctctttctggtagccgtgcaggcaggctgcgatgcagcggacgcccttttcgttctcctcatcgtccagcgcgtagccattctgccgcacttcctccaacacttcctgcatctgcgagaaatccgtgatcgtcttgtccgtctttttctcaatgatactctcgttccagatctttttgacttcctcgtccggaagcgtcgccatgatcgctttgccgacaccggagcagtacatcggatgtaccattcccacatgggacaccatgcggattgttccgaccttcgcctcgatcttgtatatatataagatatggttgccctcgcgctgcaccagatgcaccgcttccccggacaggtccgagagacgttccatatacggctttgccacctgcagaatatccatccgctcgaggatctttcccgccatgttgaccaccttataggaaagcatatatttctgcgtcgcctcatcctgctttgcgtatcccatataaatgagagacattaacagtctgtgtacggtgctcttgtgcagatccagcgccgtgctaagttccatcagtcccatctccccgtggtccgcaagcgtctccatcacctgaaaaatacgctctgccgactgtaccggattttttccttctctttcttctgccatagtatctcccatgctgtatctcagtcagtttcatcattcaatctgtcgttccgtattgcggaactgccttgttatcataccatgaccgctgtccgaaagtcaactctggaatctctgctgtcccagcgttttgttttatggaaaatacacgattttgtttcttgaatcggttgacaaggtttttccacatgttataataattttgtaccattacatgaaacatagttccgcattatggaacatgaatgataagtaaaaggagaagaatcatgaacaaagtattagaagagttttccaagattggtattatcccggtcatcgcactggaccatgtagaggatgccgcacctctggcaaaggctttatgtgacggcggtcttccgtgtgctgaggttaccttccgtaccgctgctgctgaggagtccatccgcatcatgtccgagcagttcccggagatgttagtcggcgcaggtaccgttcttactaccgagcaggttgaccgtgcggtaaacgcaggtgcgaagttcatcgtcagcccgggcttaaacccgaaggttgtaaaatactgcgtggacaagggtattccggtaactcctggctgctcaaacccgagcgatgtggaagttgcaatcgagcttggtcttgaggttgtaaaattcttcccggcagaggctgctggcggactgaacatgattaaatccatggccgctccgtacaccaagatgaagttcatgccgaccggcggtatcaacgctaagaacctgacaaactatcttgatttcaagaagatcatcgcatgcggcggttcctggatggtaaacaaagacatgatcgcagcaaaggattgggcaggcatcaccgctctcaccaaagaggcagttgctaccatgcttggattcaagctcctgcacgtaggtgtcaacaacgcatctgaggaagttgcttccacagagtccgcaaagttcgcaactttacttggacaggatgtcaaggttggcaacagctccatgttcgttggttccttaatcgagatgatgaagaatccgggacgcggaacacacggtcacatctgcatccagacaaattatctggatcgtgccatctatcatctggagaagagaggctttgctttcgatgagtcttccttcaaatacaatgacaagggtgagcttaccgttgcttacttaaaggatgagatcgccggattcgctgtacacttcaaccagaaataaggagaacatcatgacagatcagaattgcgcatattgcatggaaggtgatctggtagccgcattcggcatcaagatctgtgaacttccttcctccaaggtatatctttttaaggagcagagccacaagggacgtgtcatcgttgcacacaagaagcacgtgagtgagatcacggagctgaccgccgaggaacgtgccgcttacatcgaggacatcaaccatattgccgaggcactgcatcaggcattccatccgcagaaagtgaactacggcgcttatggcgataccggccatcacctgcacttccacctcgttccgaagtatacagacgagtatgagtggggcggcgtcttcgctatgaatccacagcagaagttcctctcggatgaagagtataccgcactgatcgaggagatcaagaagtatctgtaggatatgtatttccgttggattttatgaaaacgaggcaaaccgcaaaggtttgcctcgttttttgcttatgctggcacttgcaagagaaaagcgcatgaaaacggtaatggcaaatcattttccacccttggcatccggcattttaccggcgtattcctgctccagttcttctgccagatacacatcgctcatacagtgcatatccgatacgccatcacgaatcagttgatatacctcggaatgataaaagaattccaatgccgcatccagtgaaattccctgccgttttgcaaaacacgcaatgacacggctatattttttttgtagtaaaatcggatttgctgtcatacaatttcactcccttcaaaatgcaggagagacagtgctctctctgtgcggaaacaaatttgcacattcggtttttcataacgaagacgtttgataacctccgccttatcaatcaatccatcaaaaaacaattccaacgtattgaataccttatcattggcaacaccaccaataacgagatcataatctgtcgcgtcttttccaaaagaaccatggtagagaatcatacttccacgcccctttctttcatcacatcaataagatcatctacgatatattcccggctctgtgtatgcagcacttcatattccggcacaatataaccacttagaatatcacttttttcggcaaacgcctgatacacacgctctgcatccatccccagctttgccgctacattttcgatacaaaatacaacaaactcgagttcactggaatttttaattttttcatccgccatcataagcaagctctcctttatgccaatatgaagaacagccttctcttcttatcactgttagtatagcacttcatatccatatgctcaatcaaattacctctaaaaaaggcacccgggtcattacgacccaagtgcctgtatatcctgatccttttgcgtaagcccctaccggtgcgtatcccacagtccgcagtaggcatccaccgggtcctccccgataaatgcgtcgctgccgctcatcagcttctcgatgagcgcatcaaacgtctgatccgcgctgtcgtaagtgttgatatacgttctcgcctgcggaatgtctgccagtacgaacggctgtccgcatccgatcacgataaccggaagttcatgaacataccacgggatctctccgccgcccttgctcatgccgaagcccggtcttgccaccggctggaaaccacctgcaatgtccaccagtgtgataatcagatcctggttctcgacgaactccttgatcggcgtctttccggcaaagtacatattgatgtccaccttttctcctgctgccgcgcgctttgcaagtgcgtcgagcgggctctcgtagataaatgcgtcaaagcccttctcgatcagcttgtcacgcaggcgctctgccggactcttcttgccgccgcccatatattttgccatcatggttcccatcacgcccgcggataatccgctgacggagacgatcatgatgcgcttgtaacggctcgggatcatcggaagcacatcctcgtccttgtattttacgagcgtgattcccttctcggagatttctcttgccatcgccttgtgctcttcgcatccaacgacctgctccatcacctccaccggaggaacaatctcatttttcgcctttttgtgcagtcccatgtgtgccttcagagcgagaatgcggtgcagcgcatcatttaagcgctcttcggtgatgatgccgttctcatagcccgccatcatgcttgcaaaatcctcatccatctcattgaaaaaaaggaacatatcgacaccggctgcaatcgtgtgcggaagcatctcgctgcgcttcatacagcaggtcagtccaaccatgtgggaagcatcggtcagcaccataccattaaaaccaagctttccgcgcagaagtccctcgatcagctccggcgaaagggttgccggcatgatgtcctcatccttgattcccgggttaaaatgtctggtgtacgcaggctgcataatgtgtcctgccatgatggcttccagaccgttgtcaatgaggttctggtatacttttccatagcttgcatcccactcctcacagctcatgtcattgacgctgtctgccacgtgctggtcgcggaagtccagtccgtcgcccggaaaatgcttcgcagcacagcagaatccctcattggtgtgtgcgccgtccatatatgccttcgtcatctcgcacacgcggtccacatcgtttccataggtgcgcagtccgatgaccgggttctcccagttgtagaggatgtcgctgaccggggcaaaggagagattacacccgatcgccgccgcctctttgttggacatacggccgagctcgtacgcgtatctggcgtctcttgtcgcaccgatcttggtctgctggccgatcatggttccgtcagtgcaggcgccgttgccgccattctccgtgttgcacgcaatgataagcggaatcttgctgttctcctgaagaatccggttctgctcacgcacctcggcaccggttgccgggttgtagcggataccgccgatgtgatacttgtccaccgtcatcttcagatactcttcgtctctggaagatcccatattgaagaaaagctgaccgatcttctcctcggtcgtcatacccgcgatggtctcttccacccatttacagtcctcttcggacaggtaaaacggttttgccttcatatctaccatattaaaatatccctctctttctcactccgaatcggcatgaacaccgagattctgctcaaatgcctgattcagttccttttgatatttcgcatcaaagcttcccgcgagaagtttcggaaacgcttcctctaaaaggcgtttccagctctccccctcatgtccgaccagaatcggatagaaccggacgccgtttttctctgccgcgtcccggtctcccggtgcatcgccgaccatcagaatccgcccgggctcataccccatttttcttaattcaccgatgcagaaagccttggttcccgcctcctgtgtcagaagtgtactgcagtcttcggcaagatgatgcctgccccattccgcctcgaccgcctcccggttcgcggacgacaccgccgccagatccgcctgttttgccatcgcatccatcgcagacttcacattcggaaacggccggtcctctgccggaagcgcatggatcgcgcggttggtgcggatgctccagagcagcgctttttcaaaacacgggttatcactcttctgcgtcaccgcaagcagcgccgggttggagagctccttcgcctcttttgtccatgcctcgtactccgcaagtccctcgatgttaccgagacctctcttctccacctccgcgagcgccagcgccagtcccttgaaccggttgatgccgcgcgtgatggagtagaggttgatagaaagccaaagctccatgcactccgcttcatgctccgtcagtccgaatgttttgatccactgcggtccgaagcaggttctgtgctttacttccatcgtgtccatcgcacagccgtcgctgtcaatgcacacgatacaatcactttttttctgaaaatcaaaataccccattgttccacctcatgtattgccgcctcttccggctcctttgcaagcttttatacgccggagtatgccgcaaatgctccgtcgatcggaatacatgcgccattgacaaatccgcttgcctcctcacatgccaggaacaggacggaaccgatcagttcctccacctcaccaaaacggtccatcggcgtattgtttaaaatcttgccggttctggctgtcggtgtcccatcctcattgaacagaagctttgcattctgctgtgtggagaaaaatcccggtgcgatcgcattgcagcggatacccaccttggaaaaatgcactgcaagccactcggtaaagttggaaattgccgcttttgcaccggagtatgccggaatcttcgtcaacggggtgtaagcgttcatcgaggaaatgttgatgatgctcgcaccttttttgttgaccatatcaagcgcaaatacctgtgtcggaatcagggtacccatgaagttcaggctgaatacaaaagagacaccgtccgcatccaggtcaaagaatgtcttcatctgtccgagatcctccggcacaaaatactcgtcgtcggtcgtcgctttcgggttgttgccgccggcaccgttgattaagatatcgcaggttccgaagtccgcagcgatctggtctctcgccgcctgtacgctcgctttctcaagcacgttgcacttgtatccctttgcaatatagccctttgccgtaatgtcatccgcatgcttttttgccgcatcctcatttaagtcgagcagcgctacctttgcgccggtcattgccattgcctccgcaagcacggagcagatgactccgcccgcacctgtcacaacaaccaccttgcctgtcagatcaatctgaaatggtaacttcatgttcgtcttcctcctgatttctatttttctgatatttatttttcctttgaagccttctccacagcctcaaataatccgttgatataggttgctccaagcgcacggtcatagagtccgtagcccggtcttccggtctctccccagatcattcttccgtgatccggtctcacatatccggtaaatccattgtcatgcagcgctttcacaatcgcatacatatccagagagccacagctggagagatgtgcacgctcctcaaaaccattctcaagcactgcaacgttgcgcagatgtgcaaaatgaattcttcccattgccgcatattttgccgccatcttcaccacatcgttcttgttcgagcagccgagggagccggtgcacagtgtgatgccgttgtgcggatcatccacaagaccgaggaaacgatcaatgtttttctcgcaggtgatgatgcgcggaagtccgaaaatgctccagcacggatcatcctcatggatcgccatgttgacgccgcactccgccgcaaccggaatgactctctccaggaaatacttcagattgtcccaaagatcatcctcagacattgcgttgtactctgcaaccacctgctttaactcttctctggtgtagcttgcatcccagcccggaagtgtcagatcactgtcgctctgcagcggattcacagcatccacctgctcctgataatataccagggaggtcgagccgtccggcagcacgtggtcaagctgtgttctcgtccagtcaaataccggcataaaattgtagcagatgcactttactccggcttttgccacacgtctgatgttctcgcagtagttctcaatgtagcggtcacggctcggcttgccaagcttgatgtcctcatgtaccggaatactctcgataacctcaaaatgaagtccggcatcctccacctgctttttcagtgctgcgatgctctcctcgccccacacctctccgaccggaacgtcatacacagccgttacgatcgagtgcattcccgggatctgacggatgttctccagggtcaccttgtcatctggtccataccagcgaaatgataatttcatagtttcctccgttctgcggaaggtcctttccgcgcatgtgatatttgcttgtatacatgtctatgatattgctccatgtacgtctctttgtttcttttccttgactatatcatgcttgtatacaagcgtcaacatccatctttctttttttctgttttgtatagttttttgtatccgttttgtctattattcacaatttacgtcgatgtttccgcagactctgatttttttcttgttgtatacaagtggatattttccggcagcttttttcttatttcattttcttgcgccacgttccgcacaccttaagttctacagggactttttgccgaaatccgtcaggattccttctactgtcctgctcttttttcatcctgccccaaggaacagcgttcccgttttttcccgatcctatgtatgcatatgcaaggtgcatgttccgagctccggaaaaatagattgtaatttgttccaatgggatttatattagaaatatgttcacattttgaatggtaagaatggacatcaaactgcccgcagaggagtatgttatgaacggaaccagacataccggcacatccgttgccgtttataaagatttaaaagaacagattcttcatctggagcttccgccgggatctgccatcagcgagatcgacacggccgccacattccatgtatcgcgcaccccggtgcgggatgcttttaaaatgcttgagcgcgaggggcttctggaggtccgcccgcacatcggtacattcgtctccctgatcgacctcaacatgatctccgacattctctatctgagggagaccttagagcaggcagtgttaagagatctgaccgcagggtacgacaaatcccaggaattccgcatccgcctgctgttgcagcgccagtgcgaacttctggaacaggatctgcccgccgaggaactcggccgggccttcatcattaacgacaacgagttccacacaacgctctacgagctcgccgggaaacgtaccgtcatggattttctgaccggagtgagctcccagtacgagcgcttccgcacctttttgaatctgggcgaccgcgacaatctactgcggctgtacaacgaccatatcaaaatctggtcgtgtatctcctcgcgggattatgaggggctctcggatgtagtttcccatcacatctacgacggcttcaatgcaagcaccgagatcatctccaggcatccggactatttctgtccgtttcactagaatcttttagagccggcaatccgcaggcgggttacgcctgtcggattgtctcacagacgcggtcccactcctgttttaatgacgtcattttctcttgcagctcttcgcgcgttcctgcacgtaagagcgcaacaatcgccgcgctctgctcaaaaagtcccgtaatccccagcgttccggtcagtccttttatagcatgcacctgctccaacagctccgcttcatcctgctgctccaatgccgtccaagccgcatccatgtgtgcatcctccggcagctttcgcagatatttttcataaatcgcctgctttcccataaaccgtgccaatgcggcatcgtaatcgattccggctgcgcgcagtgcgttctcatccatggcagtctccccctatcacgctttctatggttaaaattctactaccagatgcagcaatacgcaaacatttatttcttcattttcggctggaaaatcaggcttgccagatagccaaacaccagcgctgccgatatgcccaccgcgcttgcctgaaagcctcccatgaaaattccaaggaagccatattgatccaccgcctctttcacgcccttccacaatacatttccaaatccgagcaacggcacactagcgccggctcccgcaaattctacaaacggttcatagacctgtatcgctccaagcagtgtgccaagacacaccagaagcaccatgatgcgccccggaagcatttttgttttttccattaaaatctgcaccagcgcgcagatcagcccgccaacccagaatgcattgacataatccatagcattttccccctttctatcccgcatgctcgatgacgaccgcatgcgcaattcccggcaccgtcattccctcattaaaggaaacggtggagagcagcgctcccgtcgggacaaacaggattcttttccatttcccttcctcgatctgccgcataaaatgtgccgagagcgtcactgccgcacacccgcagccggaaccgccggcacccgttccctgtttgtctgcatcatagatctcaatcccgcagtcggtgtggatgctgctgatgtcataccctccggctctcgtcagatcccagagaatctcctgcccgacttttccgagatcgccggtaatgatcttatcgtaatccgtcacgtttcttccgaaatccgacagatggcggcagatcacgtcactggcggcaggcgccatagccgctcccatattcatcgaatccttgatgccgtaatcaacgatcttaccggtcgtgatccccgtgatgcgcgccttgcttctttttttcccaagcacgtaagcaccgctccccgtgaccgtccacgtcgctgattttgggcgctgattggcatattccagcggaaaacggaactgcttttccgcgctggcaaaatggctcgacgtcatcgccacaacataatctgcataccccgccgccacacacatcgcgcccaatgagagtgcttcgccgcaggtgctgcacgctccataaagcccgaacagcggcacctggtagtccatgagtccgaaggatgtcgcaatattctgcccgagcagatctcccgaaaacagatagcggatgtcctcggttttcaagcctgcctttccgaccgccagcgtaaatgcttccttctgcagggtactctccgcctcctcccaggtattctgtccgaacttgtcgtcctcgcccaccacgtcgaagcggttcccgagcggtccttcgccctcttttttcccaacaatactcgcactgcttatgatgtaaggagcctccgcaaacgcgaggctctgcttcccgacctgtatctccatatcactgcttcctttcgtaagacttttccttagtatgcggcggacaaacgtgtattataccggtaaaatatcattttcgtttccttctgttcacaaattttccggctgcggtttgactttttctgttgggaatatggttcgttatttcggaaaatttcctgctgcccagaaattggggcggctgggcagaaaattggtttgactgttcagaaatgttttgctgcccggaaattggggcaaccgggcgggaaattggggcggctgggcagaaatgtttcgcatgatcgggaattgatcggactgctggcaaaaaacgaaatttgttttcgccggcagataaaaacagagggtgcatgcgagcgccggatttccggcatgcatgtgcaccctctgttctatcctcttttttgcgctgctttcttaaagctctcctagaaatcgacctctgtatcgtagtagcagcattttaacagtttttccatctcctcctggctcggctgacgcggatttgatcctgtgcaggcatccagaattgcatttgctgcaatctccggcagtctctctaagaatacttcctccggcacaaatccctgctcagtcggataactgtccgcgccgtaattcttgatacagtgcggaatcttaagatcatcattcatgccgcgcagatatgtaatgaggagcgccactttttcgtccagcgtacctccgcccagtcccataaaatctgcgatctcgccgtagcgctttttcgcggtctcatccttggcgttgaatgcgatgaccttcggcagatacatggcgtttgctgcaccgtgaatgatatgtgcgccgtaatctgcaaatgcagcacccgtcttgtgagccatcgaatggacgattccaagcagtgcattggaaaatgccataccggctagacactgtgcattgtgcatggaatcacgtttttccatatctccgttataagagcccacaagatctctctggatcatcttgatcgcatgcagggcaagcggatcggtaaaatcacagttcgccgtggaaacatacgcctcgatggcatgcgtcatcgcatccataccggtatgtgccaccagcttctgcggcattgtctctgcaagctccgggtccacgatcgccacatccggcgtaatctcaaaatctgcaatcggatatttgattcctttttcgtaatccgtgataatggaaaatgcggtcacctccgtcgccgttccggatgtggaagagatcgcgcagaaatgtgcttttttgcggagcttcggaattccgaataccttgcacatatcttcaaacgtaatgtccggatattcatacttgatccacattgcttttgccgcatcaatcggagagccgccgcccatcgccacgatccagtccggcttaaattcttccattgccttggcacctttcatcaccgtctccaccgatggatcaggctcaattccctcaaacagacagacttccattcctgcttcttccagatactgctttgcgcgatccagaaatccaaaacgcttcatggaacctccgccgacacagatcatcgcgcgctttccctcaaagtcctttaaagcctccagcgctccctttccgtgatacagatcgcgcggtaacgtaaaccttgccatatgctcctccaatccgccacttcctgtggcaaccattttttacagcctttgcccgccgttactatcataccccaaatccggcgtcgtttctgcatatgttaagtataacatatgggcaaccggcgtggcaattctttccgtttctattctgcacattttcataagagattttcgcatcgcgttctgatatgccgttcccatgttccggcgtggcaggttggggtggattccaggggtttcacatctaaagcaggtgactcggttttttaggttttttagggtttttaggattcttaccgcccgggcttgacggcattctttctgccagtcgctttccgcttcataccacgcagcatttctttgtcctccgcacttacacggtatgactccagcattttctgaattgccttattataggtaaaatcatccagttcattttccagcagaaatgcatgggtctcctgcggaaattttgcataggcagtcgcaattccccatgcaactcccattttgcaataatagccctcatgcttcaggctgttatatacagcgagcacacggtcaatatattcaggcaccagaaaatgatccatcagcatcactgccaccacccgctgttcaaattcactcttagacgcgcggtattgcatcaaaaaattccacacctctgcccggtgctttcgggcaatcttaaatgtagaacaaaacccatcattgactgaccagtcgtggattttcggaataaacgctgcggcatattccaaaagctcctccatctccgctttcacgtagccaatcacaagtccctgcagcatgatctcctcgtagctgccatcgcgtgcctccttgagataagttctccagtcttcctttgcgagctgcttcgccagcgagcgcagcaccggaagccgcactcccagaatcgaatctgtccccggaatcaggctgctggtaaaatctttgaactgcttttccgcatgtttctctaaaaaatcacgtatctgttcgtttgtcattctttcctctctttgcactgtcaatgaattactgtaaatgcgattctgtgtctgcactgttttctgcgcacaatatgaatctgtcaagattcattatatcatctttttgcactgctttctgcgcatccgaagttccgcaggaacttctaatatgaatccgataggattcattatatcatacatcaacgataccccggcaaaaggaattatcgcaataagcctagacctcttctgggtgatgtgtaatattattacaaacacacttggggatttctaataatattacttatcaaagcagggcgcaatatgcttattgcggcaattccatgcaagcacgttcgcatggaacatatccgtccgctgcacgtaagcatgcgcatccgtctttgcttcatgctcactcttgtctccgcgaacattatgttacaaaccgtggattctggtctatgcgcgcaaaaacgtgctctcagacccgcgaaatagtcaaaaacgggtctcagacggcaaaatgtatctcccagacccgccacgcccccaaatgccgctttttataacctcattttcctgctgcatcctcccagaatcagttttttataacctcattttcctactacaaccgctctggaatcagttttcatagatctcaccgtccacaattcttaccacacgacccgcatgttttgccacattcagatcatgggtaatcatcacaatggtatttcccatctgattcagattttcaaagagcttcaatacctcttttccgctgttcacatcgagcgcgcctgtcggttcatctgcaagcagaatggcaggttttccgaccagtgcacgcgcaatggctacacgctgctgctgtccgccggaaagttcattgggcttatgtccgatacgctgtgagagcccgagcatgtcaatcgtatccatactcgtctcctgcgcttccgcaagccccattccgcgtatcagaagcggcataacgatattctgcagcacgttgtaggtcggaatcagatgatatttctgaaaaatgaaacctattttctgattccggatttttaccagttccttttccttcgcctgttcgattgccacgccatccagcagatagtttccgctgtccatcacatccatgcacccgatgatattcatgagcgtactttttccggaaccggaaggacccaaaatggcaagatattctccctgctttacggtcagcgacacatctttgagcacatggagggactgcgttcccatgcggtaggatttgttgatatttctcattgtgattacgtctgtattttctatactttctgcttttgtggccgcgcagatcgccggctccatatccatcactgcatccatatctctacaataacctcctcaccgtcttcgctggtcactatcagaagcttcagcagatcgccagccgccagccgctgaaacgtcgtctcggtacctgccgtggtgtgcaccaccgtgctgaccggaatcaatgttgtcacacttttaccactcatgccgccatttccgcccggtgctcctccaccgttacttcctgttccgtccgatgtcgcatcgcccggcatgtcgccattttcttcctgcggcatcccgtacgacatcaccgtgctatcatttgttccggaagttccctgcgacattctgccaggcgcccccgagccatctcccggcgcccctgaaccatcacttcctccaggcgctcccgagccatcttctggcgctcctgcggtatcacttcctcccggcgcccctgaaccatcacttcctccaggcacccccgagccatctccgcctttttctgcattctcggtgttttccgtgctgcttgcaagatatgcctccaccaccgattcatcgacttccatatatgtcaattcatttccctcgatgctggtcacataagcatacacatatttctgattatctgccagcgtctccatgtctgctgtcctgtgggtccatgcgaaaatacctcctccgccgagcactgctgcaagcgccacgatgccgcccgccatcactttcttccttatcatgccaaacctcttttcaattatttattccgcaccaagtgcctccaccggaaccagattggacgccttatacgccggataaaatccgaagatcgttcctgttccaaccgcaaacacgagagcaatcaaaaatgctgatgccgacagttccacacggacgccgaggtactgtacaatcggcgccacagccagcgatgccagattccccagcacaccaccgatgagactgattgccgccgcctccgcgaggaactccagcagaatgtcccgcttggaacagccgatcgcttttaagataccgatctcattggtccgctcttttacagatacaaacaatacgttcataatgccgattccaccgaccacgaagacgatcgccgccatcgcaatgagaagcatcgtcagaatctggttggaagcctccgccgcctccatcttgcttcctgcatcctcaaatgtgaactcagcgttcgggtaactggtggcaagcacttctgtcacttcctcgatcacgccttccacattattcacatctgccgccagcaccgtgatcgtcgggctgaccgatgatccgaccagatatttcacaccggtcgcataagggataaaaatggaatcatccgggctgataccggacgcgaccgttcccatgctttccagcacaccgtttaccacataaagccggtcgtcgatatagatcacgcttccgtatgcctcaatggcactgccgaaaatctcttcggcaacgcttgcgccgagcacgcagactttttctttgttctcatcatcatcgtcggtgataaagcttccgaccgcgagggagaggttactgatcgtctcgtagttacttttcactcctgcgatggtataggtatcggcttcatcgagatctccgccatccacactggattttgtggtgtaggaaatggtcgctgccgagatgccggacgcaaatgtttcgatgtcatccacatcatcctcgctcagcgtgatattttcctgattcatgcggtcttccatatcgctctgtccgccgaaaaagcttcccatatccggcataccgccgccgtcaccggaaggcatctctccccccggtgatccgcccggcgcctcgcctcccgatgaggaaccgcctcccatatcgccggagggtgctccgccaaaaccgcctccaaagcctccgccggaaccgcctcccggcgccatcattgccatgccggagtccgaatcatcgctgcttcctccgccgccaaaatctgtcccgccgtcgtaggaaatgtccaccgcaccggcatttaagtttttaaactggtctgccacgtccgcctgaccgcctttaccaatagcaatgaccatcacaatggtggcggcacccacgataatgccgatcgaggtcatgaccaccttaaatttgttctgtgtgatattgatccagaccagtctcaataattcttttggcttcattctgtcacctgactttctatcagcacagtttcaccttccgtgagaccggacgtgatttccacgttgaccccgtcggaaaagcccgtctccacatccaccatgcggatcgttccgtccgcatccttcactttgacataggatgtcgttccgtcagactggaccgccttgttggatacatacagcacatccgtcacctgcctgctgataaatgtgacgtttcctgtcatgtccgtgtatattccagtgatgtccccagtaaacgcggcggtcacattgtaagacaccgtggaggaaccgctggaagatgaagtgtcaatgctctccacctcccccgcaaacgtctgatcctcataggcagacagctcaatctccacgacgtctccaactgcaatatttgtgatgtcctcctccgacacggagacggtgatcgtcaccgcatccgtattggaaaaagtggcaaccgttgcgccggaagagatggtatctcctgcctcatacgacagatcggtaatgattcccgtatactccgcatagatcgtaccgtcatccccgatggcagcttcaaatgcctcaagcgcctcctccgcgtcggacagcgtgtcttttgcatcggtaatatcattgtccgccccggagacatccacactgtactgactggatgcattttttgccgagagttctgcttctttcagcgttttctccgcctcaattgacttcgtggtatagttgtttttcgctgccacaagctttgtgtacagtttgtcgtaattttcctgctcctcggtaagcgatgcacttaagtccacgcccgcatcgatctgctcctgatagtaattgatcagggacgccgacgtatccaccgcttcctgcacgtcatccacagcctcctgcagctgctttatggcagcttcgtaggtctcctgtgcaacagatccctccgccgtgctcagattgtaggagtaacttgccgatactttttgcttttctgcacttaagcccgcctcgctgacggctgtcttcgcctccgtcaccgcttcctcaagatcttttttataagatgccacgctctcctctgtaagctttaagatgggatcgccctccgcaaccgactgccctgcggtaacatagaccgtttccacctcaagggtcgatgccgtgctggtggacgacgtcgcattttctcccgcactgttctgcgcggacgagttgttctgcgtgcttgcagaggaagaatcctctgaaaaatcaagagtctgatccagcgtgccgatcgttacactgccgctctccgtcacgcccgccgtcagatttcctttctccacggttacttccttatatacggtctgctcttcactgtcacttcccgactgatatgcaaaggtgacggttcctgcggcaagcactgccgccgcagccactccggtcaccagccaaagctttttcttcttcattctgtctttcctcctgcttcctctgtctcagacgctccgatcgtctcggtttttcctgcggtcttagtctcttccatttctgtggctccagtcgcctgtgtttcaaacttcaccgttgcctgtacgccagtagtaagtgtgccatctgtattgtccacggcaacaatgaccgcatacgtcacattggacatgcttccgccggatgttttttccgatgcgatggaatagacggttccgtcgattgctcccattctgcttccactgatctgtacctgcacggtgtcgccgaccgcaagttttgcaatattgttctgtgatacctccacagaaatcagaatcgtatccagatcgtaatatcttgcaaatgcggtatttttgatcagtgtatcccccgcctcgtaagtcaccgatgcaagcgttccgtcacggtccgcacatacaacgccgtcctcgatcgctaagagtgcgctctgttgttccttcagctcatccaatgtatcctgcgcttcgtccacagcactctgcaaggtttccagcgaagcttcatactcggtatccgcatattttccctccagaaccgcctcttcatactgctgcaaaagcgccggctgcgctgtcgtctcattgcgctctgcctcgtcgcaggcgtcactcagtttctccagctcatctgtcagctccgcaattttctcatttgcctctgtcaccttcgtgttatattcctcaaccgctttctggaatgtctgattggctagctgcagtgcactgtttgcgctctccgcctctgtctggctctgcgacagggcgtcggctgcctcctgcacggcggtataatccgcagccagctgatctgccagcgccgcaagatccgtgtaggacgctccggcttcaatctgtgttttcagattcgccatatccgcggcgtatgtctcttttgccgcctggctgctgctctgtgcattggaaagctgcgtctgcttttccgtgagcgtcgcctgcgccgtatcgactgccgcctgtttttcattgatcccgacctgtgtataataggtgccgttgtcgatggcatcctgataatcggagatctcctccaccgcctcatcgtacgcttcctgcgcctcgctggtctttaccgacagctcgctgactgccgcatcataagtatcctgcgcggtgtccgctgcaagttttgtggaggaaagctcgctcttcgcctccagcacgccgctctcaaaattgatctgtgcggattgcagtgcagttttcgcatctgaaatggcatcctcatagtacgcctttgcatccgccatgctctcatcgtcgatcttgaataaggcgtcgccctccgccacggtacttcccgcttccacgtagacttcttccaccgtcatggtcaccgcattcacagaaaaatcaggcagctggctctccgttttcacctgtgtggttcctgtcccggaaaagctgccgtcttcctgtccgtctgtctcatctatctgtgtgtcctcctccgtctgatccgctgtgcccgaagctgctatcacatgatagccgactccgcttcccgcaactgcggcagtcagaatcccggcaagtattccgtaaaattttttggaatgttttcccaggagtttgtgtacccacgctattttcattgtttcatcctttcccttccggcatttcatcctctctcatgtttcacggtaaggatagcatcgctttctaaaggacagctgaatgtaatgtgacggttatgtgacggaaccgttaaatatctgtgtttcgcggcaggcagaccgcacatcctttgacagattaggtaaaaagtattacaatactcccgtttctatagatctgttacattggagattattcatgaagaaaattgctttttttgatatcgacggaacactgacttccgagattgatggttcgattccggaaagtgccgtctatgctatacgggcggcgcgggcaaacgggaatctgatgttcatcaataccgggcgctgttttcagaatgtggaacagcgtttccgtgatgtgggttttgacggctttgtctgcggctgcggcacagatatctactgcgacggtgccgaaatccttcatgtcgcacagacgcacgagaccgtaatgaagctgcttctcgcagccagggagtgggatatcgatatcctgtttgaatccaggaaagaggttgcttttgatctggcaagaccgctccggcacccggatgccagacggcagtatgaggcgtttgaagaacgcggctatgagatgccggagcaccttgagaatcctaattttttctgtgataagtttgtcctatggtttgagcaccccgagcagcttgccggtttccgtaccacaagcgaccgctattttgagtgcattgaccggggcggcaatttccgcgaattcgttccgctcggctactccaaagccaccggtcttaactatgtgcttgattattaccggatagacaaaaaggacgcctatgccttcggcgacagcaacaacgaccttcccatgctcactgctttgacaaacagtgtcgccatgggcaacgcctctcctgccacgctttttgacaaggtgtcctatgtaacaaaatgtgccagcgaagacggcatccgccttgcgctggaacatttcggttttatctaaagtctgcggttatcccgcacgagcaccacagccatcacgatggctgtgagaagctcggatgccgggaacgacagccacacgccattgatgccaaatactgcggcaaaaagtagcgagcagccgataatgcagacaaatcctctcatgatcgatgtcacaaacgattcccgcgcacgttctgtcgcgcttaaaaatcccgcccccacaatattgattccggcaaacaggaagccgatgaagtaaagacgcattcccgtgtgagcatactctgccagttccgcagaatgttcactgttaaacaggcttaccagagaatccgtaaatccatagacggctccgacgagcactaccgcgatgcccaaagccgtgacaagtccgagatttcgtattttccggacagatttcacatctccttttccgtagcagtcactcacgatcggctgcgctccctgtgacactccattaaagattgccattgccacaagcgcaaagttcgcgatcactccgtaagccgccacaccgatatttcccacaagaccgagaatcaggaaattgaacacggtcgtgatgactccggaagaaatctcccccacaaatgccgggacgccaagctgacacgccccgaataactgggcgatggacggcgcgtgcagccggaaccgcacagtattcttttttccaaagaaatgcgcgctgcagatcagaatgctgatgatcggtgatgccgccgtagcgagcgccgctccctctaaccccatgccgagcggaaacataaaaatatagtcaaacaggatgttggaaaaacttcccgcgagggttcctgccatcgctaaggacggctggttatcgttgcgcacaaatgccatgatgacgtagttcatcatgaaaaacggcgtaaacaacagaaaaatcctcgtatacccggttccaagcgccacaattcccgcatcgccgcccatcagcgcgatgattttatccgggataaaaacgcccgcaagtgtaaacaaaattccaatcatccacacaaagcagatggcattggaaaaatagccgtgcgcccgctcctcgccctgcgcccttaagatcgtaaagcgcgtcgcagaaccgacgccgatcatcgaaccgatcgcaaaaatcagattgtagatcggaagcaccagatttaagaccgtgattccgtccgttcccgccgccttcgcaataaaaaaggtatcagcgatgatataacaggagatacctaacattccgaatatattctgtgtgacatacctgacaaattgttttgtaactgacatttacttttccccacagttctttttcgtactcattgtttcttatcttacaaccggagtgaaccgcatgtcaagccatgggctgcagggcggcggaatgcactgtttcccagattattatgtccttgtatgcttttcattcctttgctttacttttcatttgtagtatgatttaataaaaacaatatattctcttttttcgctgcttttccgcctgaatttaaaacagcaacgggcaggaactccgtaccatccagaaccagcttcagaagcttcctccaggaaagcttatctgctcccgtaacggcaccaccgtcaaatgatatcagggcgacggtcactccaagacctatattccgaaagcgaaccgcactctcgccgaacagcttgcgctgaaaaagtatctgcagcagcaggaacaaattctcttgcaggagcaggcagcaatcactgcctatttaaaatactcccccgcgggcagcctctcttccgatgatccacatcttctctctgatcccgcctgcgaagatctgcttcattcttatttttccacctcaaaaaatattccggacgtctcgaatgtttcagatatctcggatatttcgactagttccgctgtcgaatggtctgccgcttcctacgaacgcaatccgctccatcccgagcaacggcttcacaaaaccgtctccggcgagagagtgcgttccaaatcggaagccataattgccatgctgctccacctaaacgccattccttaccgctacgaatgtgcgctctcccttggcggcgtcactctatttccggatttcaccatacgccatcccgtaaccggcgttctctactactgggagcatttcgggctgatggacgatcccgcctacgccaaaaacgccggctcaaagctttctctctatgccgcaaacggcatcattccatccgttcatctgatcaccacgtacgagaccaaagcatatcccttaaacgccggcatgattgagcatctgatttcctactattttctggattccgcggtctgaatccgtgcttctctcttccactgccgtttccttcttttcgttcacttctcgggtctggaacgacgttttttctctcccagacccgaaaatcacaatatttcgggtctgggagaacatttttcttcttccagacccgggtggcttcttttttctcttctttttccttcttttcgtccacttctcgggtctggaacagcgtttttcctctctcagacccgaaaatcacaatatttcggatctgtgagaatgtttttcctcttccagacccgcacggaaaaggcactacaccattccccaccattttaatccccaatagatgagtccaagcacccagcttgaaaatattccgtataaaatgaccggcccggcaatcgtaaagatcttgcagccaattccgaaaacctgtccttctttctggaactctatggcgggcgcggccacaccgtttgcaaatccggtaattggcaccagcgcgcccgcgcctccccagtttgcaatcgaagggtacagattcagaccggtgagcagtacagacagcagaatgagcagcatagagcaccagcttccagatgttttctgatccagtccgtaattctcacacacgttcagaataaactgcccgatgcaacagatgatcccgcctgtcacaaacgccttcgccatattccaccagagattatgggtgggagtcacctgcttcacataatcattgtattttttttgtaaacgttctttttccttatccactgcgcgacctccgtcttttttgtcagtatgcgcattttatttatttctattcctccgaccgcttctcccgccattttccctctgtaatgctgtgatgcccaggcttgctatgatgcacaagcttgctatgatgccccgggctttatgcgttctgccagtcatccggcaatgtgaccgtccagagatatttttcagtgcgtccccagtctaaaagttcccgcatctgctcatcatatacatcttcgggacggtagtccgccaccatcccgaacagatacttttccttctcatccgctggtgtcagcgtcggtatcttctccgacagaagcgcgagcagttcctccggcttgatgtcctccgggatctcaactccggaaaggttggcgataagtcccgcagcataataaaattcataatttcctgtcagaattgacttctgcatattgcacttgataatcacgctctggcgtgcgatggatggcaccataattttcctccgtaaaaaacaatctcccatcattgtactactgtgccttaaaatttccaaggaaatagtacagcgatcctgccacttttcctgccgccatcgcaagcatgacccagaagagtccgacctttaagcccatgcgccggaatgtaatcggaaatgtattcaggatctccgcgagcgccaccgcgatgcttcccacaaatatcccggcagaaataccgtacacgcacagaagcgccggtccgaacggaatccggatctgcaaaaaaacagacgccagatttccacagattccgcccagaatcacggcattttcaaaatgcagtgtctctgccgcgcggttgcactttccaatcatacgcggaatgacaccgatgacgatcaaaaatgcaaatgttcccgcagagacggcaagtcccgcggcaagcccgcagaagcccaaaaatatatgctcaattaacatcgatgctgtgtccctttctctccgcgttctctatgaacgtagtatctatgtccttctcatatttgcgcatctccacctgcatcggcgtcggatccggcgtgatcttcttactgcccacatgattgaaaaacagcgtaatgccaatggcaagtccgatgctgtaacagatttcaagttctgtcacgccgcttgactcctttcccatcacctgccgatagaatttggaaaagacatctcccacggatacatcgttgttgaacgccataatcgtgaacgccgccccgaaaaaaatgaccacgcagagcgcgacggtctttaacgcattgatccacttcggtttctcgggattgggaatgtattcaatgataaaatccttctctccctcattgctgatgtccacattcggatattcctcatgaatcagttcgacgatctttaatatggaaaaaaccttcatctggttcttctgtttgcgcggattcatcgcctccgcaaacgtatagatttttttctgcttcagctggcgcacaatcgaagcatccgggcactccattttcgcaatgtccccaagcgtcacatgccggtctgtcacgattgtattctggtcaatcttaagatacagtgtctcactctttgcactcatgccgcagttcccgcttcccatgtagaattccgttccaccagcacgccgtccatcgggggctccccctctctcccgtatttcagatataaaagtgccccgcagatcagcgcgatggccagcactcccacaaggcatgctctgtattttctgcaattcatattcctgtcctcctgtccgtttttacatcacttgcatgatttatgcattattatgcctgtcctcacagatattatgtacaggacaactgacaaaagtaccagattgctttttttataaaaacgtgttactttttcatatggacattttattatcagaaaggcggacatccaaatggctgtaaccaaggaaattctggctctcgccgtggaaatcggcgatgcactgcttcggaatggtgccgaagtctaccgcgtcgaggacacggtcatgcatattcttgaggcatacgaaattgaaaattatgatgtttatgtgctttccaacggaatctttgcaagtgcaaacgaggatcgtgaagatgcctgcagcatgatccgccacattccgctcggcaccacgcatctcgggcgcatcgctgcattaaaccagctttcccgcgagatctgttcccacgaatgttcgctgatcgacgcctgggaccgtctggaaagatgtaaaaatatttcgttcggtaaacctgtcgtccacatcttcttctgtggacttggctgtggctgtttttcctatcttttcgggggtacagccctggacagcatcgtcagcttttttatcggcatgctgctgcaggtatttctgtttgccttaaagcgccataagaattccaagtttatcacgaatatcctgggaagtgcattcgtaacgctgctgtcgctgattgtgctctcctttggtaccccaatcctctacgataaggtcatcatcggagacatcatgccgctcgtccccggaatcgcgctcactacgtcgatccgcgactttttcaacggagattacctctccggtgccattcatatgatcgatgccattctgaccgcattctgtatcgccgtcggtgtcggcaccgtcattacgatctatcattttgctatgggaggggctgcgctgttatgattatccagtttattgtgagtttgtttgccacactctcttttgcggaactgtttggcgcgccgaaaaaggaactgtttttctgcggtctgaccggtgccatcggctgggtcgtctatgtgatcggcttaaacagcaatatgggcacggtgcttgcgaatctgaccgccaccttcgcactcaccgtattttcgcgtattctgtccgcgatccgcagaaatccggtaaccgtttacctcatcgccggtatttttccgctggttcccggagcaggtatttactatacgtcctactatttcatcatgaacgatatgccgcaattctccaactacggcatggaaaccatcaaggtggcgggtgccatcgtgctgggaattgtctttggcttcggtctgccgcagagctggtttaacgcgctgcagcggatagaaaggaaaaagacggctttgtaaaatccttacttacacag

SEQ ID NO: 11565 - DNA, 74609 bp, Unknown
  gut microbiota DNA sequence
ccatcttttcctcgagtgcctgttctgccgcttccttttccgccagaagttccccaagcttcaccgagttcgtggcgttttccgccatgtcggcatccagctgctccacttttgcttccaagttcgcaatgtcatcctcgatcgtctcgtattccctctgttccttataactgaatttcagcttcttctcacgtttccaggtgtttctggaatccgcctgctctgcttcatcctgcccggatgtcccggtcacaccgccggcctcctgtgcgctttccgcctccgagtctccgcgtgctgtcattccctgaacttccgccgtttcgcccggctttctgccttcctccgccagtcggtttacataatctgtataaccgccttcatactgccggatctctccgtttccctcgaaagcaaaaatacgccgcaccacgcggtcgaggaaataccggtcatgcgataccacaatcacgattccctcatagctgtccaggtagtcttccaggatcgcaagggtctgcgtatccagatcgttcgtcggctcgtctaaaatcagtacattcggcgcctccatcagcacgcgcagcagatttaatctgcgccgctcaccgccggaaagctttccgatcggactgtactgctgcgctgccgggaacaaaaaacgctcaagcatgttcgatgccgagaccagaccgtcggtcgtccgcacatactccgccgtgttccggatataatcaatcactttttcctccggatccatgtaggcgattcccgcttcgcggctcgtctcgatctcctgcgtatagtagccaatcttgatcgttgccccgactgtgatcgtgcctgcatccggtttgatgcgccccgcaatcatcttcatcagggtcgtcttgccgcttccgtttgccccgatgaatccgatccggtcccctttcagaaaaatataggaaaagtcccgcagcagcgtccgcccgtcatatcccttggtgatgtgatccagctcgatcgtggtttttcccattctggaatagacggaactcatctccacctggctgtcgcgctccggcgccttctgattcttcagttcttcatagcgctgcaagcgccccttctgcttggttgtgcgcgcttttgccccgcgtctgacccattccagttccttccgcagtacggactggcgcttgcgctcactcgcctcggcgctctcctcccgctccgccttccgctccagataaccagaataattcgtctcatagctgtagattgcccccttgtccacctcgacaatacggttgcagacgctgtcaagaaaatagcggtcatgcgtgatcatcaccagcgcaccgcgccattttttcagataattttccagccagtccgccattgccgaatccagatggttcgtcggctcgtctaaaatcagcacatcacacggcactaaaagtgctgccacaagtgccagacgttttctctgtccaccggaaagttctccggttttctgtgtaaaatcggtaatgccgaggcgcgtcatcatgctttttgcatcgctctcaaggctccatttctgttcctgtgcatgcgcgtctgcatcggtgcgctctgtcctcccgctgccgacaaaatttaagacacactgtgtcagcacactgtcaagtaccgtcatctccggatcgaacaccggattctgcggcaggtatcttaccacgatatggttggcgcaggtcacctggccttcatccggttcctccagccccgcaatgatttttaacagggtggactttcccgtcccgttgataccgattaccccgactttttctccctcctgcagataaaaggaagctttgtccaaaagcttcctctctgtgtatgatttcgttaaattctccgcgttaataatattcatgtctcttctctttctttcctgtttctgtatgactcaaatggctctcaccggccggcttccacctgcgtttctcctgaaacagccgcctgctgcctgtcgttttgcgctttctcctgaaacgtgcggatataccgcaggcactcctgttccggcagaggtctgccgtaatagtatccctgaatacattccaccccaagctgttccatcgcttcgctctgctcccgctcttcgattccctcgataatcagcggaatccccagctgtttgatggtgtgaatctcattttcaagcacgatgcgcgccgccttgtcgcggaacgacgcccacacgatctccttgtcgatcttgatctcctggaacgggaaacggatcagataggagcagtttgcatttccgcttccataatcgtcaagtgcaaacgacactcccatttttcccagctcatgcatatgccacagcatccgttccggggcgccaatcgccgtgcgctccgtcacctccagcgtcagcatggacggcggaatatggtaactctcaagcaccggccggatggtctcagtcagattctggcgcagacactgcaccatcgaaatgttcacatggatcgtacggattccaagcgagccgttcgagagcacatgctttgaaagaaaccggcagcactgctccagcacctgttccccgatatggatgatattgccatcgcgctccgcaagcggaataaactcctctggcgaaataaatcccaattccggatccttaagccgcaccagcgcttccagggacacaatctgccgttccttcagggaatataccggctgatagtagaccagaaaccccttctcccggatcgccctcgccacggcaatctccacttttctgcggcggcggtactgtgcgatcatgtccgcatccgcctccacaatgacctgcgcgccggactttcccgcattttcaagcaggaactcccgcattccgtaatattccgccatcgccttaaagtccgtcggatagtgctgcaccaccatctccatatccagcgcaatgcggttctcctgcaccacccagtcactttcaaaccgcttttgtatctcacattttaacctttcacactgctctttggtgtctgcaaacaccgtaaatgcatctcctgccgtgtgaaacacatgaaattttccacacagattatacagatacgccccgatctcgcgcagcagttcattgctgttctcggtacccagaatcgtgtggatatgataaaacttgctcaaatgaatcgtgagcacatagccctcgccctttctgcggagccggtcctccagctgcgattcaaatgccgtcccgttcccgattcctgttgtcgtgtccagaaacaccaccggattctgaatctgcagatagagcattatgagcacgaccgtattgctgacgctggtgcaaagcatctctctgtaccggtattgcaacccgatcatggcggctgccacagccgtgtaggcgcacacgatgaccttcgtgcgaagcgtggtatatttatgctgccgcacgacaatcagaagccccaacaaaaagaagatcacaatatacgcatatccgtaatccgcgccgacgccctgataataactgccatccctaaagtaataaaaaaatccagtcaccggcgtcactgccaccaacacaagaaacacggcaaacggaatcatgccggcagccgcaaataccgttctctccctgccgcggagcgcacatgccgccataaaataccggtaaatcagatatgacgaagccccctccagcacaaaaaaagcaaacgccagtacctcgttcagacgctgcggaacgagggctgcatttgctaatcccacacatgatagaatgttcatcagacactctgcttcacacacaaacagaagccagccgaatacccgtgtcttctccccgggaaactggcgcacgaatacaaagtgcagtaatataattgtcataattaagagtgatgcgatctcaaaatcataattatactgcacctatatctccctcctgctcttcctgtgccgcctttgcctccagaattgcctcattgagctggagcatctttgcgtccagcatggaaacgattcccgaacactcgcgcagatccctgctgatgtaatccggcgcatttccctcaaacttatagtagatcttgtgctcgaggcttgcccagaaatccatcgccatcgtccggatctgaatctccaccttcgtgtcgataatgcggtccgacaaaaagatcggtaccgtcaccagcatgtgatagcttttgtatccgctctcctttggatgccggatataatccttcacggagattaccgtgagatcattctgcttgccgatcatctcggcaaggcggtaaatatccgacgtaaaagaacagacaatccggattcccgcaatgtcgttgatgtaattcaccatattgtcgatcgaggagtcatagccataccgcttcagctttttgacaatgctctccggcgctttgatgcgcgacttgatatattcaatcggattgtactgatgtacctgttgaaattcgtcatttaaaatctcgacctttgttctcacttcctttagtgccgagttatacagaaaaataatggtgttccagctatctacgccttcacccagggttacttcccctaacgcaaccggcttgtccatatgttccccctccagatgtctccccttatcatttattgcaatacgctccggcaaatgtccggaaaccctccggcttcccggactcgcgggcgcgtattgcgcagtacacgtccaagaaatcacagatttcttggactaccgggcagtcgccctatcaaaatcgtgccagcgaaaatgtgctctgcaaacaggcaatttttgctgttacgattttggcactgctcattgcttatgtacattataccatattccggggggattaggcaaatcgaaacacagcctgctgaaaccggttctttatttccttccataacttatgcagcttagtcctcctcgataacctgcatttccagaaaatcaaaatcaatctgctcgataaaggaatcctgcgtgaagcgcgtcttggcatggcgcttgaattcattcacattcgcctccagccagatcggttttccgagatcaaattcatagcacacttcctcaagcgcatggaagaccttgtgtgttcttgtctcatcggattcatccgtgatcgtcgtatcccgcagcaagtggttgttcttcatcattttaaaccagattctcattttcctttccttctcctctgcctgttggtctcatacataagcagtgctgcggatactgccgcattcagggattccacacttccctccatcggtatccgcacgtaggtatctgccagccccgcgatctcatcggacaatccgttcccctcgttcccaatcagaaacgccgtccctttgcagtaggacggttcgtcatagtgcctctgtcccttcagatgcgccgcgtatatgccaaccttctgccgtttcaattcaccgatcgtctctgccagatcgtccgcaatatagtagggtacccggtaaatacttcccatcgtagagcggatggtctttggattaaacagatccaccgtcgtccggttcataatgatgccggtaattcccgcaccctcgccggtccgcagcatggttcccagattccccggatcctggatgctctcaacgatcagcagatgtgtcctgtccccgcgcagcagaccggaaagcggatactgcggcatacgcaccagacataagatcccctgcggcgtctgtgtgtcggaaatgctcttaaataccgcatcggcaacgacctcataggtctttcccgcaagcagctgctccgcttccggttcctccagaaatcgctcggagacataaaccttagagagccactccggcggaacctcctcaaacatctttctgccttccacgacaaacaggttctggcttttgcgctcttttgcctttttcatcaatgccgtaatatttttcatctgctgattgctgctgctcgtaatcatgactgctcctttttgttccctaagcggaaaaaactccatgagttcccgcccatggagtcttatgatcgttccaaatactgttatgtatcttacattgaaagattcttgctgatctgatactgatactccggaatgcatttctgcattgcaagtgccgcatcgatgtcgtcatccacgaaatcgccgtgacgataaccaacgacacggttgctcttgccctcgcagagcagatccactgccagcgcacccatcgtggatgcatagacacgatccttacaggtcgggcttccgccacgctgcatgtgacccagaatcgtcgcacgcgtctcaacgccggttgcagcctcgatacgctttgccatgcttgcagaatgtccgatcccctccgcattgacaataatgtgatgctgtttgccgcgcttacggttctcgatgatatggtttacaatcttctgctcatcgtaatcatatttctccggaagcaggatatcctctgcgccgttcgcaataccgcaccataatgcaatatagcccgcgccgcgtcccataacctcgatgatgctgcaacgctcatgagaagtagaggtatcacgtaccttgtcgatcgcttccattgcggtgtttaccgctgtatcaaaaccgatggtatactctgtacatgcaatatcaaggtcaatcgttcccggaagaccgatcgtgttgatgccgagtgccgccagcttctgcgcacctctgaaagaaccgtcaccgccgataacgataataccgtcgattccgtgcttcttgcagatctctgctgctttctgctgaccttccggtgtcttaaactccatgcagcgtgctgtctgtaaaatagtaccgccgcgctggatgatatcggaaacgtcttttgcttccatatctacgatctcttcctggagaagtcctgcataacctctcttgattcccttgactttcttaccctttgcaatggcttccctaaccactgcacggattgctgcgttcatacccggggcatcgccgccgctcgtgagtacaccaatggtgtttatctctttcgccatttatcgttccctcctcatataatatacccatttaatctatcttattttaatctctttatggcttcttttcaatgctctttttaacaacttttacgttattttcccccaaaaacttagttaaattgttcacaatctccggtccgatgcagatactgtagttttcgggcagccgcttcatcgccttgaccgatgaaatatagatcaccaccgtgtctttcccatccgaatcatggagcatggcatagagttctttttccttttccgcaaacgcttccttggtctcaaactgaagccataattcattgccgcgccgcgcgggaacctgcgcggctgcaccgccacggcttgatccgccgtctcccgcggatgccggactgctgcccgcattcccgcctgcaccgcgccggtatcctccgccctgccggtaagtgcgctgttcctgtggcattccgttctctgcctgttcaaacgtacagatctgctcgcagacgatcttggcgtttttatcctcctccacgttggcatgtccgcggataaataccttctcatcctcattcagcagcgtatgatagcgctcatactcgccagggaatacgatcacctccaccgtaccgaacagatcctcgagcaatagaaatgccatcgtcttattattcttcgtatatttgatgttcttctccgtaatcattccgccgatgataaccttctggttatcccgcagcttgacctcgccgctctcctcgtccagcaggaaatccgacgtcactgccgatatgattctgcgccatttctcctcgtattcctccagcggatgaccggtcagatagataccgatgacttccttttcaaagccaagcttgatctccttgctgtactctccaacgttgggatactgaatctcataggcttttttctcctcctccgacaccagatcaaacaggctcatctgtcccgccagcgacttctttttcgtctgcacctgctgatccatcagagcgttgtacaccatcatcatctgctgtctgttgccgtctaaggtatcgcaggcaccggatttgatgagattttcgacagtgcgcttgtttacctcagagtccgccacccgctcaataaaattctgcagggtgcggtagggaccgttctgattccgctccgctatgatcgcatccaccaccgagcgcccgatgctcttgatggcgtacagtccgtagcggatgccgtctttcgtcgccgaaaaacgtccctcgcccccgttgatatccggagccagcactttgattcccatctgcctgcaggtatagatatactctgccaccttccgcgggttatcaatcacggaggtcatcagcgccgccataaattccaccggataatagtattttaaatatgccgtctgatatgcgaccaccgcgtatgccgccgcatgggatttgttgaatgcgtacttcgcaaaatccaccatggaatcgtagatctcgttcgccgccttctcactgataccgtttgcaatacagcctttgatcccctgctcctcatttccgtaaacgaaattgtggcgctccgcatcaatgacatactgctttttcttactcatcgcacgacggatgttatccgcctgtcccatggaatagcctgcaagattctgcacgatctgcatgacctgctcctgatagacgatacatccgtacgtcggctccaggatcggttccagttccttgcaggtgtacgtaatgctctccggctcgttttttcccttgatgtactttggaatgaaatccatcggtcccggacggtacagagagattccggcgatgacatcctctaagctctgcggctttaactccttcatgaagttcttcatccccgcactttcaagttggaagacgccctcgcattttccggttccgatcgcatccagcaccttcttgtcaccgtaatcaatctggaccgcatccggatcgctgttatcgttataatcaatgtgatcgacatcgatccgcacgccgtggttcttctccacaagggcaacggcatccttgatcacggtaagcgtccgaagtccgaggaaatccatttttaacagaccaagctcctcgatcgttgtcatgacgaactgtgtggtgattgtaccgtccgaagctctggaaagcggcacatattcatccatcgccttctgggaaatcacgacacccgccgcatgcatggacgtatggcgtggcagtccctccagacgttttgccatatcgatgagtgtgtgcaccgtgtcatccgtctcgtacatagtacgcaattccggattcatggtaagcgccttatcgatggtgatgttcagttcgtttggaatgttcttcgcaatcgtatcgcagaaattgtacggcagatccatcacgcgccccacatcgcggatgactccgcgcgcagccagcgtaccgaatgtgacgatctgcgtcacgcagtccttaccgtatttctcgattacatagtcaatgacctcacttcgtctctcatagcagaaatcaatatcaatatccggcatcgtgacacgctccggatttaagaaacgctcaaacagcaggttataccggatcggatcaatgttggtgataccggtcgtgtacgagacaagacttcccgccgcgcttccacgccccggtccgaccggaatgccgtgcgttctggcataattgataaaatcccacacgatcaggaagtaatcgacatatcccatcttctggataacggaaagctcataatcaagctgcggcagcagctcgtcatggcggtccggataacgctggatcagtccctcatgacacaatttgttcaggtacgtccaggaatcatacccgtccggcaccgtaaagtgcggcagcttcgtcacaccgaattcaatctccacatggcaccggtcggcaatcttctgggtattctcaatcgcctgcgcggcgtaagggaaaagtgcgcgcatctcctcctcggatttgacataatactgtccgccctcatagcgcatacggttctcatcggacagctttttccctgtctggagacacagcaggatatcatgcgcctcccagtcctccgcataggtatagtgcacgtcgttggtggcgacaagctcaatgccaagctcctggctaagccgcatcaggccggcattcaccgtcttctgatccgggattccgtgatcttggagttctagaaaataattgcccttgccgaagcatgcctcatagcgctgcgccgtcttcttcgcctcgtcataaagacctctgaccaggtagcgctgcacctcgcctgccagacaggcgctcaacgcaatcagcccctcatgatactgttctaaaagttccatatcgacacgcggtttgtagtagtatccctccacaaatcctttcgacacgatcttcatgagattctgatacccctggttattctccgccagcagcaccagatgatagtagcggtcctccccatgggacatctcgcggtcaaatctggaattcggcgccacatagacctcgcagcccaaaacaggattgatccctgccgccttcgcttctttataaaaatcaatcacgccaaacattacaccgtgatccgtgatggctcccgctgtcatgccgagttctttgattcgttttacatattccttgattttattggaaccgtccagcagactgtactctgtatggacgtgtaaatgtgcaaatgacataataaatcctccgttttttcattatattatgaacaacggaattattcaaatcttttcacggatcattcccgtgctttccatagcagaaatagatagacagacacgtcccgaaattgtttggttgatgacagcggcagactcgccgcttaagaacgagacagactcgtctctacattccagacaggaactcttccacagttgttgagcgtgcagcaagtttcagccacttttccagtgtctcatcatcctgttcccctgcaatgcgctgctgctcttctgccggaatagttccaagctcggctgctaatgacaatatactctgtgctacttttgacgctgcaagtgactccgccatcggcttcgcaagcgtctctgccatcggcttcgcaagcgtctctgccatcggcttcgcaagcgtttccgccattgattccgctatcgaaggtgccatcagctttgccctccgctccgcttcctcacggatatactcttccatcgtcatatagcctgcctccaattttcgatcacgttttagatatttgactctctcatgaatattacggattttttcatccggatgcatctctgcaacttcctcagtgctctgctttaaatacgcaaacagatgcagtagttcaggtgttatgttctcccatatacaagtacctcctctgtgggaagtgcctgtctacaaaaattattataaatcattcttccgtcaaatgtctattaggcgaaatcacgaattgtaatgtctgcgttttcacacagatgcatttcttttttatttatgctataattcgttccgtgaattagcagaaaggatctgatccattatgggaaaaacaggactgattgttgagggcggcggcatgaaatgcgcttacagtgccggcattctcgacaggtttttagatgataaaatcacattcgactattgtatcggcgtctctgccggagctgccaacaccctctcctaccttgccggccagcgcggcagaaatctgcgcttctataccgtacaccttgacgatccgcgctatctttccgtccgcagcctgcttcggaccgggaatctcttcgggctcgaatatatctacggaacgctgaccaactcagacggtgccgacccgattgactacgatgccatcatgaaaaatccggctgaattttatatgccggcaacggatgccctcacaggaaaggcagcctatttttccaagttcgacatcgtgcgcgacgactaccgcaccatcatggcgacctgcgcgcttcctgcgttctgccgcccggtcaatgtgaacggacatttctactacgacggcggtgttgccgattctatcccggtacaccatgccttagaacacggctgcgacaaggttgtcatcatcctgtcaaatccgcgcgatttcgtgaagcagccggaggcacaccggccgatctacaagcgcatgctgcgcagatatcccaagaccatcgaagggatcgaccaccgccatatcaattatcaggcttcgattgatctttccaaccggctggaaaaagagggacgtgccttaatctttgcgccgagccgccatctgccgcttggcactttctccagggacgctgccctagagcagaagctttatgatcttggagtatctgattatgaagcaaaacgcgctgccctgcaggagtttttaaaggcgcagggtcactcataggttttctttaaaaatgcctctgccccctcctgtgttttttccatgaattcccctatatccgtccagcggagcagaagtgtatcttccgtatagccctgcttcttaaaataagtttgggcatactgttgatacgcctcctctgtcagcgggtttccgtccgcatccttacagacaatctgcgcctccccttcatcaccgctgttccccgccacatacagccatgacatggttgccagagtctccaccttaatctcatcctccaaaacagacatggcgtctgtcgcatagagatgctccgctggcgaaaccctcaaatcatcatacacaatataatattcctgcaaagtttctttcgtttctttccgatacacggtaagctcatccgcaatcaaatccggttgggaatccccctctacaaaagacgtcttcagttcctttaacgtgccattctcctccaccctgtaaaacctgctgtacgtatagattccggttcccccacagttcgatacaatcagctccagtctgccatcgtgatcaagatctgctatcgcaaactgatacatctcatctgcgtaatctggatcattcacccactgattccttgtccgcgcaatgacggcaagctgatcgtccgcatcctccacatcggaattttctgtctgctcttccgcctgtgcaatactttgtatcttctctgtctcatctgaggaatttaactgagcttccttcgtctctcgctccgtctctcccatcccgtctgcgtgcggtaaagccgtcccgcacccggcagttatcgcacagataagcattcctgctatcatgatcttcctgtttttcatcgctcctgtcccacttttgaaaaatacatcggtatctatccttttaaaatatgtagtatctgttttattttaatgacttcacaggcatttttcaatctttcgtttcactcaagaacaacgtgtgcgcttgccgcacacttgcgcgccctcgcggtatgcaaagcattatttacctcaccgcgaggtgcgcatcctcgcggagcgtttttgtgtaataggaacgaagttccctattacacaaaaaaaggggcggaggctttctgcctccgtccctcttctctgttcctgttttagatcaaccctcacgctttcactgctgccgtcagttcatttccggagacatcaatcagaatcgtatctccctccctgactttatccgcaagaatcagctttgcggaaagtgtctccacatgcttctgtaagaaccgctttaacggtcttgcaccgtagatcggatcatatccgttttccacgatatactgctttgccgcatcggtcagctccaccgtgatctcacggtctgccagacgtttgttgagatctgcaaccagaaggttgatgatgttaccgatgttgtccttcgtcagcggcttaaacataataatctcatccagacggttcaaaaactccggacggaaatgtccgcgcagttcgtccataactgccgcttcgcactccggattgatatccccgtttgcatcgatgccctcaagcagatgtgctgatccaaggttcgatgtcatgatgatgattgtattcttaaaatcgacggtacgtccctgtgaatctgtgattcgtccatcgtccagtacctgcaacagaacgttgaacacatccggatgtgccttctccacctcatcaaacaataccaccgaatacggctttctgcgcactgcctcggtcagctgtccaccctcatcgtatccgacatatcctggaggcgctccgatcagacgggagacggaatatttctccatatactcactcatatcaagacgcaccatattcgactcatcatcgaagagacttgctgcaagcgcctttgcaagctctgtcttaccaacaccggtcggtcctaagaacaggaatgatccgatcggcttactcgggtctttgatacctgctttggaacggatgattgcttccgtcactttcgtgacgccctcatcctggccgatgacacgtttgtgcagttcctcgtcgagatgcagcgtcttgttacgctcgctctccgtcagctttgccaccggaattcctgtccatctggagatgatccgcgcaatctcttcctcactgacgttttcatgcaccagggaaaggtcgcgtttcttcacggcttcctcctcgatctccaactgcttctgtagctgtggcagcttgccgtactgcaattcggctgccttctccagatcgtacttctgctgtgccatcttgatctcattcttgaccgcttcgatctcctcacgcagcttctgtactttttctaccgactttttctcattctcccactgcgctttcttcgtgttgaattcatcgcgcagctctgccagttctttctgcagatttgccagacgctcctggctcagacggtcggtctcctttttcagcgctgtctcctcaatctccatctgcatgacacggcggttcaactcgtccagttccgtcggcatggaatccagctcggtcttgatcagcgcgcacgcctcatcgaccagatcgatcgctttatccggaagaaaacgatccgaaatataacggttggagagcactgctgccgataccagcgcagaatctgtaatcttaactccatggaaaacctcgtagcgttccttcaatccacgcagaatggagatggtatcctcgaccgtcggctcatccaccattaccggctggaaacgacgctcgagcgccgcatctttttcaatgtattcgcggtactcatccagggtcgtcgcaccgatacaatgcagttcaccacgcgcaagcatcggctttaacagctgtccggcatccatcgcaccatccgtcttgcccgcacccacgatcgtgtgaagctcatcaatgaacaggataatctgtccctcggaacttttcacctcatcaagcactgcctttaaccgctcctcgaattcaccgcgatattttgcaccggcgatcagcgcacccatatccagtgcaaacaatttcttgtcctttaagccctccggcacatcgccttttacaattcgctgggcaagcccctcgacaacagccgtcttgccgacacccggctcaccgatcagcaccgggttgtttttcgtcttacgggacagaatccgcacgacattccggatctcatcatcacgtccgatgaccggatccagcttctggtctctcgcacgggctaccatatcatacccgtacttctccagcgtgtcgtaggttgcttccggattgtccgatgtcacgcgctgattgccgcggactgtcgagagcgcctgcaaaaaccgttctctggtaatgccgtactccttaaagatctccttcaatgccttattcggatacttgatcagcgccaggaacagatgctcgacagaaacatactcgtcccccatctgcttcgcctcatcctcggcatgaatgagcaccttatttaaatcctgtccgacatagacctgaccgccggacaccttgacacgcgctgccagatgccgctcggcgttatccatgaagtgctccttctgaatctccatcttctcaatcagcttcggaatcagtccatcctcctgccgcatgagtgcaaccagaagatgctcctgctcgatctcctgatttccatattcataggcaagcttctcgcaatcgttaatggcttccactgacttttgtgtaaatttctgaatgttcataagcgtacctctctttctcttcctatgatatacaggcggcacatatctatgcgccgcctgctttgttctccctgttacaattatgttatagcaccagttgttagcactgtcaagagatgagtgctaattttttcagataattttaccgccagcagaagcagggacttcctgcctaatatggtctgctctccaacagctccgagagatccatctcacagtcaaaatatgtctcctccacatactggatcttctccacgctttcccccgcctccaggcggcggatcgtctcctccacaagcggggctgtcagcggattgcattcaaaatcagccgcgatgtccccggtctggattgccttgagggcatcccttaccgcatcaaaggacaggataataatgtccccgtcactgccaatcgtcctgcccgcctcccggatcgcctcgatagcgccaaaggtcatattgtcattctcgctgattacaacatcaatatcctcgtatttttcgagaaattccttcataacctcctgcccctttgcctgcgtgaaatcccccgactggcgctccagcatcacccagttttcattctgctggagaacctctgcgaatccgtctgtccgcccgatctgtgcagaggagcccagcgtcccctggagagatacgatatgaactgtctccccgctccgcccctgcttttccagataattctccagccagtgcccggcgttcctgccctcctccgcgaagtcactgcccacccagcatgtatacaggctgtcgtcctccatctccgccctgcggtcagacagaatcaccgggattccggcttccttcgcctcctccagaacggattcccagcctgtctccacgatcgggtcgagcacgatataatccacctcctgcaggatcagattgcggattgccttcacctggttctcctgcttctgctgtccgtcctcgaagatcagatagtagccgttttcctgcgtgaacacatccttaaaggactgtgtgttggtggttctccagtcggattccgagccgacctgcacatatccgaccacaatatagccgtcctgctgcatcgtctgctccgtatccagctgtcccgcagtctctctctgctccccactcccacagccggctgtaaagagcagctggctggcaagcagcgccgccgcgattcctttttttcccacagtcctcttctgaaatatgttcatattcctcccgccttttctcctgccggctgcacctcctgcccggggtgcttttttaacgcagcacggtattttcccatagaagagccaaaaggctgccgcatgaagcggacagcccctggacagccttgtttttatttgctcttctctttgatctttgcaaagatactctgtaatacgatgaagaaacagagcagcgcagccaccgcaatgttggaccacgagctgagcagcttgccgttcgtcttcaccagtgtggaaatcgttccgttgataagtacaccaaagaaggagccgatgacatttcccacaccgcctgtcaataatgtaccgccgataacggaggaagcaatggcatccatctcaagtccgagtgcctgctgcacatttcccgacatcgtgttcaggcagtagcagatgccgccgatcgagcagaggaatgaggaaagcacatacgccttcagcttcgtcttcttcacgtccagtcccatcatggtcgccgactgctcacttcctccgactgcgtaaaggcttctgccgaacttggtatagcggagcatgaaaaatacggctatcagcacgagcagcgccacgattaccgatacacggataaacggaacctgcaccacgcccttgttgttggtataggagccaaacggaaggctgatcttcgtattggcaagctttacaaaaaatgcattgctgctgatggagatctgttccgtgctgatcacggctgtcatgcctctggcgaagaacattcccgccattgtcacaatgaacggctggatattcagatagccgacacagaagccctgcaccacgccgaacacaatcccgatggcaagcacaagtatgcagagcagaaccgcattcatgttccagcgctccataccgacggcaagaatcatgcagtccatggcaaccagcgagccaacggaaatatcgatgccgccggtcagcatcacgcaggtcattccacaggtgatgcagagcaggcccgcattattgataaggatgttcaaaaacgtctgcagatgtgtgaagcccttattggaataaatcacacagcccacggcatacatcacaaaaaataacgcgatggtaattatcagaagaaccgtatttccatttaattttttcgctttcattatgcagcacctcctttggcaagctgtctccttacagacatttttttcataaatgccttaaacggaggtgcctggattgccacaataatgataacaatgaccgccttgtacaccggtgcctgctcggtcgagatgccgagcgcatacagggtggtggtgatcgcctggatggtgtacgcaccgataatagagcctgccagccggaactttccgccgccgaggctgttgccgccgagtgcaactgccagaatcgcatccagctcgaagttcagtccgatgttgttggaatccgcagagctgatccgggaggaagcaacaatgccggcaattcctgcacacaatccgcagacaacatagcacaggaaaatgatgcgctcggaattgatgcccgcgatgcgggaagccttcttattgatgccgacgctctggatatataagcccagtgcggtcttgcggagcaccagcgatgtgatcaggatgcacacgatggcaaccacgatcggtgtcggcataaatccgagatagccgccgaagattttaaaggaatcatcccggacgtatacgatcatgttgttgcagagcagaagtccgattgccctcgccgccgaaaacaggatcagcgttgccaccatcggctgcacattcagatacgataccagaaaaccgttaaacgcaccgctggcacatcccatcaggatgccgccaagcacaccgacgatcagcggcgctgcaaggctgttggtggaggacacgccgtagcctgccagaagcatgcagcagaacgatgccgccagtgacatgaccgagccgacggaaatatccgttcctgccgagcaggacacaaccagcgtcatgccgatggcaagaatggcaatctcactgccgcggtttaaaatatcaatgatgcgtccgtacaataccccgttgcggatggagatggtaaaaaagttaaatgcaaaatttcctgccatcacatcatagatgatatttaccgccatcaccagtatcatacagaaaatcggtaaaaacaacggctggctgaccagcttcttaaacttactcattcctgccacctcctgctatggactgcattacatgcccctgggtcagttcctcagtgatctctcccacttcctgaccatcccttaataccaccagcttggagcatgttctgagcatctcctcaatctcggaagagatgaagatcagactctttccctgatccgcaagctcgatcacaagcttctggatctcagtctttgtcccgacatcgatacctctggtcggctcatccagaataaggaattccggatctgtggcaagccagcgtgccagaatcaccttctgctggtttccgccggagagctgcccgatcagggtctccctgctcgccgtcttgatctgcagcagctcgatatacttgtctgcgatctcgttctgtctgctcattggaagcagcttaaacattccgcgctttgcctgcattgccagaattatattttctcgtacagataagtctgcgataatgccctctgcctttctgtcgtccggaagaagtcccattccaagattcatcgcatcaatcggcgcattgatctttgcctcttttccgttgacaaacagcttacctgtctggtttttatccgctccatagatgacacgcgccagctcactgcgtcccgagccaagcagacctgtcagtcccacgacctcacccttatgtatctgtaaatcaaacggcttgatctttcccttgtggctcatgccctgcgcatcgataaccaccggcacattggtgaaatccttcttctcttctgattttacagctgcaaggtcatcaaaatccttgcccatcatcgctgcaaccagctttacccttggcagctcctcaatcggatattctccgaccagtatgccgttccggagcactgtgatccggtcacagactgcgtatacctgctccagaaagtgtgtcacaaacacaatcgccacacccttttccttcagctgccgcataagaacgaacagcttttcaacctcatggtcatccagggaggatgtcggctcgtctaaaatcagtaccttacaatccatatccaccgctcttgcaatcgcaatcatctgctggagcgccagtgaatactcttccagatttttggttacgtcaatatcaagatccaggctcttaataatcctgttggattttgctgtcatcgtcttccagtcgatggttccaagctttgtcttcggctccctgccgataaataaattttctgccacactcaaattcgggcaaagattgacttcctgatacaccgtggatatgccctttttctgtgcatccagggtcgaatgattgaccaccggttcatcgatcccgtcaacgcgtatttctcccgcatcgaacgcgttgattccggtcagacacttgatcagtgtagatttcccggcaccattttctcccatcagtgccatgatctcgcccttccgcagtgtaagatccacattgtccagtgcctttacgcccggaaatgtcatggtaatcccccgcatggtcagtaccacattatgctccattttactccaccctttccttaaaattgggagagaccaacgggcctcccccattacaaattccctgtctgtgaagcagcttcttctctgtccctgctataatgtttgtcctgttgccagaccgtcttaatactgtgcgtcaacgatctcctgtgtaaccacggtaagctcctgctcctcgccgtttaccgtgatggatgaaaggatgtcctcatttacataccagtgctcaaccatgtatacttccttgtcaggtgtgctgccggactctaactgctggataacatcctctacaaacggagctgcaagcgggttgcactcgaagtctgcattgatgtcgccggacattacatactcaagacctgcggtgcaggcatcgaaggaaatcaggatcacgtctccgtccacaccataggagatacctgctgccttcatggcatccatcgcaccaaatgcctcgttatcgttctggcataccactacattgaactgtccctcgtagctcttgatgtaagactccataacctcctgtccaccagcctgtgtgaaatcaccggtctgggaatccagaatgttccagccgtttgcatctgcgatctccttgaagccgtccgtacgtccgatctgtgcggaagcaccggttgttccctcgataacgagcacgttcacgtcgctgatgccctttgcatccgtgtaagcctttaaccactcacctgctgcaagaccctcattcttgaagttggagcctacccatgaaatatatttgtccgaatcatcaatcgtacggtcaatgacgataaccggaatacctgcctcctcgcactctgtcagtaccgtgtcccagcctgtcgatacgatcgggtcgatgatgatgtaatccacatcctgctcgatgaagccacgtactgcctccagctggactgccgaatcctggtcgcagtcaacgaactggagatcatatccgttctctgccgagaagatggactgtgcggaattcgtggatgcggtacgccagtcagactcatggccaacctgtgcaaagccgattttgattacatccccgtcagctgcgtctgccgcatctgctgcgtcagaagcatccgctgcttcgctgtccgctgccgtatctgcgtctgctgcatctgctgccgttgtgttgctgctgtcagcagcctcctcgcttccgcagcctgccagtaaggttgcgcccattgccatgcacatcagtacactcactaacttttttttcattttaaaaacctcccaaagtttttattagatttggttaagtccttaaccatgtacctattatagctttcggacggtttaaaaaataccgactggcttttgaaataagtaaaattttttactaaattatgaacagctcattcacaattttgccgtattttcctcaaaaggtgtaatttttttggaaatgttgcgttttcttttgattttctctgcccggcacggaatccgcacccagatctcggtgccctgcccgtaggtgctctgtatcttcagtccgtactccctgccataattgagctggatacgctggttgacattgaacagtccgaagccgcccgtctcctcctgctccggctcctgctccccgtcgcggagcatggcgcacacctgcgcaagccgcgcaccgtccattccgattccgtcatcctgcaccttgaaaatcatgacatcctggcagagtacaccggacacccggatatgtccgccgccgcgcttgttcttgatgccgtggtagagcgcattctccacaagcggctggagcgtcagcttgatgatctcatattcatagagctcctccggaatcgcaatctcatattccagtatatccctgtagcggaactgctggatctctaagtagctgcggatgtgctgctcctcctcctttaccgtgatgaactcccgccccttgcttaaggttgtccgaaaaaagcttgacagggacgacaccatcctcacgacctgctccgtgtccttcgactccgcgagccagatgatgttgtccagtgtattgtacagaaaatgcgggttgatctgctcctgcagcacgcgcagctccgccgcgcgcagattcagctcctccacgcgtatatcctccacgagatgcccgatctcctccaccatctggttaaagctgctgttcagaaccgagagctcatccagctcctcgtcctgcgcccggatcgcaaaatccccgcttcccgctgcctgcgcagcctcacacagccgctggatgggctccgtgatgccccgcacaatcctcctgctgaccatccatgccccgagcagtatcaggacgagaatcactgtgatcgccgtgatggcactctccacatccgcgcggattcccatccgcagctcctccatgttcgttgtctcatagtagatataatactggatctgctcctgtatcagctccgtcaggacgcggatattcagatccagacgctccatgttcgtctcataaagcccggtcacaagcgcatccttctcgatctcctccacacgatcctccagcgtgtcaagactctttagtatgcttgacagccggttcgcggcgtactcggaatctgcctcctcatagagctcgccgaacacctcccgcgcggcctgtatcatccggtgcggctgctccgtgtccaccagctcctcggcacgctccgaattgactacgataatatacatcacgtagtccatgtcctccttgaaattgatgttgtacgcgtttgcctttgtgattctcctgacaatcccgtcatactcggaggaaatcttgttcgtcataatcagaagatacgccagaagtatggtcagcggcaccacacagatcagcagcagcatatagagcctgctctttagtgaaaaccctctcttcaatatccatctccccttttaccctctgctgcggtactcacccggtgtgcagccctgcgtcttcttgaacaggttgctgaaataatgcgcatcccggtagcccacctcaaaggcaatctccgttaccttctttcccgtcgtcctgagcagctccttcgctttttccatgcggattcttgtaagatattctacgaacgtctctcccatttcctgaccgaataccgtgctgaaatggctcggactcagatttacctccgctgcgaccatattcagggaaatcccgtccttctcaaaatgatcgttgatgtaggtctttgccttctgcatgatgccgtcgtattttccgtccaccgcctcactgcgcaaatccagcaccgccgaaaaaagcttcttaatatattccctggtctgctcaaccgtggtcaggtaagctgccatctccttcgcatcgccgcaccgctccacgagatccctgctcttgtaaccgctcttctccagaacggaaaccgccgtcacatacagatccatcaccacgtactggcgcaggaagatagactttacattgccgtccccgagctgtgcaaagtaatcctccacgaagccggacacctcctccctagtgcccgtgtacagaaaagcctctgcctgccgctgactcaggctggagatattcagctccccgagctttacatcctccagaacctccgccgcagtctcccccggcgtctcctcctcaaggatctggttgcgctctaccgaatagcgtctggaaaagcacaggttggtctgccggtagcactgctgcagctcgctgaaacgctccaccggtgtcccgagcgccgcgacatactccaccgccgtctctctccggaaatactctgccagcaggctttttacctgctctgtcgtctccgcgagagactgctgccctgtgcccttcagcacaaaatcgtactccgcccggctctgctttgcgacaatcagattgccggactgctccatgtacttctccaattcctgctcgaaggcttttatcttctccggcaggacatcctccttctcctcggagaacagctggagcagcatgatattgtactgctccgcaatcagctcaagtcccagctccttcgcctcctggaacaccgacgcataggtatgctttccggagaccatgtgccggaacagccgctgcctgccggcagatctcgcctcctccggcgcctgctgcttctgcttcccgcgctcctcctcgatcttctgaccgatcttcttgagtgtcccgatcagctgtgcacccgtgaccggcttcaccagataatccgtgattccgatgtcgattgcctcttttgcatactggaactcgtcatacccgctcaggagtatgatcttggtctccggcagctcgtgcttcacgagacggctcagctccagtccatccatgaacggcatcttaatgtccgtgatcagaatatccggtctcgtcttctggatgatcggataggcgagctccccgtcgcccgcgtcaccgacaaattcaaagccttccccctgccagtcgatgttgttctttatgccctcccgcataacgatctcatcttccgctaaaaaaacctttaacatatgaaattcccctcaatacattttcctataaaaaccattgtaaattcattttatcacacctgcgaacaaaaaacacagaagattttggctgtccgggatgcctatcaccggattctgctcgatgcagtcgataccctcgtgcagaaatgtccccccgcatacgcaggacttccggcgctcagggaacgcatctatttaggtatccagcttctggaaagctttgcgcacacccagctggcgacttccctctgcagtcagtttgatatggaatccatgcagacactctgcctccggattgcagtggagctgctgacaccgccgcatcagacgggatccgatacggcagtgtcatgttcacactaatcttatgaaaacgccctgcggtcttaagcttccgtgctccaatccgttcgcgaacaggcagtcctccggctccggcagtccccgctcccctgtccgcaccggttcctccccggcgttaatgcagacctccagcgttttttgtccttcttttttcttataataatgtaacaatctggaatcctctctgacatcccataccacttttccgctccttgtctgcggatactgcctgcgcatcgcaatcagctgctttacctgtccggtcagttccgcaaagctgcccgcatcgatctcctcccacggcatgcacttccggttcgcctttgttccgcctccgtccataccgatctcggtgccgtagtagatgcccggcgcgccctgcatggtaaacagaactgtaagctgtgccagaaacatatccgcatttccgtggcatctctccatcagacgatccgtatcatgggaatctaacagattaaacagcacgcggtccacctgctcgtagtacatgctgtagcactggttgatgccatgcataaaatccgtaccactctgtgtcttatctgcccagaagttattcacgcacgccagaaacgggtagttcatcgtcgaatcatactcgtcgccgagcagccatgggaaagcatcatgccagatctcgccgagcaggaaaagctttggattgcactttttcaattccagacgcagatgttttaaaaatgcatgtgaaatctcattgccgacatcaaaacggattccgtcaaccttccagtcacatacccagtgctttgcaatgccggtcagatactccatcacgtccggctcactggtatcaaatttgggcatattgtcgacaaacgcaaatgagaaataatccccctgctttgtcgcatgggtctgcgcatcgatcggccagcggttcacgcaaaaccagtggtaatagtcggactgcggtcccttttccagcacgtcctgccagagcgcgcacttcgctccgcaatgattgaataccgcatcgatcatcacacgaagtcccagcgcatgcgcctccgtaatcaacgccttcagttcttcctccgtgccgagatccggctctacgctgtggtagtcgatcgtgtcataccggtggttggaatccgaccacagaatcgggtttaagtagatgcctccgacgccaaggtctgcaatataggcaaggcggctgcggattcccgccagatcccccccgtaaaactccttccaggtcggatcctcctggcatgcccactcgcggcaggaatgacgcttttcttccggattttttctgcagaaacgatccgggaaaatctgataccacacgatattctccgcccattccggcaccttcataatgtccgcccggttcatccacggatagataaaacgctggatcatccggtccgccggaaaatgttctgcgttttttgcaaatccatcctcaaacaggcagacactctccccgccgccggtgatctcaaaatggtacttgaccctgcggtacgccggtgtaaggacggcactgtatacatttctgtgtgccagttcccgctccagttccatcggcacccgctctccctgccagttctgctcgttctcggcaatcccggcggaatacgggtcgcccgcccagaggatcacctcgtccacatcttttcctgtctgaatacttatttttaaatgtctttcatcaagcggatagcagtctaaaaaatacgcccgatgtgtaatttctgccagattcatagttttccccctgtacaaatttgctgcagatctcctgtcagctgctccgggaactccggatttctattctacgcacagtatatctctgcgaggggaatttttctcacactatcaatcgcgtaacctgtacaaaacaatcattttttctttcacttctatcacagcatccggccggaaagcagttcgcttccctcttcgtaatccaggttctcatatgccgcatgcagttctgtcaacagttcccgttcctccgctgtcagatgggcacgcgcaaaccgggaaagtccctgctcaatcccgtttaaatcacacgcatcaaaagcttccctaagctgcgccagaatctgctgtttttcctccggtatgtcctctgccgtggctgcgccttccccctgtatctcctgcggcagattctttaattcatcctcgacactctctaacgtgtgccggatcgtctccaaaaactctgtcatatgcttttccaggtaccggatattttctgtctttgccgccatttccatgatttctgcgctctcgcttaacgcctgtctgccgatctgctggctggcgcccttgattccgtgcactttcgttccgaaaagctccagctgctccggcacatagcccggcagttctgctgcaagcgatcccgtctcctgcaaaaacgtctgcaagagacggcggtatgccccatggttcatctgcgcgtgaagcaggaaatccctgcgctctgcgacaggcagataagtctcaatcactttctttagctctgacacatcgatcggcttgtccaaatacgccgtaaattccggtctgcgattccgatgctttaactccgcggtaatatcagcagtcataagtaccattgggatatcgcaaaacttgcggatctccttcgccgcttcatcgccatttttttccggcatcctctgatccagaaaaatcagctgatactccttccgcgctgccgcctccacagcctcctttccgttgcgcacaacatccagtgtaaaccgccacggcgctgcgagttcctggaaaatctcctgattgatccgcatatcatccgcgagcagaacatgtgcccccggatagatccatgtcggctggatccgctccgtatagaccactgactcgcgcagcagactgtccgtcgtatagcacaccgcatcatgcagggtgcttccgcacaccttctgccggatttccacggtaatcgtggttcccctggtgccgttgctctcggcgcggacactgcctcccatacggtttgcaagttcctttacaatgctaagtcccagtccgtttcccgactgtccgctctctgccgcatagctcacatacgaatcaaatccctgccgcagctgttcgcttgtcattccggtgccggtgtccgacaccctgcagcggaccatcacatccgaggaatcccggattgcctcacaggtaatcacacagcggatctcgccctcctctgtgaacttgaccgcatttgcgagcagattctgcaaaatttcccggacgcgcatggcatccccatacattttctccgggaattctccctgtatacaggcctcaaaccacaccctcttcgactgcagattgatgacacacatgtgtgccacctcctcgagcacctgatccagccggtagcactccgccatcagctcgaactttcctgcctcaattctggaatagtcaagaatcgcattcacctgttccacaaggctgttcccagctcccttgatgtgaagcaggagtgcacggtcacttgccgtgagttccttgcggctgcttaaaatatccgtgattccgatgatggcgtgcagcgggcttttcaggtcatggctcatctgcgcgaggaaatcacttttccgcgccgtctgcatctctgcttttccctttaatgcctgcatcagctgcgtctcttttttcgggctggtaatatcccaggcaccgagaatatatccacgaagcctccctgaatagtacaccggcgtacactgacactgataatactgtccgttcttctcgatctcccggctcttttttccctcctgtatggacttcgccagctcctccgcctcctgcatgtatccgcggtgcctgcggctgtttctctcatacaactgcatcggacccgcaaacagacttctgccgctgcggttcgcatcaacgcagtaaaaattggtatccagcagtaccactgccgtatccgagtcatcgtacagccgctcgcgcagaagctcgcccgtatccatcagctgatccgtctggatcagataatgaaccgcaccgcagacaccggttgtagctgccagcatcagaagattgcccggaatagtaaaaaacttttccgcgcacatcgctgctgcattcacgagcagcacaatatagagcagattagcaatctgatgctcatgcatggtcagggaacggcgcagataggcgtaggttcccattgcaacgatcgccgccgtacatccgattaagtaaattctgaaataaatgtgatagatttccggctgccggtagcgcataaaaacaatcacattcagcgcgagcagcacacaaaacataatccactgcaccccgtaggggatatggattttcagaaaatccatgatatagataagaatcagataaagcacctgaattaagagcatgtccttcaaacgcccgaacagttctgtctgtccggtgagcgtaaggacaacctgatagaaattatatacaccgatcagtccgaccagcagcggcagcagcctgtgctgtctggaatatgcaccggaagtggcatattcctgcagtacatacagcgtataacaaagacatattatctgaaccaataatatcattcaatctcactccgccccatcagaatcctcttaatctctgtcttgacaaagaccggcttgtacggtcttacaatgtaacctgccgcatccagattccggcacagcgtgaccgtctgtctgtcgcaaagcgccgtgacgaacaggatcggcaccgtgtgatccgtcatctccataatgcgtttggccgtctcgatgccgtccatctccggcatatcgatatccatcagcaccagatccggcgccggatgttttttcaaatacagcaatgcctggtgaccggatttcatcaggatgacatcatataacggctctaaaatgccacgcagcatctgcagattcgtcttcatatcgtccacaaccatgatccggcagcgtaccggcgggcgtatcatctcgttgcgctccttttctgcctcttccgtggagaagccggattccgtcttcatacgcaatgtaatatggtagttcgcttcgttggacagatccaacagttccccgtccatcagacgcactacgggtcttaaattatgtacgccaaaattctcatagatgatggcttctcttccatcggaaagcgtaaccatcgttcccttcggatagagcggcacatactttagaagtgtctccactacctcgcggtcaaacatgatgccgcagccgcccatcagatactctgtcgcctcgtacggtgcgtatggctccttgtacgggcgcctggacgtaagtgcatcatagacatccgccacgtgcagaatcctggtaaatatcgtctgctgcgcgccttccagcccgtccgggtatccgcttccgtccacattttcatggtgatgcagcacggcctccttgatatgcgcagaaatatcccaccgctcactgataatctggtacgacagtgttgcgtgggatttcataatcagatattcttcctgtgtcagacgtcccggcttgtttaagatctcatccgggatctgcagctttccgaggtcatgaagcaatgccgcagtcacaagatgccccagctccacttcactcatccccatacccattccaatgacgccgcagtataccgccacgttcacagaatgtgcgtaagtgtaatcgtcgtagcttcttaagtccgtaagatcaagagacacatttccgcaggataaaatctcctccaccatgcgtctggcaatcaacttacatccgtcaatgtcgcaggcacggatgcgctcctgtccctcctgccttaactgcggcgtaatcacactctcaatcgtgatgccctctgaaagtttatcttctatatatataccgtcgaatccgtaagcttccagtttttccagatagctctccgtcaattcgcaatggcagccaatcaacgttcttccgacggaatcataaaggtcggctgcaagaaccatgcccggttctgcctccctgagtggtacataacgcataacattcctcctacctttcactgtaccaagccgacctcataaagtcaatgaaacttttgaccttattttctaggattcgacagaaaccacctcgtaatcctgatcctcaaccgccttctttaagacctcatccgccacgtcgctgctaagcgtcacaaccgcgtttcctgcctcgtggctgactacagcctcctgcacgccttctaccgcttcgagtgctttcttgactctcgcctcacagtgtccacacatcataccgttaatcttcattgtctttttcattgtctcattctcctttttttgatttgtttctgatttcttctccaaagcgtcatccggctccttcgccgcagctgcggcggtctgccctgtcaccgcatttttgatcctgcggtcttttccgacgtcatacatccggaacagattcaggcgcagcgcgttggtcacaacacagaagctggataagctcatggctgccgcaccgaacatcgggtttaactgccagccgaacagcggaatccacacgcctgccgcaagaggaatgccgataatattgtagaaaaatgcccagaacagattttcatgaatattgcgcagggttgcgcggctcaagcggattgccgcaggcacatccgacaggcggctcttcatcagcacgacatccgcggcatcaatggcaatatccgttccggcgccgatcgccattccgatatccgcccttgtaagcgccggcgcgtcattgattccatcgccgaccatgaccactttgccctttttctgcagttctcttaccacctgctccttgccgtccggaagcacgccggcgatcacctcgtccacgcctgccgcttttccgatcgcctgcgccgtccgcttattgtcgccggtcagcatcaccacatagattcccatgttctgcagttctgccaccgcacgcgggctgtcctccttgatgacatccgccacggcgattacgccaagcagcttctcatcctttgcaaaaaacagcggcgtcttgccctgcatggcgagctgctctgcctgccgcttcgcggcatcggacaccttcacgtgttgctcgataaaagtgagattgccgccgtaaagccggcttccatcccgcacaccggtcagaccattgcccggcagcgccatgaaatcggtcagcatatctgagccgtcctctccgccggatgctccgtctgccacagacgccctcttcccgccggactgctcctttgccccggactgctccttcacataggcaagaaccgcttttgcaagcggatgctcactcttctgctccagaatccctgccgcatgcagcagctcctccgccggaacgccttccgccggaaggacatccgtaactcgcggctctccgctcgtgatggttccggtcttatcgagcgctacaatctgcatttttccggtctcctccagagagactgccgtcttgaacataataccgttcttagcacccatgccgtttccgaccatgatggctaccggagtggcaagtccgagcgcacacgggcagctgatgaccagaacagagatcgctctcgccagcgcaaagccgaccggctttccggcaagcagccacacaatcagtgtcacgatcgcaattccaatgaccgtcggtacaaatacgccggagactttgtcggcaatcttggcaatcggcgccttggtcgccgcggcatcgctgaccatctggatgatctgggataaggttgtatcctcgccgactctcatcgcctcgcattttaaaaagccggactggttcacggtcgccgcggagacttcatctcctggcgccttgtccaccggtatgctctcgccggtcagcgccgcctcattcacggcactgctgccctcgaggatgataccgtccacgggtatgttctcccccgggcgcaccacgaagacgtctccctttttgacctgcgcgaccggaacctcctgttccacaccgtcacgcacgatggtggcagtcttcggtgccaggctcatcaggctcttgagcgcatcggtcgtcttgccttttgaacgcgcctccagcatttttccgaccgtgatcagcgtcaaaatcatcgccgccgattcaaagtagaactcgtgcatgtagctcatgaccccgtccatatcgccgcgcacctgtgcatcggtcattgcaaagagcgcgtaggtactgtagccgaacgctgccgttgcccccagcgctaccagtgtgtccatattcggcgcccggtgccagagactcttgaatccgctgataaagaacttctggttgatgaccatgatcaccaccgtcagcaagagctgtaccagccccatcgccacatggtttccttcaaagaacgccggcagcggccatccccacatcatatgtcccatggaaaaatacatcagcactgccagaaagcctaccgaagtcaccagtctcttttttaaaagaggcgtctcccggtcctttaacatctcttcctgcggcatcgccttcgccgctcccgcggtttccgcgccgccccgcttcttctcggcagcgccgtatccggcgtcctcaaccgcccggatgatctcctgcggcgccgcggttccctcgacacccatggaattcgtcagaagactcaccgagcaggatgtcacacccggcaccttcgacactgctttttccacgcgcgcgctgcacgccgcacagctcattcccgtcactgtatattgcttcatcttcctccctctcccatctatttcatcaatttctggagcaccgtcaccagttcgtcgacagtctcctccctgccctcgcggatatcattcgtcacgcaggtcttgatatggttggcgagaagcaccttgttaaaactgttgagcgccgcattcacagccgccacctgcaccagaatatccgtacagtaagcatcccgctccaccattcccttaatcccgcgaatctgtccctcgatgcggtttaagcggtgaatcatatccttgtattctttctctgaccgttcctttgtcttatgggaacagcagcattccttttcctctgccatacgctttgccctctttcttactatttacccgcaagtctgtttctattcctcatttgcaggctcattatatacccccttagggtatattgcaagtgttttattgtgttatttttctcatcaaaaaaatcccggcctgtccaaccggaccagccaggatcttttgggaatctgccgtcatacggcagtctcttttatttatccgcaaaccctctccagaatctctgtaagtgcacttccgctgctggtatggcttctcaccacatccgcattgcagcgctccgcctctgccaccgcacaccgtaccatcttatgtgatacggtgttggtgaagagaatgatcagatccggtgatccgatctggttcccgagctttgccggcatctgtgtaaataccttcgctttacagttatgttccttacagatctttttgtactggcagaccatgcggtcatgtccgcctacaatcacaacactcatgactacaccgccgcaagctgcctgccgagatcggtgcaggcagccacagcctcatcgtccggtgcctccttacagatcacgccttcgccgttcaatacattcgcgcctgcggatgacatgcggtctacccagtcacgcatccactgtccgtcgccccagccataggaaccgaacagaccgatggtcttgcctgccgcaaatccttccacctcggttacgaaaggctccatctcgccctcctcaagaacctcagcacccattgccgggcatccgagtgcaaatgcctttgcgttctttaactccgctgtagagacgctgcttacatctaccactgcggcttccttacctgctgctgtgattccggcgccgactgcctctgccatcgcctgtgtatttcctgactgtgaccagtatactacataaatcttatccaacacttttccctcctgctatatctctgtattctgctacgtaagttagtcttaactaactttagctatactatactaaataagaagggtttcgtcaagtgcagtaaatgaaatatttttctcattagaaaactgctattccacttcatccgcgaacttcgtcaggtagcgctgattctcctcaaattcgcaggtactcgcattgtcaagcaccctgcgcccgtacaaaacgcgctttttctccacagggatcggcagtgtcgccgtgccgttctccgtctcataggagacttcgtcaatccccgtctcgccaagtgcccgatatgcaccatacagcgtgtgatccctgtatccgttcaccatctcccagtagagagcatacttgtcactggttagtccatacaaatccaacgtattatatagtccactgtaattacgttctatatactcccgctcacaccagtccagatgataggcatcgccggaatattttccctcatccacagcggtagcaatcagcgcccacagaaccgagaacacgaaaaacagcgcaatcacacatccggctgccttgactgccagcgttgacatatttacctcgtagtttccagtctcatccgaaaatttccagagtatttttatatttttaatcttcctcataatcccagccttttctctcaaagatccggcgtatcagttcgtccatctcctccgagtcgcgctccatccccatcagatccgccagttcctcctccgtcatttccagagtgccaagcagtgctgctgccacgtcctgtttcatgtcattgtaatattccttgttttcttcatattccagcttgcggtaggaatcccccgtctctctttccaggatattctttcccgcccagagtacatactttacatcgttcggactgatctgctgcccgaccggccagtccagcacctgctggatctgaaacaggtctctcaaaaaggcgtgataatcatcatacagccggacgcgctctgtatattttttaaacccctcctgtccatatacctggtgggatttcagataatcgtaaagaccagtataatcttccgccacaagcagttcttctgcctcctgcacagatgcctggttgtgctggcgggtaatgtgaatcccctccagcccaaacacaatcgccagcaccagaaatgtaagcgctgtcactgccgtaatcaccagcagaatcacattcatcaccttatctgcaacatacagcggcatggaatggatgatctttgctttggcgagcagtgcctcctttctcgccagattttcctcgtttctccacttttctccaagcgggtttggctccccgcagtagggacatttcagttctttcgccggataatcatatccgcattttttacatatcatcttcgcacacgccctcgcttttattccgtaagatgggaaaatgcccgctcctgcatcatccgctccagattgctctgattatctttgtctgatggatcatacccgtccatcacttgctttatctcttcctctgtcaattcataatgctcatttaaatacgcagagcaatactcccggtaataagcgactgcctcctgttcttcatatttataatcagctgcttcacttttctggcagacaataagtgcatctatgatatagctcacatcgctcagtccagttggttttttctcacggataattctctccagatactctccctcaggtgttatcagataatcctttgtatcgttttccagtgtctctatcagccggtacttgcgaaatacttcaccatacaatgtattgtgctttttcatataagtacagattccgctgtagtcctgctgctgatacatcttctccagcttttcgagtactgcctgctctctgttatccgaagcaaccgtatgaatacgcatggccacatatataccggcactaatcaaaagtcccgccacaatcacagtaatcagaaccttcgccgccatagacatccctgctttcgccacccgctggggcttctcctcccactgctgcttctctctttttaagtcattgatcgtatcctcgtgcacctgcacagatttttcaaagttgtcgccaccacagtacggacagcgcggtgcatcgtctgcatatgacgcaccgcagttattacatacaatcatcctttctccctccggtgtctcacagaactcctcttcaagtaacaccctgtattgctctttgtctattatatcagttttttgctgtataggaagcattttcctatgagccgaaaaagaggggcagtcgcttgaaacgggcagccccttttgacgtgagaagaaataggaaaagaagcacatcctaccgatttctgatggaaatgcagatggaatattcgtttgagaaaaatgtgagcatttcttccggctgaatgtttgcatcggattccgtgtctcttccacgtttggacaatccgacgggggcatgtccgacacaccggagacaatgggcggactttctggtgtccctaatggcacctcttcacagacgatataaaaccgcgcgaaccgaaactcgttgccatctgctattgaaaatagggcagatggcaactcagacatcggtttcgcgcggttatgttttattcgacataaaggtggcatttatgccacctgttgtctggtgccaataagggacacacacaaaagtcctacaaattgtcttccgggatgcggacatgacccgcggagtgcccaaacttggaaagacacggatcatcgaagatgcaaacattcggctggttagaaattccacattttttgaaccgaatttccatctgcattttcatctgaaatcccacggtgtgatcttctgataatattacttatcgcccaaaagctctatgcttattgcggcaattcccttctctaacgctttgttatctattctgcttcgcagcatgcaagcagatctaagatttcctctctcgtctgcagtccgatcgcttttttcttaaaaatgccgtactgcatcacaacgagcatcggaatgctcatcacctgatactttaacgcaagcgccgcctgctcgtccacattgacgcttccgaacttcacctttccggcaagctcctcggacagcgcctcaaataccggcgactgcattttacacggtccgcaccactctgcccagaaatccagaatgaccggcacccttgccgccagcacctcgtcctcaaaattttcatttgtaatcgtaacaactgccatattctgcttcctttctgtgcattccgccggcactgttttctgccggcagctgctctgacacacgctctattccctgccgaactccgagagtaccagaccttcgttccggtctaataccatgccgacactccatgcattgacaaacagtaacagcggtctgcccttcagatcctgaatcttcttcatatccgaggttccgaccagcttatccatatcgatgtcctcattctcaatccaccggatatgctcatacggaagcgtatccatgcggatttccacattgtactcattctcgaggcggtatttcaacacatcgaactgcagtacaccgaccacgccgacgatgacctcctccattcccatattgtactcctggaaaatctggatcgcaccttcctgcgcaatctgctgcatacccttcatgaactgcttgcgcttcatcgtatccacctgccgcactctcgcaaaatgctccggtgcgaacgtcgggattccctcgaatttgaacggcttcgccgtggtgagtgtatctccgatggaaaaaatacccggatcaaacacaccgatgatgtctcccgcatacgcctcgtccacgatatgacgctcctgcgccatcatctgctgcggctgcgaaagcttgatctttttattgccgccctgcacgtgtgtcacttccatgccggcggtaaacttgcccgagcagatgcgcataaacgcaattcggtcacggtgtgccttgttcatgtttgcctgaatcttgaatacaaacgcagagaaattctcaccaaacggatcaacttctccgatatccgccttgcgcggcagcggcgagtaagtcatctttaagaaatgctgcaaaaaggtctccacaccgaaattcgtcaatgccgaaccaaaaaataccggggaaagttctcccttcgtcacgagttcctgatcaaactccgcgctcgctccgtccagaagctcgatctcctccatcagcttatcatacgcatcctgtccaatctctgcaatcagcgccggatcgtccacggaaatatgcttctccgtaccttccttggttccctttaatgtatcggaaaacgtcataatctctcttgtgttgcggtcatagacccccttaaaattcttaccggaaccgatcggccagttgatcgggcaggtcgcaatgccaagctccttctcgatctcatcaagaagatcaaacgtgtcgttcgcatcgcggtccatcttgttgatgaatgtaaaaatcggaatatggcgcatcacacagaccttgaacagctttctggtctgcgcctcgacacccttggaaccgtcgattaccatgacggcagaatccgccgccatcaaggtacggtaagtatcctccgagaagtcctgatgtcccggtgtatcaaggatgttgatgcagtaacccccgtaattgaactgcagtaccgatgacgtgacggaaatacctctctccttctcaatctccatccagtcggacactgcatgacgcgccgtcgcttttcccttgacggaacccgccagattgattgctcctccatagagcaggaacttctccgtcagcgtcgtcttaccggcatccgggtgggaaataattgcaaacgtacgtctcttttcaatctcttttcttaaatcagccaaactatctatcctccaaaaaacaaatcacttcaaaaatgccaacgcagcaaagccgaaactttgcatacgttggcactataacataatttcatgaaaaatgcaaaaacttctcttccgaagatctgtactatttcttaaataccggaatcgcctcgcccgcgcactccggggtcagatcaaagtaggacagaatcgtcgctgcaatgtcggaaaagctctttcttgttccgaaattctcccctgcccgcaccggtgctccgtacatcacaagcggcgtatactctctggaatgatccgtggacggtgtactcggatcgcagccgtgatctgccgtaatcatcaacacgtcctcctcacccatcgctgctaaaagctccggcaggcgctcatcgaagtacgtcagtgcttttgcgtagccttcgacatcattgcggtgtccgtagagcatgtcataatccaccagattcgtaaagcacagtccgttaaactccttcttcatataatcaagcgtcttgttgataccgtcctcatttccggtcgtgcggacatactctgtgatgcccttctccgcgaaaatatcgatgatcttgccgacagaaagcacgtcaaagccggctcccgagagctggtctaacatcgtcactttcggcggctgcaaggaaaaatcatgtctgcgggtcgtgcgggtaaagttccccggcgttccggtgaacggtctcgcgatcacacggccgacgccgtgctctccgcgcagcatatctcgcgcgatctggcagtattcatacagcttctccaccggaacgatatcctcatgtgcagccacctgaaacacagaatccgctgatgtatacacgatcagatcgccggtcttaagatgctcctccccgtagtcgcggatgacgtccgtaccggaatacggcttgttgcagagcacgccccttcctgtcttttgggaaaattcctcaataatctcctgcgggaaaccattcgggtaggtcggcagcggcttgggtgagatgacgcctgcaatctcccagtggccgatcgttgtatcttttccctttgacacctccgtcatgcgggcaaccgctccggcaggagttgtctccttttctccgatctccacgccgtcgatattaaaaaagccaagctttctcatgttcggcatagaaaaataagggctcatggacgcggctttgatggtgttgcttcccgcatccccgtaatctgcagcatccggcatctcgccgatccccacgctgtccaatacaatcaaaaatactctcttcatcctatctatctcccttcctcaaaaactgcatgatcacatcatagttctccgcctgatgtggaaacgtgcatttcatgcaggacttgatctgtacttctcttccgtcctcccgtctgctcttaatatactccggattccccgggcaatgacgtctctcatagagcggacaatagcagaacaggcagttcatctcctcaatgccctcatggcacggataatactgacattcccggttggaaaaaaagcgatatgaattctctgtcattataccacctcctcatcgtctttgacaataagcgtcgtaagatagcttccgctctccccaagcgcctccactcccaggcggatccgctcatccgccattccgcagttctccacacagtagacggacatttttttctccttctgctgttcttccaacagcgcttttaaatgcgcgagactttttccggatttcatgtacacccgggtgccggaaagcgccatcgtctcctccatctcgtacgatcccggaatcacatggatctcatcccggttatccccgagcgatattccaagactcgccgcagccgcgcaaaaggacggcacgccgcttatcattttaacattcccgccccacgccgcgaccctgcggtggatataaccgtatgtggaatagacggacggatctccgatcgttaaaaatgccacaatctttccttcggtaagataagaaacaatccgcgcaaaaatctcctcgtgtgccctgcgcagcttttctttctcctttgtcatcggaaacggcaggcagacaagttcctttttctcaatcccggggtacgcctgccttgcgatctgatacgcatgacatcccgccgcatccgccgccggaagcacgataagatcgctctcctccatgcagcggagcgcctttacggtcaccagctccggatcgccgggacccacgccgatcccgtagagggttcccatgcagtgccgcagatgtctaaaatagcactctctcaccggctcatactctccaatcccctttaacaggcagaccggttcatatcccgcctcgcggagtgcggcagcaaaggaatcctcctctcctgccatatcatgattggcatgatctcccgcaaccagcataaacggcgccacaagcacacgtccgctcttatgccttgaggccctcatcctcccgatcacatcgtcaatcgtaacgcttccctccacggtcgccacatagacgtcgttctctgtcacctgtgcaagcacacattccagacgctcgtagctctcatccgccgcatgctcacttccatgacccataaaaatcaccggcgaagatcccgcctccgccgccaccgattcccagagagcctccgccgttctctgataatcctccggtgtcttaagcagcgcatccgcaatccgaacgtcctcaaaccacggtgcacagtctgttacctcctgcttcatccggtggttctcaatcccgtcaatgatgtgggtcggaaatacgatcacacgccgcaccccggcatcgcgcatccggcaaagcgcctgcctcacatcatctttcgtgatgccgtcccgctctcttaacacattcctcacagtgctgctggaatacgcctcctccaccagatcatgtggatactgctctctgacaagcgccaccatctgatcgatattcttttctcttgtctcctgataagtcgttccaaagctcacgaccaatatgccacgctccatcgcgcacctctctttctctgccgccggtacacatgccctccccgatgcattcaccgttccggcacacctgctgtctccaattcacacgccatccccgatttcagattccttccaaatgatacagtgcctctacaggaatcagctttccaagtgtttttgcatactcgcacagtgcacggttcgcttcgttgtaaggcccaaaggtttccgcacagcagatgcacgtctcacacgtctttatccacgacctcgcctccgcaatctcctcctctgtgaccgggaaaaacggcttcacggaaaccacccggcttgccgcggcacacgcatcctgatattccacatcattttccatcagaattcccgccgcaaacggcacatttttccgctgtaaggcatgatagaccggtatgccgctgccagccccaccgatcacaaagagctttggccggcttttatttccacgcagatacacggcgcctgtccgcggatcaaaacactctgcatccaccccgtataatttttgaatataatcgcctgaaaatacttcctcaggcgtcccggtttttccgatgtggtctccctccacacaggcgatcacatccgatacctttaacgccagatccagttcgtggagcgacatgacaaccgccatatttctttctgccgcgagtcttcggatactggataaaatgtcgatcttgtagcgcatgtccaggtaggaagtcggttcgtccagaatcagaatccgcggctcctggcagatggcgcgcgctagcatcacccgctgtctctgtccgtcgctgatctgtgaaaaattccggtccgcggtgtccctggcatgcaccagctgcatggcgtcatccacaagcttccagtcttctgcggagagaatcccgagccttccggtatacggatacctgccggtcgcaaccacctcgcggcaggtcataaactccggatgaagccgttccgtcatcaccatcgcaagcgtccgcgcgacttcctcttcccgcatccggctcatggctgtcccctccagaaagatcgttcctccaagctctgcaagctgtctggtcacggtttttaatatcgtggatttgcctgcaccgttcggtccgatcagcgtcaggacgtttccgggacttacatgcagcgaaatatggttaagcagagcttttctgccgtaccctgccgccacatcctcaagcctgattccagactcttttttcctctgttccatcacacgttcctccgttacctgtcctcattcctgcgcagcatcatcacaatcactaccggcaccagaaatacggctgtcaccgaactgatcgaaagctccgtcggagcaaacaccgtcctcgcaaagccgtcgcaaaacagcgtgataattgccccgcccagaaaacagcccggtatcagcaaaagcggtttcgccgtcttcatcgccgtcttcaccagatgcggaaccgcaattcccacaaaggagatcggtccggcaaaggccgtcacgcaggcagacagcagactcgacagcagaatcagcaatacgcgaagcagacggatcttaacgcccatgtttctcgcatacgcctcgcccatctgatacgcaccgatcggttttgccagaaaaaaggtcactcccatcgtgactgccaccaccgctgtcatcatccgcacattcgaccaggtcattccggagagactgcccatcgaccagttgtgaaggttcacaatgttggagtcatccgcaaacgtcacgcagaaatccgtgattgccgaacagatatagccgatcataatgccgcataccacaagcatggacattttttttacccggcaggaaattaagagcacgaaccccatcgcaagcatcgatccggcaaacgccgccacaatcatgccgagcgaactgatcgccctgcccatttccaaaagggcaatcatcgtcagcgcaaccacaagcttcgccccggatgagatgccaagcacataaggtcccgcaatcggattctgaaaaaatgactgcagcagaaatcccgcaacagagagcgctccccccagaataactgccgcacagatccggggcaggcggatctcccagacaatctgccgcgccgtctcatccgccgtgcctccaaagcggtgcagcagaatgtccgcaatctcacttcccgtcatcttgacacttccggaaccgatattaaagaaaaacaacccgccaagcagcaggatcatcgcgccaaaggctatcacataccgtttcattcttacctcacgtgttttaaaaaccgataattatcatctgtctcatccacaagcaccttgtgcagatcctcaatgaaatcacaggttcccgtggattcctgaaagaaattgcttccggtacaatatacatttccctcttttaccgccttaaaatcagaaaacagcgtgctttttgccagaagttcatcgacactgtaaagctccccctcgatcgtactgttgtagatgaggatgtcggcgtccttcgctgccgcataaaaatcctccatctgcatgttcatcgtggacagggcattctcctccgccgaaagacggtcgtttaggacgtaggtgccgccggcgagtccgatcatctgcgcaatatagtcattcggcttgcggacattgaccgctccgttcgccgtgatataaaaaaaggccaccgtgcggcctgtatcttccttttccatgattggttctattttttttagctgttcttcataaaatgcatcggcttcctgttcttttccatacaaaagaccatataaccggatccactccagtcttccgagcggatgttcttcatagctggaacgttccaccatgaccggtatgccaaggctctccagcttttcttttacctccggattatgtccgatcatcgtattctccagtgcaaagttgcacccttcctttaaaatcagttcatagtccggttcattgtattttccagcatacagcatacggccgtcttccattgcagccgcagctttctctatataccagtccgactcctttactcctgtaagccggatgtcagaaagcgctccgatctcacggatcatatccatcaccgatgaggataccagatacgtgtgatccagcggctgttttaacacaaccacatcctccggcacatgttccggtaccggaacattctccggcaccagcaaaaaacggctgtcatcagccattgtaatcagatcatactccccgtattgttccacacgatactgcgtggcataagagagatcccactgccccgtcttcgtcagttccgaaaagtccgtctcttttaacgcaaatgacagtgtgtactcaatctcatgcggcatgctcatcgccgtcgtatccgcaatcaccgagatctcacatggcagcttttcaatcggaatcgtaaacgtcgagttctctcctgcctctgcctcgttgtagcaggtctcatcctctaccatcatgtaatcataatacgggctgctccacacgatggtggcatatattttgccgtccttcaccgtaatcgccgccggtgagtccaccgtcgccctgccgctgccgccggtgagcgtaacgtccgcctgataggttccgtccgccagtttttcgctctgcggcgtgtggcacgctgtgaggaaacagatcacagacagcaggcatacgatcagttctgttactttcttcttcatctcttactccgcaaccgggtcggatacactcaccttgtgatcgtaccacacacccttggttccaataattgccagatcaaattcctgatccagtgcttccaccggaatatcgaatccgtacacttcctcggatgttccgtcactgtaggttacggtatccttcgtcggctcaagcagcttggctccgctcttctgcgcgtcctcggcggttcccggatacagatttacgatactctgtgacacaagacttacgtgaatggtcatcttgccatccttgacggtaagtgtgccgcgtccggcacatgcctcattgacatggaacatactgctgtcagtgtcgaagacggcactgtacgtgccgtcctccagatctcctgctgtggttgctgctgctacagtatctacgctgccgagcgaatcgatcgcatcctgtgtatgggatacatacagctgctcgatcgtatcgattcttcccagacctgcaatctggcatgtgacgctctcaaacgctccgtctgcctcaaacatgctcttccaggaatcatcatcatcccctgccatatcgttgttggcatgatctcctgccactaccatgagcggtcttaataccactttcgtgtaaccggcttccttgactgcctcgatcactgcctcacatgcagtctcttccggctccccttctacggtgccgatgaagacattcgcgtagtttaagtccttcatcacacttgccatctggctgtagcttaccttcgcagtatgagcggttccatgtcccatgaatacgaatgcggtaccatcctctgctgccgcatccagggagtcataacctgcctctgcaactgcctctgccgtgatcgcctttgcaacggcttccttatcgtcattgatcacggttgcatctgtgccaacctcaccgaggagcggttctgcaactgcaacggatgtaaactgatcgcggtacttctccaccgcttccatcagctcgtcatactctgcgccatgcatcagatgtgtcggctgaatcacaagattcttcaccccatttgccaccgcgcggtctaacgcctggtctacattgtcgatcttctcatcgtctctcgcctgtacatgattgatgataatctgtgcggtaaacgctcttcttaccgaccagtccggataagcctccgcgattgctttttccacgcctccgatatcctcagtacggctgtcattgaaagatgttccgaaacttacgacaaggatctcattctcaccgatctcatcctcatttaacggatcgtccttggaagcgtctccggtatctcttccgaaataatccggatctgcgttctcaccttcgacaagttccttctgtgcgtcagtcaatgcatcccatgccgcctttgcctctgcacactgcgcatcggtctcatccgtgcgctcctgcacgtagattgcatcgatcagcgcagcaacatgatctgccgcatcctgatcggatactgtctctgtcccggtctccgcaacagcctctgtctgtgctgtctgcacgttctcctctgtggttgtctctgtcttactgccgcatccaccgatcatgccagctgcaagtgtcaggcttagtaagagtgccagtgtcttttttttcataattcctcctgctgatgattgtatattttccataaaacaacagaaagaaactccgctctatgaaacatagaaacggagcagctgatcaacacacaaaagtacgaccaattactcgtgatccggaatctcttcctgtactatcataactggcaggtttcctggctgatagatcctcatgcagctacttaccttcccggcgcatgcgcgccagtggcgtaaagctttcgtatctgcactccctaatcacagtgacgagatcgtacaggattcccacctgtttcccttttaaccggtacaaaggctcatctgtacatcttctgcacatacctttgcaccggcaccagttacttttttatgaaattaaaaacatattaccattgcatgtttattttttcaagtagattctgtccgccgcctttttcaggaaacggtacgcgtattccggattggagtaataatatagatgcgggaatcccatccattgcgacggactctcatgaacgcactcccacgatcttccgtttaccggctttttggccaccgcacccacgccgttgtccgtgctgtcataatagtgaaactcatgccccgcaatctgtgcgcccgccggaaggaagttctcctccttttccgtaagcatcacatagccgaagcgcaccagtttcccggtatttatagccgacgccggaatcactcccgccatcggatagcacactccctcatcgtcacagagcgtctcatgcagatagaggaatccgccacactccgcgatcgtcggcagaccgtccgccaccgcgtcgtgcaccgcttttcgcattgggatgtttttcgacagcgcttttgcatgcagttccggatatccgccgcctaagatcagtcctgcaatcccctccggcaggctctcatcctgtaacggagagaacggcaccagctcggctcccgcctcccgcagtagctgcagattgtcctcatagtaaaaaccaaacgccgcgtctcttgcaattccgattcttacatccgcaatcttttttttcggcaccggatctgtctccagcgcttctgcggatgcggcaatcgcaagaagcttcccgcagtcaagcgtttttccgagcgtatccgccaccgtctgaatctgctttttcacatccgcaatctcttcgggcatcacaagtcctaaatgtctgctgtcccagtgcagttcctttaacttcggcagacaccccagcactggcagcgacagctcgcgctctatttcgggacggattgtctcacagaatgtcaccgatgtctgatttaagatcacgccccggatcagatgatgccggtcatagtccagaaagccccttatgaccggcagaatggaacgccccattccatgtgcgttcaccaccagaatcacaggcgtcttcgtcacctctgccagatggtaggacgatccctccttgcggattccaccgaggccgtcgtaaagtcccatcacgccctccatcaccgcaaggtctgcgccctctgccgcgcgcgcaaaaaggcttttcgtcagtctctccccagtgaaaaaagtgtccagattccgggaagggacgccgagcaccgtccgatggaacatcggatcgatatagtccggcccgcacttgatggcactgacgctttttccttcctgtgaaaaaagcatcatcagcgcacaggaaagaagcgtcttgccgctcccgcttcccgccgccgcaatcatgattctgggaatgttcatcttacctctcctcccgtctgtccggtttttgttcttccccctcgccgttctccgacagggaaaacgagatcacatagatcggattctccgcctgcatcagatgatgggaacctgctttttttgcgcggctgaccgcaatctgtgtgatctcttcctcacagatcaaaagctccttccacagtgccacaacctcggcgaccgtctcaagcgagacggcatttaagacaacgcgcacgttcggatttttctcccggagtgccagaagaatctcccgcagcctgccgccgcttccgccgatgaacgcgtgcgtcggcaccgggagttccccaagacattccggtgcctccccctttacgacaacaaggttcttcacgcctgcacgcgatgcattttccgcaatcagtccacaggcttcctctccatgttccacggcatacacccgcagctgttttgaccgcagcgccgcctccaccgcaatcgagccggttccgcttccaatatcataaaatacgctctgactctttaacccgagcctgcacagagacagccagcggatctcctccttcgtcatggggactcgtccacgcacgaaccagcggtcagggactcccggagcgagcgtctccccctgtgcccccggattttcaatcaggcaggcatagagtccatcgtcctttaacgtccggcacacttccggcgttccgtgccagatccgctcttccttgtaggaaagctggtatccgatggtaagctccaccccggacagtcccgccgcctcaagttcttccccgatgcggattagatcgcttctgcctgaaacaatcagaaatacattttcctcactgcgcacatacgctgtaacatccgcctctctcccgtgtgtgctgactatcttcgcgtcctgccagcttttacctgcgcgcgccgccagataggagagcgaggagattccaggacagatggtgatcccggcctgtaattttccaaggcgcacttcttcctgcaatgccttatacaccgcctctgcgccgctgtaaaatccggtatcaccggaaaataagatggcaatccgcccgatttttctttccctgcaggaataaatatacggaagaagatctgcgggaaggtacgcctcccgtttctctgcatccggcgcgatcagggtatccgccgcggcaagcagccgcttcgctccgcagaccgccttcgcctgcccaatcgcctcccttgcctctccggtgaacaactttgtgttccccatcccgattcccacaagagaaatctgcagcggctgacgcttcgtcccgctctttttcccgcagagcgtttcaatttcggacaggactttttccatgctcatcccgcccgcctgctccggattctgaatcatgaccaccgggattttcgtgtgctctgccgcgcggatcttctccggaaatccgcccgcctgtccgctctccttggtcaccagcacgccgatgtcatactgccggatcagcgcctcgttgagctccgttccaaaaggtccctgcatggcaatgatctgcttccccggaatctgttccctgtggcagatttcgatgctctccacccccggaagcacacgcacaaaaagtctctcacggatctcctcccgggcggcatatgcgtgcagttccttgctgcccgtcgtaagaagaatgttccccggcagcttagacagcagttctacacattcctgcgtgtccgccaccgtatgtatcatccactcgtgctctgcgatctcacgctccgctgccgtgctccggctgagccttaaatagggaagattggtcttttttgcgctctctttgatgtgctccgtcacctccaccgcgtagggatgcgtggcgtccaccactgcaagaaatgtaccggttcgcatgagttcttccatctccggttcgcccatccgcccttcccggatcacaagatgctcctgctgacgcatcacttccctgccgtactcggtcgccacactcgccatacagtcaatctgtctggcacagagtgcctccgccaattctcttccctccgttgtcccggaaaaaatcaatatttctgccatattctctccatttccagacctcttatccgcgctccttcgcacgcgccctggcgcctgccccgatctgatagccgcgctttgtgacaagcttatctcccataatgaccgactgtgagttgccgataaataccgtggtaaacatattcacctgaatctcacgaagttcctgcagggtgcaggtgtgtgccgtctccccgtctcttccgatgttttccacatagccgcaggcacgcgttcccttcgccccggcatccagcagaatatcacaggcgcgctgcagataatctgcgcgcttcctgctcgacggattgtagagcgctatcgcgaaatcccccagaacagctgcccgaagccgcgctttaatctgctcccacggagtcagaagatcgcttaagctgatcacgcagaagtcatggtttaacggcgcgccgagcactgccgcaccactgcttgccgcggtaatccccggtaccaccgtaagttcacaggacggatattctgcgctcatctcatacatgagtgacgccatcccgtagattcctgcgtccccgctacagatcagcgctacgcgctttcccttcttggcctcctcatagcacatcctgcatcgctccacttcctggcgcatcggagtcgacaaaaacgttttccccaaaaatcgttccccgagaagattcagatacaccgtatatcccacaattacgtcacaggaatccagcacggtgagcgcttcctgtgtcatatcttcctctctgcccggtcccattccgacaatatagatttcatgtttcatcaaaacttcacactccattttttctctgctatggcaagcgtcttgccctcacatgccgtcttttgcaccagaagtctgccgccctcccccgccgcgcagaccgccgcgcgctcacacacattatccacgccgacctgttgcgccacaaagccggatgacgtgaatgtaccgtccacacactgcaggcgcccggccggataagtgagaaaaggaaccgctaactgctctgccagtgccagaattcctacctcatccgcttttacatcgaccgacgcgattcccgccaccgccatgctggaaagcttctctttttccagggtctcccgcacaaacgcttccagttcctcttcgcttttgccccttctgcacccgacgccaagcagcaggcaggacggaatcagccataagctgcatcgttccccggcttcgcactgcggcgcgaccagcacatccaccggctcctttggcggatacggtaccagtcttacctccggcggaatctctccttcacattctccggcgacggacatggtaagatacccggcgcgcagaagcccggcggacacccgggcgattccgtcatgaccggcaacggcaagacggtttgacgctgcaaacacatccaccgcaaaaagcccgttcacatccgtcgccgtggtgagcacggcagtcgcaccgagggctcttgaaagttccccggcaagccggttggctcccccataatgacctgcaagaagcgggatcacaaactgccccgcctcatccgccacgagcaccggaacatcggaaagcttatcttttacatgcggtgcgatactcctgaccgcaatcccgcatgccccgataaacaggagcgcatttcccgccgcaaactgttttcctgtccattcggcaagtggctgatccacggaaatccctatcccctctgcccgggcgtcgctgcattttgtatataatttacaggaccatacggcatccatcgcttcctgaatgtgttctgccagttctgcccccctgtaagtaaagctgatgacagctatgtccgtcttcttcactttgtctctccctgttccttttttgccttccggtatcccgtggtaaacccgggatcatacagcttcgagcgctcataccccggcgctgccagcacatctcccaccagaatcagcgccgtcttcgtaatctgatgctccaccgccaccgcagcaagcgtctccaccgtgcacacgtacgcctcctcgtccggccaggtcgccttatagacgatcgctgccggcgtatccggcgcataccctccgtccatcagtcttttcgacagttcttttaccattcccgcacttaagtagactgccatggacgcctgatgtgcggcaaaactctcgatgctctcccgctccggcactgccgtgcgtcctgccatccgcgtgataatcaggctctgcgagatccccggcagcgtatactccagattcagatccgccgccgcgccaaagcatgcgctgacgccgggacagctctcataggaaatcccctctgctgcaagtacatccatctgttcacgcaccgccccgtagagactcggctccccggtgtgaagccgcacggtggtaagccctttttcctccgcctcccggatgaccgcaagcacttcctccaacgtcatttttgcgctgtcatagatctttgccccgcttccggcataagaaagaagctccggattcacgagcgatcccgcatagataatgacatccgcctgctccagcagtctcattccgcggaccgtgattaaatcctttgctcccggacccgccccgacaaaatataccataccgtttcctccttaaactgcgttactgcaaatgttcttcttcctcgcggattcgttccagaagttctaccgcaccgtcgcttctcgccagctcgccgtacccgttcgcatagagaatgcattccacacgcagttcctctttcacccgcttctttaaataaaaaagaatctttttcattaaaagttccatcgtcgcggaaagacatccgtcctgcgcaatgtaggcgagcgcctcctccgtcacaagacagtctaagatcttccccagcgtatcgggcgcacacccggcgcggtatgccgcagccatcagaagctccatgcgcgcgtccgcctccctggaatgtgtgtccataattccgccggagagctttaccagctttccgatgtgtccggtcagaagcaccgcctcaaatccgagctccaccgccatatccatcgtcttcccgataaaattgctgcacttgacgctgcggtccagatcgaacccgtaagcgcgcttcatatattccagaccgtaatttcccggtgagattgccgcaaaccggtgtccctcttcgcgcttctgcttaagctccacatagatcgtgtcaaggagcgcctgactgctcatgggctccacaatcccggtcgttccaaggattgagataccgcccacaataccgagtctcgggttgaacgtcttttgggcaagttcctctcccccctgcaccgaaatctccaccaaaaggctccccgcataatcggtaagcgcacacacttcttccacctcgcgggtaatcatctcccgcggcacatgattgatcgccgcgctcccgacgggctggtctaaccccggccttgtgacagttccgacacccgtgcctcccgtaataagaatctgcggttttccgcagtctttttcctgtttctgctcctgccaggatacttccgcaaaaatcagtgttcccgtcgtgatgtccggatcatctccgccatcttttctgacagcacagcgcacggaatgctccgtgcggctgatctcttccatcctggcatggtagagaatgccttttggcgtggtgatggtaatctcgtgcttttctctgccggtaagaagcatataagccgccgcctttgccgccgctgcggcgcagcttcccgtcgtaaatccatagcgcatgggctcacctcccaagctcgtagagaatcgcattgcagatggcagccgcgacattgctgccgccctttcttccacgatttacaatatgtggtatcttcgtctgtaaaatcagttccttcgccgcctccacattgacaaacccgaccggaacaccgatgatgaacgccgggcggtagccctcctctatcatcccgtatagctggattaaggctgtcggcgcatttccgatcgcaaagatgaccggtttttcgatctttgccgcccgttccatgctcacagtggcgcgggtaacgccccgctccttcgcctctcttgccacatcctcgtccgccataaagcagtgtaccgatccgccgtagcgtgcgagcacgcgcttgttgatgccggagagcgccatgttggtgtccgtcacaatgtccgcgccctctgtgatgagcctctttgccgtctccaccgctcccgtagagtaggtcatcgtctgcgcataggaaaaatcggcgctcgtgtgaatcacacgcttcgtgaccattgcttcctccacaggcagcgtaatcccccgaagctgcaattcttcctcgatgatggaaaagctgcgcttctctatctcctgcggcatcacatactcgattccgtcgggcactgctgccggctttttatcctctttgccgttttccaccacgctgcttcccgtcacctgcgccagcgccgcaagcaggcgttcattctcctcgcgccgtctgaccgcaatccggtaatatcccccggaaagtccccggtagttgctgcagtcgcggatcagaatccccttctttaagagctcttttgccagcagacgcccgtcctttatcatcaggaaattggcgtttgacgcaaacacagtgatgccaatttccgacagctgctccgtaagccaggcacgctccctgcagacaaatgccaccgagtgctccacatacgcgcgctgcccgcaggccacacatcccgcctgctgcgcaaacaccgacagattccactccggcagatcggctcttatcgcttccgtaagagcagcatcgctgcagacaagatagccgagccgcactcccggcatggcatagagcttcgtaaatgcccgcacgatcacaactcccggataattccgatacttttttaagaaggaatagcgttcttcctctccggtgaacgtcacaaaacattcgtccagaatcagggtcacaccgtgcctcttgcagcgctctgcaatcttctccaacagttccggctccaccaccgtacccaccggattattcgggactgccagaaaaaccgcatccacgtcctccccgatggcagtaagaaagcgctccgtcaccgcgtaaccgtccgcctcaagcagctcgtggcagcagatctctgctcccacagactttgttgcatactcgtatccgtaaaatgacggtacaggaagcagcaccttttttgcatgaaccgctcttaaaatggcaggaaacagttctgacgcaccgtttccgcacacaatatccgcaggcgcaatcccttttgccccggcgatggcatcccgcaatgcctccgaccggatatccggataccgctcacaccatgccactgccgcctcaagcgcctcacgcacccgctgcggcatcccgaacggattgatgttgaccgaaaaatcaagcgatacctgattacggtatatgtctcctccatgtatgttctgctgcaccatcccggttcttcctcctgttctgtctctatgctaccacacaatagctgtcacgcacaaccagacagccatacaaattccccatccgaaaaatgccatcccgtacagcaggcggttggcacgtctgatatcctctgtctccaccgctctgagcggatcaccgatgtacggctttttgacgatttttccaaaatagctggcatctcccgccagtcttatgccgagtgctcccgcacatgccgcctcggtctgtgcggagttcgggctggcatgctgataccggtccctcttaaagatcttcatcgcattcttctggtcaaattcgtttccaaggaaacagcaggataagatcatgagcatggcgctgatgcgcgccggaatgaaattgacaacatcgtccagcattgccgccgccgtgccaaatgcgtgataccggtcatttttatatcccaccatcgaatccatggtgttaaccgccttataaaaaaagcctcccaccggtccaaacagcgccagatagagcatcggcgcgatcactccgtcggaggcattctcagccacggtctcaatcgccgccttcgccacgccctcctcatccagacattccgtatctcttccgacgatcatggagactgcctttctcgccccacacagatcgtgctccgaaagccgcttgtacactttcatgctctccgtcttcaagcattttgtggcaagcatctggtaggtcatgacgctctctgcaataacccctgccgccgggtggatctgatacgccacaaaaaggacagctgccgcaaaaaagagtaccggaagaagcacgaacaccacaagccaccttccctttttcttctcggcggcttcatttcgcaccgcgccgtctgtctctccaagcagctttcgatccagccatccgatcaggcgcccgatccaccggatcggatgcggcagccagtacggatcgccgaacagcagatccatcacaaatccgattgcaaacgccgtcatatgatataccgagagcatgtcattcctccaactttctcacatccgcaatttttatcgtgtctcttaaagtatttcccgctgcatcaaattccacagacagtcgtcctttatatcctttcgcatttgcgcactggtaatcgtaataactgccctccgcaaaagcatccagaagcgccatgatcgttccgccgtgcacgatgagtgcaagcgacgccggaagcttctcccgcgtccacacttccttaagcagctcacaaaatccctccacacaccgcctctggaactgttctctgctctccccttgcggaaacggcagcgttccgttgctgtcgatccacgcctgatagcggacatccgctttcagttcctcatagttatgcccttcaaacgcgccaaaatccatctcccggaactgatcgaaaacgcatggcgcctgtccggggtacaacagctctgccgtctgtctgcagcgctccagcggacttgccgcaacgcatgctgccgccggataaacgccttttttctgcaatgtgagaagctgctctctgcctttttgtgaaagcggctcatccgttcttccgatatagcggtgctcttcattcccgggcgtcataccgtgacggatcagtgccatgtctgcctcatacctcatttgatccgctctccgatcccgcacacaatgcgctccacgcggtctgccttatttgccagttcacacagcagcctgccggtcagctcccggtactcgcgctcctcatgctccatcggcacaatcccgttgccgatctcatcactgatgatgatgcagtccgggtgttccaaaagaagctgtccggtcagcgctcttacatccgctccatccttaagcagcctcttcacccaaagatgatagtggttgcagaccggcgcctccttcgatgttctcccggtaaatgtctctgtggctccatcccacaccggatgtttttcccccggatgcctgtctgtgacataagtaagctttccctgtgcatatccgccaatgtatagttccatgtgttatcctttctgatgcgtcatcccgcaatgcttcattcctagccgatcagccctgccgccgccacaagcaccgccatcacaccctcgcacagcgtcacaaaataccccgcaaggtctccggtaataccgccaaattcccggtaactcttctgtctgtagtacgcgtaggtaagccctgctgccgcacacgcaagagcgccggttttcaccgatacggcaagcatcagcccgacgcagagtacaagctgcagatacagcgccgttagcaccacccgccggtgcgcctcgctcgcgaactgatagagcatcccgttcgtcttggcacagcgcagggatacgacaccgatcccgcttaaggtgcgcgacaaaaaaaagcctgcggcaagtactaaaatctgttctttttccgtgatcatggacactgctcccagatagatcagctcatacatcacaaaacagatcacggcaaacgcgccgatgtgggaatcttttaaaatctccagtttgcgctccctgtcgcggtaagaatgcagcgcgtccatggtgtccataaacccgtccgcatgaaatccgccggatattgcaagcggcagaatcgctccgaccgccgcccgggcagtggacgggatcccatacacgcccgcaaaccggttccacaacaggaaacacaatccgatcaccgctccgacccacgggaagaagcacagcgtatagcgcatgtcctcctccttccactcgaactgcggcaccggaattttagaataaatcgaaaatgctataaaaaaagactttatcacggacatgccggtgctcctttctgtctgtgtccctgtttctctgccgccgctaccggaagctttccctttcttgcaacgggaattcccgcaatcacttccaccacagcgtccgaacgctctgccagtctcacattgatgctgccgagcgcccgaagatattccatggtggaagcgtcatagacgatgccatcctcaaacacattgttggtgacaatgacaagttcttccgtctcctgcgccagcacgccaatctgcgtgacaatcttttccgcgacctgctcactgcccgccggttcttccgtgtcaaacatttcattggcagccagattcgacatgcactccagaagtaccacaccgccaccggcctcccgaagtgcgggaaggcactgcatgatgtccgtcggctgctcgatcgtcacaaagcctttgcctgcgcgcatccttttatggcgctccacctttttttgcccctcctcgccgaacacatgcatggttgccaggtagaagtgccttttctctttttgacactccaatgccactttttccgcataagctgactttccgctgccgcttccgccgatcaccagaatcatgtcctactcctctctgaggctacccgaatctgtgatacggtgccacatcaatatccgcaaacgtggtgcgctcgccgtagatcgtccgcgcaatgtccagcagtccgcacatcatcacagctccggttccctctcccagcgccagtcccgcatctaacaccgggcggattcccagttcttccaatatgcgctccgccgccggttccctgctcttgtgtgacggtattacgtaatcgcgcacgccgggaatcatccgctccgccgcaagcgcagccaccgcactgatgactccgtcaacaaccacaggcacatgtgccagggcaccgccgataaacacgccggaaagtccggcgatatccagtccgcccactgcgcacagcacatcgaatgcgtccgcctgatagagttcatgcatctggattccctcttcgaccaccgcaatcttgcgtaaaagcgccgtgtcactgagtccggctccctttccggtgatctccttcggatcgcaggataacagtgccgccgccaccgcactgctggtcgttgtgttgccgattcccatctcaccggtcgcaagcagcttatagccctcgtgtgcaagccgcttcgcaagctccatgccaatctcaatcgccgccagtgtctcctgctccgtcatcgcccgttccttgataaaatttctggttccgcgacgcactttgcacggcagcacgccctccggcgatccctcttcgttgattccgatgtccaccggtattacctcgatgccggctgcttttgccatccggcagacagagctcgtccctctccccatggctgccgccaccttcgccgtcacatcctgtccggactggctgatcttctcctccacaattccgttgtccgcacacatcacaaccactgcttttctggaaatatcaagggcgggatcacgccggattgctccgatgcgggcaaacaattcctcaaattctcccatcccgtccagcggctttgcaagcgcatcccagttgccgaggacttccttatagaccgcctgatccggcggctctatcttcaactgtctcatctgctgtctgtctaacatcccacacacctctctcttttgtcactcatattcccgcatcatcttatagaccgcatcgagatccagatactcgcgcagcgttgccgccagcttgtcgtactgctgctccttgaacaatccgtagtccacaccgttctccccgagcacgagtcccttcctctctgcgagatgccgcacgatcttcccggcgatggatccatggtcaaaaatgccgtgcacgtaggtgccgcacacctttcctgcaaagatgccgtccgtgcgttccttcccggtaatctcgtcgcggattctgcagaaaggttcgcagtccccctccggtctgctgattcccatgtgaatctcatagccgctcagttcacatccgtccagcatcccgccaagaatctctccgccaacccgggttcgcactttctgttcccccagctctgtcgtgaccggaagtaatcccattccccggatcacaccgcccgtctccacgccgtgcgggtccgcaatctgttttccgagcatctgatagccgccgcagattccaaaaatgaacgtctccgcgcttctgtgaagaatcgctgcctccagaccgttctggcgcatccattttaaatcctccatcgtattcttgcttcccggcagaaggatcatatcgggatgatgcagcttttccaccgaatcgacatagcgcagcgacacatcctcaaactgctcaaataccgagaaatccgtaaaattggagatgcgcggaaaacgtatcactgcaatgtcgaccgccgcctcctgcctcgcatcaaaccgggtcgtcagactgtcctcatcctcgagggaaatctgcatgtacggcaccaccccgacgaccggaacgccgccgcgctcttccagcatccggattccaggcgcaagaatggacacatcgccccggaatttattgatgataaatccttttacccgcctgcgctccgactcctccagaagaagctgtgtcccgagcagctgcgcaaacactccaccccggtcaatatctccggcgatcagcaccggcgcattcaaaagttccgccagccccatgttcacgatatcattctcttttaagttgatctccgccgggcttccagcgccttcgatcacaatgatgtccgcctgctcctcaagcctgtggtacgccgcaagaatgtccggcaccagctttttcttataagcaaaataatccctggcactcatattcccgatcacttcgccgttcacaatcacctgggaaccgatgtcgttggttggctttaacaggatcggattcatcgctaccgtcggttccatccccgccgcttccgcctgcattacctgcgcccgccccatctcaagcccttcttttgtgataaaggaatttaacgccatattctgtgatttaaagggtgccacccggtagccgtcctgccggaaaatgcggcagagtcccgccgcgatcaggctctttcccgcattcgacatggtcccctgtatcatgatgcgcattgccatagcttactccaatctaaaaaaatctccatgcctcaaatagcatggagattatactacatatccgcctcttttaccagtattttaagcttattccccgctctcatccaccacaatcggggtaatgacaatcttatccgccgcaatgttggtcttgcgttttacaatatcttccacctgtgcccgctttgcatccgtcacctctcccatatttaagacaacgtcgcagttatcttccgtgatgctcaccaccacatcggaaaatccctttgcctccagcagcatttccgcagctgcctcccgctcggcaatatccgtcatggcgatcatcttgttgacggcatcctgctttaagctctcatcgatcgtcgtattgtttacaatctcaagcagggattccttattcttggagcggatctgctcgcggtttaatttcatctccgccgcataatcgaggttcgcaatcgtcgtgcttgtaagcactgcctccccaggattctcgacatccgcggcaccgtccgtcatctgtgccacatccccggactgcgcggcatccactgctgccgtctccgttccttccacaagcgccagttcctccccggttccctcatcggtaaagatctcctgctccgcaagcatatcctcctccgatatgtcgtatgtatcctgcaccgttcccgcatccgcgctcgcttccgccgtcacctggccatcttccatattgttgttcatgtagctgaaatatcctgccatcgcaatcataagtgccaatgctgttatcaccagctggtttttccgaaatattttcttcactccgattcctccctggaacacatcttaactactctaatcctatgcggttccacctttaataatgcctgcacggactctgaaatctcagaaaccgccgccgggttcccgcctccctctgcgaccaccacaacgcctgccaccgtcggcagcgtctctttctgtacatacggatatttttcatctgcagtctccacgtataccgtcgaatcttcccccgcctgttctgtcacactgcgctccccgcctccggaatcacgctcgcccgtcgaggaggaagttgtctttttgtccttctccacaatctgttcgcccccgtctgaaacggtaatcatgacgtccactctgcccaccccgtccatctgcatcagaatattctcgagcttcttctccagatattggacatattcctgctctccctcctccgatgtctgactgcctgacgccgtccctccactatctcctgacgccgttcttccgctgccgcctgacgtctccttttccccctgtgccgtgttatatgccttttctgctgtgccatccccactctccaccggcagtgcaatcacaagcaataatatccccgccagcgcgagcagcagccagtcgcttttcttccagctgcgccagtttttgttctgtaagatccgtttcagtttttcaggcatttacgttcctcccacataactcacccgtattccggaatcctccatcccgtagtacgccgccagttcttcctttactttcccgcagacctcctggttcttccctgactctgccgcatctgacacactgattcttctgaccgaaatctcatccgcgttctcatctgtgatgtaaatgcaaatctcctgcatcgtatgatcctctcccagttccatcgtaacgctctccgcgccaagcccgtactcctgcagcatatcatccaccttctccctgatattttccgcgatgacattctcatactctgtgcggtatctgtcctgattcagataagcgattttctgcgtatcgcgggaaaattccgacagtttttccatgcactgggcatatgccattttttcataaaacgtatcttttccgccaaacagtacaaacagcggtctcaatgctgcaagcaccatcagaagctgcgcgtaaaaacggatatatttccggtattgtttccccggcggcagataacttagcagcaccagaagcacaaacagaatgacaaatcctctcatatatgcgttcatggcacgtccccctatgcatgtgatgtgactgccgccgtctgcagcgcaatcgtagcaaaaaacagtacaatgccatagcagaccagcttcagataaagcacgcctccctgcgccatgctcttaatgcatccgacaatcctcttatccgccaccggctccgccaccgccgccgcaagtttatagagaactgacatacaggcaagctttagaaccgggatgcagcccaccgcaagcagcacgatcagtgccgtcacccccacacagtttttgatcagtattccggcgccgaacataagctccccgattcctccaagcacattccccacccccggaatcatcatcgccgcacggctgaccgctccgtttaaaaggcggtcctttgccggtgcaagcagtccctgcatgacgtttaatccgagcaccgccatcatcgcgctcttcatcccccaggagatcactccagccaataattccgtaaaattctggaatttttcatcctcaaaaaagtgattgaacagctccgtcaccacatacacacggatgaagggaagcagcaccgaaagaaagagccactccaccagataaatgaccagaaacgccagctgataaaaggcggcggagctctccgcccccgatgaaaataccatgctgatgccaaacgccggaatgagtgccttcataaaatcgatgctgccgtttagcgcttcttccgctaccgttccatagatttcaaaagactttagcagcagcacacagagcacgccgtagaccagcaggaaacagatgtcggaaacataatttttctcaaaggttcccgagaaattcttaagcatggaaaaacccgctgcaagcagcaccacctccaccagaattgttttgccggtctttatctcatacagcagggcatcacacagccaatgtccgattttttccatggaggtcactccgattccatccgcaagcaattcctgcaccatcacggagaagctgaatttttccctctgctccggaaacagctcctctttggtccacgtatccagttctgcaaagtccagatcttccagaaacgtttttaaatatgtctcctgcgtcttctccgcgctccccgtcccgccgtcataatctgccgcctgcacagtcacaggcattccggtcaaaaccaaaaacatgcacaccagacagaagctcctctttccccactctctcataaaaaactccccaccgcgtccaaaaacgccccaaacacaggcacactcaccaccagaatggacagctttgcaaacatttcaatctgacctgcgatcgcagaataaccggaatccctgcacagattcgccgcaaactccgacacatacgtgattcccaccatctttaccaccagcccgatgtacctgctgtcaaccggaagctgcgacttgatggaatccacaaagagcagtacagtctccacctttgtgagcagatagataaaaatgcagattcccacaaccattgcaacaaacgtactgtactctcccttttctctcttgagcggaattgcaagaaatactcccgcgatgccaagaaccgctatttttacaatatccatcgttttctcccggcttacagcgcaaacagcgactgcatcgtctcaaataattcatagatatacggaacgatccagaacagtacaatgataagcccggccaggctggtcaaaaacgcatgctcctccctgccgctgtgctttaagacctgtccgatcactgtcacaagaatcccgactgccgctatcttaaaaatcaaattcacgctcatcgtatttctttcctttctgttttgctttcctgccgtctaaatcagaagaatgacgagcattccccccatcaccatactgacagtcgcataaatcttctgcttttctcccagctctccccgcacggttttgatcctgtcatccagctgttctaaaatgagcgtgagtcttctgtgattttcttcttcgcttctcccgaaaagcgcgccgcccgcctcctcgatgagcgcgctctcctctccggttaaacacagttttttccgatattcctcaaaaacccgcttccacaccagttccccatttttctcgtttttctctatcaggcagtctgcaatcttccggcagatctcatttaatctttcatccggcgttctcacaaagcatcccagcagaacttccaccggctgtctggttccatttccgtagcaggaaagatccaccagaagtttccgcagcgcgtacaaaagtgccagatgatctgccagctctcttttgtatgtgcctgccatccccgccgccgcggcaaagaccaggatgcttcccatgatttttaacatatccgctccatccgttcatcgtagattgtggtgctacgcccccctctggaattccgttgaatcaatatgtagcgcccgaacagcttctgtgtgacgcatgcctgcagatacggtttgtccaaaagctcctgcacacagcctgcatgaacggttcctattatcctgcacccgcagcacagtgcctgttttaccgccgcaaagtcctcctttcccccaagctcatccaccgcgagaatctgcggcgacatggagcgcagcagcatccggatgccctccgttttcttacatccgtccagcacatccgtgcgggggccaagatcattctgcggaattcccaggtggcatgcggcaatctcggaacgctcgtccacaacccccactttcattccgggtgtgcccgcattccccgcggacaactgccggatcagatcccgcaaaaacgtcgtcttcccgattccgggcggcgagagcatcaatgtattgtagattccgtctgatctcctgatatgcggaagaatgtcatctgcgcagcctcgtttttcgtgtgcaatccggacatttaaaaacgtgatatggctaagaccggtcacttttccatccttttttaccacctgccccgccattccgattctgtgtcctccctcgatggtaagatagccctcctttacctcctcactgtaggcgtaaagcgaataatcgctgatatagttgagcatctcacgaaggtcctccggcgtcatccgatagccgcactcatatccgcaggcagaaggcagtgcatacacgccctcccgccccggcagatagcggctctccccgccgtatataaattcaagcggactacccacccggacacggatctcctccaatcccgccttccatgtatcgttcgccagcgcctctcttatatgcaccgggaatattttgacgatctccaaagccatgcctcctttccggctatgtctaattctatgacctgtccgaaaaaatatgactcctttttgcgtcggtcataaaaaagcgcaaaaaagaaggggctgcccacttgtatcagacagtccccttttgatgagagaagtaatatgcgaaaaagaccatgtccttcgatttctgatggaatgcagatggaaattcgttggagaaaaatgtgagcatttcttccagctaaatgtttgcatcggattccgtgtctcttccacgtttggacaatccgacgggtgcatgtccgacacaccggagacaatgggcggactttctggtgtccctaatggcccctcttcacagacaatataaaaccgcgcgaaccgaaactcgccggcatctgctattgaaaataaggcagatgccgactcagacatcggcttcgcgcggttatgttttgttcgacataaagatggcatttatgccatctgttgtctggtgccgcaagggacacacacaaaagtcctacaaattgtcttccgggatgcggacatgacccgcggagtgctccaaacttggaaagacacggatcatcaaagatgcaaacatttggctggttagaaatgccacattttttgatccgaatttccagctacattccatcagaaatcgaaaagcatgacttcttatcctattacttctcacagcaaaaggggcagcccgtttcatgcggcagccccttcttttttatcaactcactaaataggttacatgcgctccggcgccttaaagccaagcagatcgatgcaggtctcaagcaccgacttcgtcagctctaacagacggatataagacttctggatctgctcgttctcctcagacataatctttgtctcgtgatagaaactgttgaatgcatttgcaagttcataaatgtaggaacagatcttatgcggcgctgtctcctcatacgcgttctccatcatggcgccgaatccggaaagtgccagcataaggttcttctcgcttgcggaatgagccgcctcaatcactgcgccgctctcatccttccccatgctatgatacttgttcaaaatcgacttgatacgaacgatggtgtaaaggatgtatggtccggtatttccctcaaacgaggtgaaccggtcaatatcaaagatgtaatccttgcttgcctgattggagaggtcaccgtacttgatggctgcaagcgcgatcatcttcgcgttctccttcgcctcttcctcactgatctcaaggttctcttttgccttctggttctccgtgatctttttgagcatttcctcgttcacactctcaagcagatactgcagacgcataacgccgccctcacgggtcttaaacggcttgccatccttgccgttcatcgtgccgaatccgaggaactttaagcctgtctctggctttaccagtccggtcttacgcgcgcagcggaacacctgtgtaaaatagagttcctggcgcttatccaccacatagatgagctcatccggatggtaatccttcatacgccacacgatcgttgcgagatccgtcgtattatagagggatgcaccgtctgattttaagatcatgcacggcgggatctccttggtatcggtatcctccttgacatccacgacaagcgcaccgtcgctgatgtaggcaaatccgtcatccttcatcttctgcaccatatccggaatgtacggctgggcatcggactcgcccttccacagatcaaacgatacattcagattctcatagttgcgctttaagtccgtgacggacacatttaagatgtgggaaagcagtgcctgataacctcttctgccgtgctgcagttcataggttgcctgcatcgccgcctccttgtaggctgcgtcctccttggacttgccgctggctgtcgggtagatctcctcaagctctgagatggtaaacggcgcctctgccggatactcgccggtataactctcatcaaaatataccagatccggctttctctgccgaagctccgtgatgataagtcccatctgtaagccccagtcgcccagatgcacatcgccgattaccgtatgtcccataaaacgtccgatgcgcttgatgctctcgccgatgatcgccgagcgcagatgtccgacgtgaagcggcttcgccacgttcggtccgccgtaatcgatcatgatcgtcttcggctctttggtcttctcacagccgtatcttccctcgtccgcctgcatctttgccacataatccgccagatatgcctcatccagcttgagattcaaaaatcccggctttacagattccaccatggaaaacatggcattcccggaaagcttctccgccacttcgtccgcgatcataaacggcgccttcttgtactcctttgccgccgccatcgctccgttgcactgatattcacagagatccggtctattggataatgtcaccttgccatactttgcatcgtaaccgcagtccacaaatgcctgtgtgacttccccggtgataaggtctaagatctttttcatattcttctctcctgcatttcgttcaaactgtttctttacaacctgtatcacattataccataaacagaccatttctcaagtgaaacaacacgaaaaagataccgggctatcgtgacattctctgccatctatgctaaaataggctttgtgtgctctcattacacacaatacatcaaagaggataaaattatgaattctaaagacaacagaagttccttctcaggaaaaataggctttgtactctcagctgccggtgcctccgtaggtctcggaaacatctggagattcccatatcttgctgctaaatacggcgggggaatcttccttctcatttacattgtgttagccctcacgttcggctacaccatgatcgtcgcagaaagcgccctcgggcggatgacaagaaaaagtccggtcagtgcattccagtcattcgggaagaaaaaatggatgtccttcggcggatggattaacgccgtaatcccgatcctgatcgtcccttactactccgtgatcggcggatgggtgatcaaatacctgcttgaatacatccgcggagatggggctaagcttgcagaagacggttatttttccgcctttatctcagacggcgcatcgacggagctctgtttcgttctcttctgtatgtttacgctggttattatttttgcaggagtccgtaacggagtggaacgtgtttccaagcttatgatgccggttcttgtcgtactgtccgtgatcattgccgtttattctgtgacaagacctggagcgcttgccggcgtgaaatattttcttgtaccgaatccggcgaatttttcgtggatgaccgttgttacagccatggggcagatgttttattcactctccatcgccatgggaatcttaattaccttcggttcttatatgaaaaaggaaacttccatcgagggatcgaccaagaacgtcgaaatttttgatactgccatcgcgattatggcaggacttatgattatccccgcggtatttgcattttcaggcggcgatccagacacgctgcaggcgggtccggcgctgatgttcatcacgattccaaaagtatttgccaatatgggactcggcactttcgttggtatcctgttctttctgctggtgctttttgccgctgtgacaagttcgattgcactgacagaaagcgcggtctctacctttgaggacgaacttggatggaaccgcaggaaatccaccgtcctggtcggcgtgatcatgattgcgctcggaagcctctcctccttaggttatggtccgttagcaaacatccggatcatcggcatgcagtttctggatttctttgattttctgaccaactccgtgatgatgccggtcgctgccttgatgacaagccttcttgtatccagggtaatcggaatcgatcgcatggaggaagaaatcctgcacggggaaggcaccttccgccggaaaaagatttttgttttgatgatcaaatacttatgcccggtttttaccatgatcattcttgcaagctcagttgccaatgcattcgggtggatttccatgtaactgcaggttacatatttcctatcacacaaaggaactgtcacaataagcatatcatgctttaactttaataagtaatattattagaagatcacactgtggaatttcagatggaaatgcagagggaaattcgttggagaaaaatgtgagcatttcttccggctgaatgtctgcatcggattccgtgtctcttccacgtttggacaatccgacgggtgcatgtccgacacaccggagacaatgggcggactttctggtgtccctaatggcacctcttcacagacaatataaaaccgcgcgaaccgaaactcgcgggcatctgctattgaaaataaggcagatgccgactcagacatcggcttcgcgcggttatgttttgctcagaggtgccattagggacacgcacaaaagtcctacaaattgtcttccgggatgcggacatgacccgcggagtgctccaaacttggaaagacac

SEQ ID NO: 11566 - DNA, 6771 bp, Unknown
  gut microbiota DNA sequence
ggctacttataacgaagcggaggatctgatcaacatcggagcttacaagagcggttccaaccgtgagattgactatgcggttcagaagatcaacgcagtgaatcagttcctgtgccagaggacagatgaaaagttcctgtttgacgaggaaatcgatttattgaagaaactatttgaagattaagaacgctccgcggaaaagaggcgcagtgtatggcaaagtttacataccggatgcagaacattcttgacatcaagatcaagctggagaatcaggcaaaaattgcatatgcgacggcgagcagacagcttgcggaagagcaggagaagcttcgagagatcctgatgcgcagggccggctacgagagaaaatcaaaagaactggtcaacggaacgctggatatccaggagatccgggaatgcaagcgtgcgatcgatgtgatgaagagtctgcagagagcacagatgatgaaggtgcacgccgcggaaaagacgctggagatggcgcgaatcgaactgaaccgggtgatggtggagcgaaagacgcatgagaagctcagggagcgtgcgtttgaagaatttaagcaggaaatcgcccaggcagagagcaaggaaatagacgagcttgttagctacaattaccatgaaggataggcacggaggtctcaaatggcagaagaagagaaagacgaagtattagataaaaaggcagcaaaggcacaggagaaggctgcacgtgcagaagcgaaggcacagaagaaagcggaccggaaaaaggcaaaagagttaaatgatgatctggatatggatgacgagacgtcgaccggcggaaagattaccgtgttctttgttaccctgatcattattttaatctggcttgccatcatcgtcctgttgatcaagtgcgatgtcggcggtttcggatcatccgttctggcgccggtgttaaaggatgttccttatgtgaacaaaatcctgccggacagcgcgactgaggaagtgtcgacggaggatgacgcttacggctatacttccattgacgatgcggttgccagaatcaaggaactggagaaagaacttgcggatgcacagaatacgtccagcgcaaatgcggaatatatcgcacagcttgagagccagtccgcagaactggcacagtacaagcagaacgaggcggattttgaggctgagaagcaaaagttctatcaggaggttgtgttttcagattcagcacccgatatagaggaatataagcagtattatgagagcattgatcctgcggatgcggagatcatttaccgtcaggttgtagaacagacggcagccaatgatgagatggacgattatgtgaaagcgtactcttccatgaagccaaaagaggcggctgcaatttttgataccatgacagataatctgcagctggtggcagatatcttagacagtatggacgcacaatcgagagcgaatattctgggcaaaatggacgcggctacagcagcaaaggtgaccgcgatcatggaacctgtagaatagagaaggacagtctgcttttcatagtggcagagggattccttcaaaaatcaggctgcagatgcagctatgggaaaggaggaagagaatgggagacaacaatgttgcaagcattgggaaaatgctgatgcagacgcagagtggacagagtgtcacaggcgttgatggcgcggatatcggcaccacattccggaagatggtcgatcagatgacacagatcccgggaagcagcgtaagtacaggatctcagacagcgcagaatatgcagcagcttacaccgcacagtccggagcagaattatgaccgttaccagtatcagaagaataagataccggagcaaagcacgaaggactgggcagccggcagtcaggtatcagagaagctggaaagctttgaagagagtgtgagagacgtcatcaaggatgaacttcaggtgacggatgagcagatcacggaagcaatggagacattgggactgaccgtggccgatctgatgaatccgcagcagcttgcagctctggcggcagaattaaccggaaccgaagacatgagcgcacttctctgtaatgaagcgtttatgaacgtgatgcagtcggtgggaacactgaccgaagatctcttgcagcagctgggagtcacggctgaggaattgacgcagcttttggaggatgccggacagacggacatggatgcagatctgatgcagacagtccagacagcggatgctggtgaaacagatgtcaaagatgcacagaaggtttacgctgatacggcggatggaatccgtgatacggcagaacagccgcagatggctgcccaggcagcagagacagagaccagaacagaagaagcaaaagacatcactccggaagagactgatgcgcaggcaaagacagcaaatgcaggcgcagaggaagagacagctgccgatgcagctgcagggtcggataaggaacaggcacagaccggatcaaattccaattccggacagcagaattttgcgtcgcaggcacatgcgggcgtggatgtacataccggcccgacgctgacagagaccgtggcaatgcagggcgccaatagtgcgggagaatatgccgcacaggtggacatcgcggatgtcgtgcgtcagatcgtgacctatacgagagtgaattacacggcgaatcaggaaacaacgatggagatgcagctcaatccggaacatctgggcaagatttatctggagatcacatccaaagacggaacagtttccgcacatctgaccgcacagaatgaagtggtcaaggaggcgctggaaagccagattgcagatctgaagcagaacatgaaccaggcgggcgtgaaggtggatgccgtggaggtaaccgtcggcggacatgagtttgagaagaacctggagcagaatgcaaaacaggaagaacagcaggcagaggaacgggaaaaggcagccaatgcgaccagacacatcaacctgaatgaactggacggactgtccgggctgatgacggaagaggagactctggtggcgaagatgatggcagaacagggcaattccgttgactttaccgcataacagacagaaaggagagacatatggcattagtacaggccgtagagaacggcaagattacagagagtacgacagagacaacgaccagtgccggcaatgacctcggatatgacgagttcctgcagctgttatgtgcagagatgcagtatcaggatccgctggaaccgacgagcaataccgagtatgtggcacagctggcaactttttcacagatggagtccatgctgaacatgcagaacagcattgagagcacgaaggcaaacgatctggttggaaagtatgtcattgtaaagacaacatccgagacgaccggcgagacgacggcggtggcaggattcgtggattatgtgcagtacgagaacaaccagaaatacatttatgtcaacggcaaccgttattcactcgacgatgtatatcaggtggcagacaccgagtacatggaggcggtttcactggcagaggcattcaaggcatctgtggcaaagcttccggatgcggataagctgacgctggcatatcagacggatgtggagaacctggcaaccgtgtacaacggactgacttcttatcagcagagttatattgacagcgatacgctggcaacgtttgtgaagctggacggaaccatgaagagcctggtatttgacaatgcgctttcgcagattccatccgcggacgagctgacccttgagaacaaggaagcagtggaagcacttcgcaagaattacgattcgctgaccaccacagagaagacttatatcagcaaggattcctacgatcagctgacagcactcgaggctaagattgcggagcttgagaagaaagctggatgatctgagaaaggagcgttggttatgaataagattacgaaccaatttgcttccatcgaacaggtaactgaccggtatctgaatcgcaaaagcacagagactgcggcgcaggaaaacagtgtttctttcgaggatatattaagacagaaacagacgaccgcagaaagtcaggaacttcggttttccaaacatgcacagggacgtttgaatgacagacacatcaatctgtcggacgagcagaacgagagactggaatccggtgttttgaaggcaagcgaaaagggaatacgggaatcactcgtgattctggattcactggcgtttattgtgaatgttccgagcaagacggtggtcacagccatggatcagagtgagtcagagagtaatatttttacaaatattgacggtgccgtgattgtataatatgccggaccttacaaggaggcagaagctccccgaatgacagaagggagcagggcaccagacattacaggaggtcatttcattatgatgagatcaatgtactctgctgtgtcgggtcttaagacacatcagacaaaaatggacgttattggtaacaatatcgccaatgtaaacacagtagcattcaagtcttcttccgtgacattccaggatatgctctaccagaacacatccggagcatcgggagcaaatgcggctacgggagtcggcggtgtgaatgccaagcagatcggtcttggcgtgaccacaggtgcggtaaatatcagcattacatccgcgggtgcagctgagacaaccggaagagctttcgatctgcgtatgacagatcagtcgaccaccaatttctttattgtcaacaacggatcttccaatctgtttaccagatccggatctttctatgtagacggtgcaggcaacctgtgtatgacgtctaccggatatacggtcatgggatggcaggtagataagacaaccggaaatatccggaaagataccgtatccgcgttgcgcgtcatgagcacggagaatctgacaagcgcaccagaggcaacctctgaggcaacctgcggcggtattattgataagaacgataccgacgtattgagtgacgacggattgatcaagaacctcaagttctacgataacctgggatatgagtacaccgcacgtttttccattaagtcaaccggaacggacggagagttcacggtagagctgttgaatgttttagacggcgacggaaatacctactacgatcctgagaatattcaggcgggacagccggcgttaaacgcactgttcggtaacaccgaggatgcgacaaagagttatacgctcggcaaggattacacttatgtgtccgctaacgtcatcgtggacaagagcggtaattactaccagtacaatgcagcgacacacagctatgaccaggtaaaaagtgcgacggacatgacggttgtcacagcaggggcactcagcctgacacaggtatacggtgcaggagcggatattctggcgaaagcggatgcttacaccggaaatggcaccggatatgcggttgacggaacaaccggggcactgacacttacatacaacagtgtatatcacagattaagcttcaacacggacgatggaacattttcaaaggttggaaacgtggcggatgcgaagagtgttggactgaacatgtccctgttcggcggacagttcgcaaatatcaatgtggacttcagcacctgccagaatacgaacaacggcggcaagtccactgtaacgatgagcaaaggcgctacagacggaacaactggagcaggtaagaagctcggtaacctgatcggactttcagtcagcaacaacggcgagatctacggtatttatgacaacggtaaccgcaacctgttaggacagatcgcggtcgcacagttcgccaatgcggcaggtcttgagaaagtcggagagaactgctacagcacgaccttgaactccggtgagttcgatggtatcggtgaggatattacggcggacggaagcaagatgacatccggcgagttagagatgtcaaacgtggatctctccaccgagtttacgcagatgattaccacacagcgtggattccaggcgaactcccgtgtaatcacgacatccgatacgcttcttgaggagcttgtgaacctgaagagataagcggctgcgagatgacagagcagcatcacggataagattttggagaaccggggttttgtctccctgataaaatcccggttccatgaaagaagaaacacagaatttgcaaaagtaagtagacaagcggtcaaaagtttagtaaaattatacaagatataggatgacaacttgttgagatttcagtctccgcttggagacagcaatactataatatcaaggatggtaggtggaagaattggatatagcttctttagcagggatgctgcttggcgttgtaatgtttttgttcggtgtattttccagtggtggagcttcgggtcttttcaatatgtttgacttcccttcaatcattatcacactgggaggttccatatcgggtacattggcgtccaacaaacttcaggattttattgcaggtctgaagagtattacattaacatttaaggaggtaccgcaggatcctgcggcagtcatccggaatatcattgatttgtcaaataccgcccgcaaggagggactgcttgcacttgaggaggcggcaaacggaatcgaggatgaattcctcaaaaaaggaatcatgcttgtggtagatggtaccgatccggaactggtaagaggtatcatggagacggatctgggctgtatcgagcagcgacacaaaaagtcaatcgctgt

SEQ ID NO: 11567 - DNA, 1107 bp, Unknown
  gut microbiota DNA sequence
ttagacctgttaagagatgtcaacacaatttttgatttttttgcataagaaataggcctgattattcaggcttttttcttatgcaactatactatattcttatatatttccattactcttgcataatagatttgcaaaaacttatttaaaccggctattttggcttgtttcttactttttccttcattctcttttttaattataaaatcatagacacgagtatctgttttgggcggatgggatttcagacttttcataacctcataaccggttttccttaatgcactgtttccgcgtttgcttattctacgtttggtgccggtatattgtcctgattgataaggcggagcatcaattcccgcataagcaactaatgctttgccattatggaaacgtcgaacgtctccaatgtcagctataaaccttacacataacttttcacccatgcctcccatttggcgtatcgtttgatattctggtaaagtctttgcaagattttgcatttgtgataatatttgttctagagcataacctaattggcttacttgctctgttgctacttccatacagagtctggttgaagggaactctgttggtagtgtagggataccgtcttccgccaagtgaaaaagctcgtctgccttttctgattggaaacggtatcctttttctttacaccattgcttataattctctcgaaaaatttcttttcccatgctttttatcatatcaacatgatagaattctttggcaaaatccacatatttcacttttgagaattgaacactgcttgctgtatccagcgcttctttgaaaccaggaagcatctcatccatcaaatgtattacattctgtttagcagcaatcaaaagctttatgtatgtctgatactgcttggataatagacttaattctgtgtagcagcttggatgaaatttatatggtttcagttcactccagtatgccaaaccgtactttgctaatttttttgcatcaagcggatctgtttttgcgccatgcagcataatgcgtgaaaattgtcgtataatatatgcattttcaacacatacaaaaaagcctttttgatacagaaattgtgcaaccgga

SEQ ID NO: 11568 - DNA, 4086 bp, Unknown
  gut microbiota DNA sequence
cgctggataatctgagattacccacgctggaatacaagctgtaaatcttggtattgagcgtcttccaggcatcctgcttccaggaaagcttggtctgcgcttttttgtacttgttggtcttatagttatacgacgataccagagccgagatgatcgcctctgtgtccagtcctgaatttaatccagtaatacgaattggcatatgctcaccattcctttctatagcttctcatccacaagaattcccgcaatctcccatactttggcgatcatgtccagcgtctcctccggcggatactccttgatgacctcctttgtggtcttatcgatgatcttgattgtaacacggttcgtcttgtcgtgaattccgaagatcgcctccgagttcttcatctgtttgttcagatcattgaccgctttttttaactgtgttccctgctttgcatctttttcctcggacggatccttattctcctgatccttctctgtaaaaaagttctgcaccgcgggcttcttatctgctgtctgcgacagccctgcctgtgtggatgcttccggctgtaccgcagtatccggcgtttttgtggatgacgctgccgcacttccctgatacgacgctgccgctccgctcttcatgctctctatttccatctcttaccacctccgtgtgatacatggctcctctatgttcccggttttctatgtcttatatcggtgaaactatggtttttattaaccgcatcagaaaagattcttcagtgcctccattgcatctgttgcgttcaatgccgccttgttctcattctgaatctggagataaacctccttgcggtataccggcacttccttcggtgcactgattccgatcttgacctgatctccgcggatctctaacaccgtgatctcaatattattgttgatgaccagcgactccccttttttgcgtgtcaatgccagcatgccttattcctccgctttcttctttccttttactacgtcatagatcttatatttgacaggatagtcatcttcaacaatgatctgtgctcccctgcgggtgtctgtgttaatgacaatcggcgccttgaggttcaccgaggtatccttcggatccggcgctgccgtaagtgtgacgagcacgtaagtattgtcctctgtcatcccgccgagcggacggagcatctcatcgttcaccatcggattgtaatccgggcgcacgaggtttggctgcatgaccggaaacgccgtgtgcggatcgtccatggactggaaccacatcacggaactcttgtctttttccttttcctcatcaaatatcaatgcaaaattccggtattccggaagtccgatcattccatcctccaatgtaatgatcttatcatccgcaatatcgatttccccaaaaagtcttgtgtttgctttcatcggttctcctccagcttccccgtttggtgtctgttaaatgtaattcagtaatgttgtctgattgatcttcgccgcagcctgtaaggatgcctgatatgcggtgtacgccgacgtatagtcaatgatgatctcagacaggtcgcggtcttcgttggtggactttaattcctccatcgtggtctgctgatttgccatacggttcttggtcagatccaggctctgtcccttgcttccgaggtccgtgttcgccagattaaccttctgcagataatcgtcaaaattcccgatgtagctgttataaagcttctgcagattatcgtccgcataatcgcgttctttcttcgccgctgcgatccagtcctcaagtgccgcctggcagtcatcggaagaatactcctgcattttctgcattttctccagttcctcgactttattgtttgcgtcctgcgcgaactttaccgcctcgatcatggcgtcaacatctcttccaatcgatgcatcaaatacggcggatgcctgtgtattgaccgtcagggtctggtttgccgctacgacgtaattgatatcctgatagatttccttgccgttttcaaactttatatattccaccggttttgccgcatccgtgatgttggtgcagttatagtaatactccggacgtacctcacccttgttaaatccggtcttggtgtagttgacattcaggcttgccctgccgctcttgatcgtcgatgacgcatcagagcttaagatcagctcaccgctctccttaataaataccgcttcaccgtctgtgatattgtaggtgttgtccgcagtctgggatgcttttgcccagtcctcaaacgtatcgtatacggttaccttcagttcgccgtccgtctgtgtcacaccggctgcatctgtgtaggaatagctgagcgttccggtcgcaccgtttgccgacagcgcattgccgtccttgtccgtgatgctgtcgatctcgccgtagcttaaacggatacggtcgaatgtcgcctgcttcggattcgagatggtgttgcctgtcacctccgccgctgtggtcgggagtgtcacctcatcgctgtagtagcggtgctcttccagattcttataggaaagtccctgtgtgatattgtaagatgtcgtattgtcgtctgtcataaaggtcagcttctgattcgtgcggtaaccggtaaagacggtacgtcccgcataatctgcatttccctccgcgtagacctgatcccgcagcttctctaactgggttaagatcgtcttgcggtcgtctgcggtaatctgatcggacgctccgtaagtacactgtgtacggatgtccgtcagaatcgtcttcatattggcaagcgccgtctctgtcaccttcatccaggattctgcatccggaatattgttctcgtaatactggtcaatctcgctgagtgttgtgcggagtctgagtgaacgcaccgcaatgaccggattctcggaaggtctctgaatctttttctgggatgtcatctgattgttcagattgttgacattcactttatttccattgatattgctcgtcgtattgtgaagtataatgttgttcgtaatacgcatttatgattcctcctcatgtccttgtctatacaccggtctcaaggatcagtctgtcatagatctctgccatgacagataccatctttgaagaaagattgtaggcattctggaatttgatcagatccattgcctcctcatcctcatccacacctgaaatggacatacgctgcgtgtcaatcgcgctcgccacattctggtaattcttgctgaaaatttctgactgctgggtgtccacggaaatatctgcaatcatacattttaagaatccgtccgccgtacctccgcggtaaagtaccttgccgctctttaacgtcgcaagttcctccacgagatcgtacgcgtcgacgccgccctttccgttgatgtcaacggttgtcgccagcttggtcggatccttgacaatcatgctgttcacgcagatattcgctgccgtcagcttgtaatacgtgtctgagccagatccgttgactgcatttccgttcgcatccttgccgtcgaaggagaactcttcgccggtcacggtgtctgtaccggtgaaaaatgcatatccgctggtggaattgccgtccagatcgacaccttttttcaaaatattgttgaattccgtcgcaaagctgcgcaggaactggttcatctgactcatataatacggaatacccatcgcgtcaatcgacgttccgaccgatgccgtgcgtccgtctacacgtgcctgctcttccgccgtgagcgctctcttcatattaaaggtataggaagtgatgttgccgtccgcatcctgctcaaaggtaaatccctcatatgcgtactctctaccgttgatcgtcaatatgccttcctccggcatgctgactcccacaatactcgtgatggaaggattggtaatctgaacctcggtgctgttcaacacctttgccagtcctgagaaattctcgccattatttccgtcgcggatgtcaaacagcgcttttaacgtgccggacatcgagcttccgcccgcattaaaggtattgcctgtcttcgaccatttaatatcataaagtccggctgcatccgtct

SEQ ID NO: 11569 - DNA, 5705 bp, Unknown
  gut microbiota DNA sequence
cacttcccgatgtcgtatcgggtctactcctaagactctattgtaggttcgattcctatagggaacgctctattttaagcggtaatgagagaaaaatcattgccgttttttttattgtttttctgctaacagcaaatcaaaaaatgagcatttctgctaacaggaatgaaaagctataatgcaactggtgtaaaaggttgtaaattcttgtagctaacaaaagggtaatgattaaaactatttctgcttggaaaatatcaagcctgaatgagtattccgttcagattagattaggttctaatctgggcggatttttttatttcaggaagaaggaggatgcctatggcagaaaaagtggatcagatggatccagatgaaaaaatcgttgagatagcgattgaacggttaagagtattggcattgaaactgagaaattatatgaaaattgctcatccgggaactttcatttccaaaccagtaaactaagtaaaataaaaattctgctttacaaataacagataaagtattaaaataaacaaaaagatatcttcagggcagggtgagattccctaccggcggtaaagcccgcgagccgagaggcatgatccggtgagattccggggccgacagtacagtctggatggaagaagatgatagtacagttgattttttgtatgaatgaatgtagtatcagagctctgagatggtgatccatttcagagctttttatataggaaaatcagacattcatttatcaatcatatgtaacagatcaattccaccctgcagatatttctgcaggctttttttgtatctggtacatcgttttcgaaataactataccattcacttgtctgtgaatccgattgcacatgtttaaaagcctcggcgtagcccaggcaaagaacaggaataagaaagaaggaatagaaatgacggatcaggaatatatgcttcgggctattcaactggccaaaaaaggagaaggctggacgaatcccaatcctatggtaggggcagtgatcgtaaaagacggaaagatcatcggggaaggctatcataaaaagtatggagaacttcacgcggaacgtaatgcaattgcttctcttacagaatcagcagaaggtgcggtgatttatgtcacgttggagccttgctgtcatcatggtaaaacacctccatgtacagaagcgatcattgaacagaagatcagaaaagtggtgatcggttccagagatccgaatccgaaagtggcaggaaaaggtgtacagatgttaagggaagccggtgtaacagtagttgaagattttatgagagaagaatgtgatcagctgaacccggtgtttttccattatattactacgaagactccttatgtggtaatgaagtatgccatgacactggatgggaagatcgcaacgaaaacaggagcatcaaaatggatcaccggagaatctgcacgaaaagaagtacagcatatgcggcatcagtacatgggaatcatggctggtattggaactgtgcttgcagatgatccgatgttaaacgtccgggtagaaggctggaaaagtcctgtcaggattgtgtgtgacagtaagctcaggatcccgccgggcagtcagattgtaaaaagtgcggaaaagtaccggacgatcgtggcttatgcagaacagaaaaatgcagaagagaaaataaaaatattacataccatgggagttgaaaccatttactgtcccgacgaaaagaatcagatagaccttaagaagctgatggcagatcttggaaacagaggcattgacagcatcctcctggagggaggaggtacgttaaatgacagtgcactgcgagctggaattgtaaaggaagtacaggcttttgtggcaccaaagctgtttggcggtgtggctgggaagacaccggtagagggtattggagttgaactgccgtctgaagcagtggaactgaaatatacagatatctgccagatcggtgaggatatccggataaaatgtcaggtgtgtgataaaaaacaggaggaatcatgtttacaggaatcgtagaagagaaaggaaaagtccgttatatacagctgacaggggaatcagggatcctggcagtgaaagcccggaaagtcctggaagggacaaggatcggtgacagtatcgctgtgaatggtgtgtgtctgacagttacgtcgattcagccggacggatttactgccgatgtgatggcagagacgatcagaagaagcagtcttggcagctgcaaggccggaagccaggtaaacctggaacgtgcaatggctgcagacggcaggttcgggggacacatagtaagcggccatattgatgggactggcgtgatacgttccatgctccaggaagaaaatgccatctgggtatcaattgagacatcgccacagattttgcatctgatcgtggaaaaaggatccgtctgtattgatgggatcagcctgacagttgcaagggttgatgaagctggttttcaggtgtcggtcattccacatacaggagaagaaaccactcttttggaaaaggtgccgggggatctggttaatctggaaaatgatgtgatcggaaaatacgtagaaaaactgcttggcatcagaaaaaacgaagaagagaaaaaagaatccggaattacgatggagtttcttgaagaattcgggttttagaacaggaggatatacactatgtcacaaaattatcagtacaacacaattgaagaagcacttagggatcttaaggaaggaaaaatagttctggtcacagatgatccggacagagaaaatgagggagatctgatatgtgcggcagagtttgcgaccagggaaaatattaatttcatggcgacctatgcaaagggtcttatctgtacaccgatgagtgcagaaattgcggcgagattgaactttccgccgatggttgcggagaacacggacaatcacagtacagcatttaccgtggcagtagatcacgcagatacaaccacaggtatctctgcggaagagcgctcctatactatcatgaagtgtgtggatgatcagtcaaaaccggaggatttcagaagaccgggacatgtgtttccgcttatttccagaaaaggcggggttttggtacgaaatggccatacagaggcaacaacagatcttatgagacttgctggactgaaagaatgcggcgtgtgctgtgaagttatgaaagaagatggaactatgatgcgtacatcacagctatgggaaatggcaaaagagcataaccttacatttattacgatccgtgatctgcaggattatataagaatacatgaaaagcatgtaaaggaggaagccgttgcaaacctcccaacgcagtacggtgattttaaaatgtatggttatatcaatgatattacaggagagcatcatctggcactggtaaaaggtgatctgggagatggtgaggatgtgctttgccgggtacattcggagtgtctgacaggggatgcattcggatcgctcagatgtgactgtggcctgcagctgcagacagcgatgcgccaggtagaagcagaaggccgaggaatcattctgtatatgagacaagaaggccgaggaatcggactgatcaataagatcaaagcatatgcgcttcaggagcagggatacgatactgtggaggctaatgtgaagctagggtttgcaccggatctcagagagtactgggtcggggcacagatactgtcagaccttggtgtgaaatcattaagattactgacaaataatccggataaagtctatggacttggcgaattcggactgaagatcaatgagagagtacctctggagattccggcacaaaagtatgaccggaagtatatgaagacgaagcaggaaaagatgggtcatatttttaaagaaataaatttataaaaaacagcaaatatcaggaggaagaaaaaatgaaacagatcaatttagtagaaggaaaagtagtagcaccggagggaatgaaggttggtatcgtggcagcgagattcaatgaaattattgtgaataaattattgggaggggcagtcgacggactggtaagacatggagtagaagaagagaacattactgcagcatgggtaccgggagcatttgagattccgattacagcacagaagatggcacagtcaggaaaatatgatgcaattatctgcgttggagctgtcatccgtggagatacttcacattatgatctggtgtgtaatgaatctgccaagggaatcgcacaggttgaacttgcaacaggaatcccggttttattcggagtgatcacgactgaaaatatcgagcaggctattgcgcgtgcaggaagcaaagcgggaaataaaggctatgattgtgcattatctgcgattgagatggtcaatctgatgaagcagctctaaaagacaggaaaataaatgatgacaaaaacaatcatattcgattatgatggaacgatccatcatacccttggaatctatgaaccggcatttcgtgaaacctatcagtggctgacagaacagaaggttaccgaagaacgggagataggctcggtggaaattgccggctggctgggacttaacagtaaggagatgtggaatacatttttgccggaactggatcagagctataaagagcaggcaagcacgatggtaggagatctgatgataagacagatcaggaaacataaggcagtgtggtatccgggagcagaggagatgctaacagctttgaagaaccggggatatcaccttgtgatcttaagtaactgtaaagcttcatatcgtgaggcacactggaaggaatttgggatggaacgatggtttgaccgtttttatgactgtgaatcatacagattccgtccaaagacagaaattgtgcaggaaatcatccgggaatatagtggcccttatctggtagtcggagacaggagacaggatctggaatgtgccaggtcctgcaaaagcccttttataggatgcctgtatggatatggtgagaaaggggaactgaatggggctgattattatgcagaacatatagaggatatactgcagatggtgatatgatttttgcaatataaaaatctgaaggaaaaaagttaaaaataagtacttctgtaaaataaaaggatatagaaaatttgcaacaacttgttgcaaattctgaggaggggatgattttaggatagtcatagtgatagaggtaatccactttcctaaccccatctgtacagtaaagttctcaagtccagttgtacaaagcgctactgcacggggaaccagatggaatgcatctccacttcctaaaagaactgccataattccaaacatggtaaactgtcggtttcctttgcctttgcggatcatttatagattttattgtggaagattttgcataaagtgttttccgtgcttgtgtgtaccattatctgatatcaaagcagtacagggtgattccggccatgcacaggtcaatatggttacggatgcgtactctcatatttcggatgatgaccaaaggaaaaatgcagagctttttaaagaagcattttatgagaaaaagaatctgaatccagagaggcgggcgttgctcaattcgttggcgaaaacgatgaagtaatgaaaaatagtgaaaaaatagtgtaattttaatgaaaaaacaatcaataaaa

SEQ ID NO: 11570 - DNA, 475 bp, Unknown
  gut microbiota DNA sequence
tggatgaaatgaggatatttattgtgtatatggatattctatctccatcaaatctattgagatctccatcatttgatgatagaatgatggagataaatctgaaatgaaggagattcatatgagagactttgattttattgtaagtcctgcgaagttgttaacacctgaaattgttcagatggttagcagcatccatgaacataaaggcaaacaggaattatttctcgaagccaatgtagatgaattgaaaacacttttagaagttgcattgattcagagtacgggagcatccaaccgaatcgaaggtatatttacaagcgataagcgtttggaagaattggtaagtcaaaaagcagaaccccgcaaccgatctgagcaggaaattgctggttatcgtgaagtactttccacaattcacgaaggctatgaatatatcaatccaagaccgaacattattttgcagttacatcgagat

SEQ ID NO: 11571 - DNA, 1756 bp, Unknown
  gut microbiota DNA sequence
ctcttccgatctcaaaagagtaacaaattcaagtttgactgattagaaacagggaaaggcgcggcggacaatgtagtgatttgcggcttgtaatttgtggtgggatatagcgaaagaaaaaaggagagatcgcacatggttttattggttgtcgatgtacagaaaggcatcgtggatgaacgcttatatgcgttcgagaagtttgtcagtaatatcaggaagctgattgagaccgctcgagaacatggggtagaagtttgctatattcaacacgatgatgggccgggtactgggttttccatcggggacgatgcgtttgaggtctattctgagtttcaaccgatgcccgctgaaaaacgattcgtcaagaccgtaagcagtgcattcaagaaagagagtggtctgctggagtacctgacagcaaagggcgaaaaagacgtgatggtctgtggcattatgaccgacttctgcatcaatgctacagtagaggccggttttgagcatggactgcacatgatcgttcctgcctatgcaaattccacgctggacaatgagtacatgactggggagcagagctaccattactataatgagtttctctggccaaaacgctatgcggattgcgtatccatggatagggcattggcattactcaaaaaagcgatagaggtatagatatagatatatgttgataaactttaatgatcggcacgctattacagtgtccggcataaataattgccccggcaaggccatctgtgatggagatttagttttgtttactatgaaaaaaacaatctttctgctggtactggtgctaatcatgggaatttgtaccggatgtggtaaagagaatacagaaatcgaaaattcctgcatgaaagaacaaactacatccgaaagcagtgaggacgatgagattcatttggatgatgaactgaatatagattttacctgcgattattctgagagtattaaggaagatgtagacgatgtagtagcggattccacatctctgcaggaagagttgacgaatatggagaaggttacacaaaagtatactccattagctgaggcggcacaaacgcagggcgaaatgaatgtagccgcgcaatggctctatacgatatgggatacggaactgaataatctctggagcagattgagtagttcagcggaccggcagacgaaggagaagcttctggcagagcagagaaactggatagatctgaaagaagaagtgactttattaaatattggttccagagaagaaaacggtagtatgtatccgcttcttcagaactcttatctggaggaaattacaaaaaacagggcgtatgttcttacaagagagttggcgaagataaaaggggaagactttgttatgccggaagtttccgcaaagtacggaacctttgtagataatcagggaaccggtgatatatacagttccctgatcaccagacagaattgggaaggaaaagatgaagcggtgatctctatttacagacagggagaaatggaaggaagctttgtggataacggaaatggagaactgaactttacatcagaagacggaagtgtaaaaggaatgatcaaaatcgacggatggaatggcgcaagttttaaagttacggaaacatacggagaatctccgttttctgcaggagaagagtttgaatttccttttgccgtttgatttgtgatgatctgtgtcttttcaggctttgagcactccgcgggtgtgcccgcggag

SEQ ID NO: 11572 - DNA, 49853 bp, Unknown
  gut microbiota DNA sequence
cgtccttcacttcggacatgatagtggatagcatccataaatacgacagcgtacacttcttccaacggacgttcctgccattcttttacaattggaaggattttatccgtaatccggctgatggtactgtcagaaatatcaatatcatacagttcccgcatgtgagattcgatatctccggtagtcattccctttgcatacatggaaaggattttttcttccatgtcctgagtcacagtattctgatattttttgattagctgaggctcatactcaccgctacgatctcttggaatagctacatccatatctccatagcttgtgtgcatagttttgctggaatgcccattccgactgttatctgtttctttgtttcgatagtcatacttggaataacctaattcctcatccaattcctcatccaaagcaccttccagaagaacagacatcatgtcacgcatgatactgtttacatcggtgccgtctttgatgctgatatcattattcttcagataatcacgcatcatttctcgcattgctgctttttgtgggctgtcttttcttcttgccataaaaataacctccaaactgagtaattttatcttacatcagtttggaggtttacacaaactttgggatactcccggtatagatgatgcctgcatttccttttggagtgtaggcatttttctatgcacaccatttctctttatatttgcttattcgcttgttttcaggaatcgggtattctgtggggacatcagatgacaatgcttcctggcgcacttctaatggagttttacagtcatatctgtcctgtggacgttcttcactgtaaaaacgcaaataatctttgattgcatatcttagtgaagtctcatcaatgatctcgtacatctggtacatttcagattttataattccccagaaaccctctgttggtccattgtcgatacagtgcccaactctcgacatagattgctccatttcctgtctttcaagtttccttcggaatgccttgttggtatactgaaatccccgatccgaatgaaaaatcggtttggcatctggatttgctgcgattgctttatcaaatgtcttaaatactaatctgttgtcgtttcttgcacttacaacatatgctaccggatatctgtcatataaatctataatggcacttaaatacagtttctttttctccccaggtactttgaattctgttacatctgtaacccatttttgattgggaacagcagcatagaaatccatttgtagtatattttctgctgtttcgtccggtttggcataaatatattttttcttctttttacggattacagaatggattcccagctttttcataattctgtgtactcggtttttactgtacgatgtatgattgaaatggttgatccaggatgtcattcgtcggtatcctaaaatatggcaaaagcgttcttcatactctttaataagttccgcaaacctgatattttcaagttcttcatacggtacttcacgatgtaaccatttatagtaagcagcccttgatatctcaagctgtctgcacatccattttatactccagtttttctttatataaaaatgtcggattgctaaatattttgattcatggcgtactttcccaagcctcacatcctttcgaattctttcactttttttaacagttcaactaccatatccttttcttccaactgacgtttcaatcgcagattttcacgccttaatcgttctaattcatccacttcgtcatctgttttgtgacgtcttctccgatccgttaatccatctgcaccattggcgtcatatttttttatccaggaataaacctggctgtaagaaacatcaaattttgcagcggtgtctttatagttacgattatgattgatacagtaatcaacgatttctttccgttcttcaagtgttgtttttcttcgtgcttctgccatatagacctcctgtttcggatcgtaatccttaagttttctattggcattatacatcctgacccaacttcttaaaagactagaagaaatatcatattttattcctaaatcaatagaagaaccttcacctcttatatatttttcaaccactttcattttaaattcttttgaataagaaccatttcgtatttttcttgaaaaaccggcaagtccatgtttgttataaatcaaggcccagtcctgaatagttcttgaagatatacacagttcttcacatatctgtgatctggatttatttctttcaagataatctataacagcctgttttttttcttctggtgtaaactttgcttttctggacatgaaaaatacctccaaagtaacagatttttatatttaatctgtctactttagagggggcatatcagtggatagtgagtgcaattaggagaacagtaaaaagaaaaaaaatattgcgtgaaggcaatgaagtaatggcaacactaaaagaggaagacggtacaagaggcagatgggtatattatgagtataaggtgagaggcaaaacatatttggcaaagaccagaagggattttataagagaaaataatgatgtggaaatgatattatatgaagatgactgcccggataagtacatattcaaatatggaatatatgagaggcgttctctgaacattaagtacacattggaacttctgtggattgtctgtgggatgctggtaatatgggcagtggcagaccgatatatggggtaggaggaagaaaatgaagtacttttatgtatgtaaatattgtggagcaagctatgaagacaccaagccggaagtatgtgagcagtgcggagcaccgacggaggacatggaagtcaatgcatacaaggaaagtaaggatagagcagcagaacaggcaaacagaacgttaaggacattcataagaatgatagtgttgataccattgggctatggggtactaatggttttaatgtggctgataccatcattactggtatttctaagtggattagtgttcacaaaagcaatctaaaagcattgacttataaaagccctgtgtattataatcagtgttaatacgataaagtgataacgtggaagcaggaggaatgagattggcatggagaatacagtagacaaggtaatcataacagtcgttggaaaagataccgtcggtattatcgcaaaggtatgtacctatctttcggagaatcatatcaatgttctggatatttcgcagacgatcgtgtccggattttttaacatgatgatgattgtggacatgagtcagtcatcgagatctttcggggactgccagaaggatctggatgcggtgggagagcagatcggcgtgtccatcaaatgtcagaaggaagagatttttgagaaaatgcacagaatctaggcagatgtgcgggaagatcgaccgatggacaggatgtccacagaaagggatagacggaatgattaacatatgggaagtaaatgagaccaacaagatggtggagcaggagaatcttgatgtccgtaccatcacgattggtatcagtcttttggagtgtattgattctgatttaaaaaagctcaatgagaatatctacaaccggatcacgaccgtggcgaaggatctggcggcagtcggagagaagattgagaacgagtacgggataccgattgtcaataagcgtatctccgtgacaccgattgcactggtgggcggcgcagcctgcaagacgccggaggattttgcgacgatcgcggacacgctggatcgcgcggccaaggcagttggggcgaacctgattggcggctattcggcactggtgtcgaagggcatgacgaaggcggatgagatgctgattcactcgattccgatggcactctgccggacagagcgtgtctgcagttcggtgaaccttgcatccacgaagaccggcatcaatatggatgcggtcaagttgatgggagagatcctcttagagcttgcagagcagtcaaaggaccgcgattctgcggactgcatgaagcttgttgtattctgcaacgcaccggatgacaacccgtttatggcaggcgcgttccatggtgtgacggaggcggatgcgatcatcaacgtcggtgtcagcggaccgggagtggtgaagaccgctctggaaaaagtgcgtggcgagaactttgaggtgctctgtgagaccatcaaaaagacggcgtttaaggtgacgagagttggacagctggtggcacaggaggcatccagacttcttaatatcccgtttggtatcgtggatctgtctctggcgccgacaccggcgatcggcgattccgtggcggacattctctgtgagatcggacttgagtatgcaggagcaccgggaacgactgcggcgctcgccatgctgaacgatcaggtgaaaaagggcggcgtgatggcttcctcctatgtcggcggattaagtggcgcttttattccggtcagcgaggatcagggcatgatcgatgcggtacaggcaggagcgatcacacttgagaagcttgaggcgatgacctgcgtatgttccgtgggactcgatatgattgcgattccgggagacaccaaggcgacgaccatctccggtatgattgccgatgagatggcgcttggcatggtcaaccagaagacgactgcggcgcgcctgattccggttatcggaaaaggggtgggcgatacggtagaatttggcggactgttcggctatgcgccgatcatgccggtgaaccagttctcctgtgacgcgttcatcaaccgcggcggcagaatcccggcgccgatccatagcttcaagaattaaatcaaaaacgaacgtgagtcatagaacataagtgatggaaaacaaccttctctgatcagacagaatccgaaaggatagattcaaggaggttgtttttcctttatccggacagaggaagagcagaatggcagagatcagaaaaatcattttcataaaaaatgcggtggagacgctgggatatttttccgagcagattgcattagaattggagaggaacggatacgagacctgctttatcgactatgagcggatgtatgagtcgatggatgcgatgctgcattttctggagcgggaagagacggcgcttgtcacctttaatttcatcgggctccgcggcgaggctgtgtttcagacggagagcggacgcagtatctggcaggaggagaatcttccgattttgaatattttggtggatcatccgctctactatcacagctgcctgaaggaagccggggagcggatgcgggtattctgtgtggacagagagcacgtcggctatgtgaggcggttttacccgggggtgaaggtggagttcctgccgctggcgggcaatgaactttttgtttcacagaaagacggagaacacggaatacacagaatgcactgcgaggatgtgccagagcctgtactgtatgggcagagaacctttgaccttgtatttgcggccaactatgtgtcgatggagatgctggaggaaaaagtaaaggcgctggatgacgattatcggatcttttaccggcggatcacggaagatctgatcgcggatcccgcgcagtctgtagatgcggttatggagcggcacatccgcaacgagcttggggcagtgccggaagagcagctttgcgcagcgatgtccgggatgatctggattgatctgtttgtccgcagctatttccgggaaaaagtagtgcagacgctcgcggatgccggtatcatagtgcgggtattcggagcagactgggagaaaattcactgcaaaaagctgcagaacgtgcggacgagcggcggaaaagtgaactcggcggcgtgtgtgcaggcgatgcgtgatgccaggatcgcgttaaacgtgatgccctggttcaaagacggagcgcatgaccgcgtctttacggcgatgctgcagggaacggtggcgctcacggacgacagccggtatctgcgggaagagtgccgggacggagaaaatatctgcttttactccctgagggcgttacaacagcttccggatcaggtggtaagcctgcttgaggatccggtgcggatggcagagctggcggagcggggatatcggatggcagaaaagcggcacaggtggaagaaccgcgccgggcttctgatgcaggcacttcgcaatatagataagtaaaactaatagaattcagtaaataaattcatgatactaatgacagcgcattccttgtaaaaagaaaatccgcatgataagatggaagaaggcaatcaatgcagcaatgtgtgatgtgaaggaggaaaatcatgaagatgatgtcacttgcgaaggaactttcgtccaatacatatccgggaagaggaattgtgattggcagatccggagatggaaaatatgcggtaaccgcttactttatcatgggaagaagcgaaaacagccgtaaccgggtttttgtggaggatggagaaggaatccgcacacaggcgtttgatccgtccaagctgacagatccgagcctcatcatttatgcaccggtccgtgtgcttggcaacaagacaatcgtgacaaacggcgatcagaccgatacgatctacgaactgatggacaagcagcagacgtttgagcaggcgctgcgcaccagagagtttgagccggacgcaccgaactatacaccgcggatttccggcatcatgcacatcgagaacaatacctacaattacgcgatgtccattttaaagagcaacaatggcaatccggaagcctgcaaccgctatacgtttgcataccagaatccggtggccggcgagggacattttatccatacatacatgggagacggcaatccgctgccgagttttgagggagagccgaagcttgtcggcatcgagggagacatcgacaccttcacaaacacggtctgggagaacttaaacgcagacaataaagtatctttatttgtgcgttacattgagattgagaccggaaaatacgagacgagaatcatcaacaagaacgtgtgaggagaataggatcatgaaagaattagaattaaaatatggctgcaacccgaaccagaagccgtccagaatctatatggagaacggcgaactgccgatcaaggtgctttgtggcagaccaggctatatcaattttctggatgcattcaacggctggcagctcgtgtccgagttaaaaaaggcaaccggtcttccggcagcgacctcctttaagcatgtgtcgccggcgggcgcggcagtcggacttccgctttccgaggtggagcgcaagatctactgggtggatgacatggatgtggagtttacaccgcttgcaaatgcctatattcgtgcgcgcggcgcagaccgcatgtcctcgtttggcgattttatctctctgtcggatgtctgcgacaaggagacagcgcttgtcatcaagcgcgaggtatcggacggcgtcattgccccgggttacaccgatgaggcgcttgcgatcttaaaggcgaagaaaaacggcaattacaatgtcatcgagatcgatccggactatgtgccggcgccgatcgagcacaaggaagtgttcggaatcacatttgagcagggaagaaatgagctggtgatcgatgaacatttcttcgacaatgttgtgacggagaacaaggagattccggaggcggcgaagagagatcttgccattgcgatgatcaccttaaaatacacgcagtccaattccgtgtgctatgtcaagggcggtcaggcgatcggtatcggagcggggcagcagtccagaatccactgcacgagacttgccggttccaaggcggacaactggtggctgcgtcagtcgccgcaggtgctttcccttccgtttaagccgggcatcaagcgcgcagaccgggacaacgccattgacctctacattggggaggactatatggatgtgctggcggaaggtgcatggcagaatatttttacagagaagccgcctgttttttcggcagaggagaagcgggcatggctggataagaacacagaggtatctcttggatcggacgcatttttcccgtttggcgataacatcgagcgcgcacacagaagcggcgttgcgtatgtggcacagccgggcggttccatccgcgacgatcatgtgattgagacttgcaataaatatcatatggtgatggcatttacgggcatccgtctgttccatcactaggaagagccaaagagggctgatgtatgcagggtgcatcagcccttttttacactttttttacaaggctttaccggacaagggtagaagagaagattcataaacgttacagtttattttacatacaaaaaaatgagaggaacagttgtgaaaatgaagaaaaagaatcattggaaaaacatatgtgcgcttttcttcgcattctgcatggtgttttcgacggtagcaggagatgcgtcttttgttacggcgtatgcagcagaggtgcagacagcggccggaagtgaagcggcggaaaatccgtcaccggcagaggagagcggagcagacagcacggaaggtgcacagaacacaataaatcaagaaagtgcggcgcagacagggaacgccggtcagacggacgcagcgcagacagagggtgcagtgcagacggatgcagcgcagacagatggtgcagcgcaggcggatgcggtacagaatacggagtctggggcagaccagaatacggcgctcatccagactgcgggtgcagaaagccttgcggccttcagctacacggcggcaccggaagcgggacttccgacagcggcgacaacgggcagcggaacgcttgacgtaagcggagtatcttacagcggattcagcaagggaatcgcagcaaaaggatggagcgagggagcgggctttacggttgcggtcaatgctgcaggttacacagatttgaaattttccgcagacatgcgctccagcggaaccggtcctgccaactttgcactggaatattccattgacggagcgagctggacaaagatcagcggaacggatgtgaccttaagcacggatcttgccctggtgtatcagcagacggcactcccggcggcgctgtccggaaaagcgtttacactgcgtgtgacgatgcagggaaacacgagtgtgaaccagagtacagtcggtacgaacggtgtgaccagcatcaacaacattgtagtcaccggaacacagggcgaggcggcgacagacggaacggtctgttccaaagtcaaagcttccgtggagccgggagatgtggaagccggtacgaaggtggaactctcctgcgcgacggagggagcaacgatcacataccataccgatctggacagtgcagacatgacatacaccgaagcacttgtgatcgaggaagatgtgacgatctatgcgacagctgaacttgaaggctatgagacgagtgagacggcagaatttgcctacgcggtaaaacagggtgcaaagagcaaggaggcggcacttgccaccacactttcggacggaaatatggttgccctctattacgagaacaacggaaccggaagcgtgctctccaagacagcaagcggcaagaagttaaagggtgtgtcggcaactgcagcggacggcgcgcttgccattccggaggatacggcggaacttacggtttcagtggatgagaacggttattatacctttgtgagcggtgataaatatctgacatccggcgcaacgggcagctccgtgacgtttgcggacgcggcgggagattacagtctctggaagctgcagaaggcaaatgagaacggcggatactatgtgatcaacgccaacgcaaaatacaataataccgcggagcagtatctggaatattataacggatttacgacatacagctacaaatcatcttcggatgcggcgtatgtattctatttttatctgatcgatgagggaacaccgtcggttcatatccgtgcggatgagtccgtcacggaaaatgtggcacagtggtccggaacggcagattacaagacggcaggtgtgacggcagacaccggaattgcaggagattctctcaatgcaaatgatctgctggatacggatgccgcatattcggcggtggtaaatggagtggcagtggcaccgtataccgaggccacaagcacttctaccggttcgacttcctattatatgggaggaaagggcattggaagcggaagcaatgactatgcgcagtttgtgatgccgacaacgggctatgccaacatggtgctcgcattccggcttcgcgcaagcaacactggagcaggttccttccagatgcagtattctacggacggtgtggattttaaaaacctttccacaggaacctatgcttataaatacacgaaatacgtgggcggtgagccgcaggaagtgagcgccgcggagaaaattaccgacggtgtggcaaagacaagccttgcgccggcaaactatatttcgttcacgtttgatattccgaacgaggcggcgaatgcagaccgtctctacatccgcatggtcccgggcagcctttctgccaagggagataaggcaccgggaagcggtggagtgatccgtatggacacggtgacagtgactggtaatccggtgatcgcctccgatctatgcggatatgtggcagcagaaccgcagagcggcgtggtagctgtgggcagtgaactgacactgacaagcgccacggagggtgtaacaatccattacagtgtaaacggcggcgcggagcagatctatgatgcgtcggcgaagccaaagcttgcagaccttccggcagttgtgactgcctatgcgacaaaggacggctataaggacagcatccgccgtacattctcttatcagcaggcacaggtggcaacggtaaaagcaacgccgaacggcggcagcgtggtgaaaaataccgcggtgaacctcacctgtgagaccgagggtgcgacgattcagtattccgcggacgacggtgcaacctggcaggattataccgaaaagctcgtcctgacagagcttccggttacctataaggtgaaagccgtcaaagacggttacctggacagcagtgtgctcacactttcctttaccgagcgcacaaacgaaaaatatcagatttactttggacagttacattcccacacttcctattcggacggtgcgggaagctgtgaggatgcataccagcatgcaacgaacgttgacaatctggattttgttgcggtgacagatcactccaactcgtttgacaatgcggacagcgcgtccatctcggacggctcgatgagtgaggaatggaaggaaggccatgcgcttgccacgcagtatacgacaagcggatttgtgtgcatctatgggtttgagatgacctggtcgaacggacttggacacatcaatacgtttaacaccgaaggcttccagagccgtacccagaatgagtacaagacttacagcacggcattgcagaattattacgcgaccttaaagacacggccggattccatcagccagtttaaccacccgggaacgacgttcggtgatttcagcgatttcgcatactatgacgaggagatcgacaagctgattacgacgatcgaggtcggaaacggcgagggtgcgatcggaagttcgggttacttcccgtcctacgagtattaccagcgcgcgctggacaagggctggcatcttgctccgaccaacaaccaggataaccataaaggcttgtggggcgatgcaaacacggcgcgttccgttgtccttgtggacagcctgacgcaggaaaatatttacgatgccatgcgcaattaccgcgtgtatgcgacagaggataacgacctcagcatctactacacgctggacggctacatcatgggttctattttagaggatggagcgaccggagataccgtacatctttccgttgacttaagtgatccgacggatgcgtccatcggtaaagtacaggtcattacaaacggaggactggtgcttgccgagaaaaatgtttccggaaacgaggagacggtcacctttgatgtgaaaaatgattattcctattactatatcaaggttgtggaagcggacagtgatatcgccgtgacggcaccggtatgggtaggctctgtggaggcggcaggaattgacagcttttccacggacgaggtgcttccggtaaagggagagccgctgacggtgaaccttggactctataataatgaaaacagcgagctcgcgattgattccataacgtttgaggtgggcggagagaccgtacatgaggcggatcttgccgcagcaggattgggaagcgtcgcatccatgagcacgggaagctacagctttgactatacctatgacggcgtcggcagcatggagatgacagcagttgtgcatgcgacgatgaacggcgtgcagaaggtatacaagagcgtcttaaaattaagctacgcgacaacggagatggtgacaaaggttatcatcgacggaacccattacaacgattatgtgaccggttactatggcggtaacgtcggaaactttacggcgattgcgggagcaaagaacgtcaaggtggaagtggtcacagacgagattacgccggagatgctggagaactgtgcattgcttgtgatctcggcaccggcgaagaaatccggaacagcaaatgccggagactacaccgtgtcgcattttgaagacagttttatccagatggtaaaagactataccgacaatggcggtacgctgattacctgcggtattgccgattatcaggattctacttcgggacagacggcgacagagatgaataagcttttagcttcgatcggggcatcgaccagattaaacagcgacgaggcgtacgacgagacgaacaacggcggacagccgtaccgcttatatctgaaaggaacctacaacaaggattccagatatctgcgcggcgcaagcgaggagcaggagtacagcgcatacagtggatgtaccgtggcgctggatgcggatgcggtggcagccggacgcgcggaagcgcttgtgagcggatacgatacaacgtattcgatcgactgcaaggatgatgtgggaaacagagttaccggaagcccgacgtatgtggaaaaaggtaatatggtagcactcgcacatgagacactgggaagcggtgcaaatgtctttgttgccggaacggtctttatctctgactttgaggtgaaggcagaactggacaatatctgggatctgccatacttaaaccgcacgattgcagaaaatattttagatgaagtgaaagtggaacttccgctgtctacgattgcggaagtgcgtaagaacggtacggcgggcgatgtctaccgcgtggaaggctatgtgaccgcaggaacagccgtggagggcaacaccttctttgatacgatctatatccaggacgacaccgcgggaattgatattttcccgtatgcggagagcggacttgccatcggaaccaaggtggagattaccggatatgtggacgcctaccagggcgataaagagcttaaggtgataagcagccggattctggacgaggagccgaaggtgattgcaccggagaaactgtcggcaaaagacgccatggactatgaaaagtccggcggtaagctggtacaggtggagggaacggtaacggatgtactctatgatgcggcgggcaccggcgtatcacagttctggctggatgacggcagcggcatcaatgccaatattttcatcgacggctatatcttatcggctacgacaggaaagaacgaactggcatcggttgtggcgacaggagaacgcgtgtcggcagtcggcgtggtctatgcacatccggagggaacctcggatgaggcagtgacctgtctgcgtgtaagaaactgtgatgagattgtaaagacatcatccggacagataccgggggatacggagacaccgggagatacggagacaccgggagatacagagacaccgggaacagattcgtcagacagcggaaatgacagcgcggacggaaatggaaatggcggaagtgtaagcggcagcgtgactgtatcggacggacagacgacagatgcggtgacggttgcttcgcagaatgactgggatccggtcagaaacagagtgacagcggcatccgccggcagcacaatcacggttctccttgcagacggtgtttctgtgccgggagatgtcattgcggcagtgcgcggaagggatgtacgtctggtatttaggctggcaaatggaatcgtgtggacgattgacggaagaaacgtgacatcggatacggttccgaatatggactttggtgtgacgatcaacagccatgccgtgccggatgcgcttgcgagacagaccgcggcgggaagaacttatttccagatcagcttaaaccatgacggcgcattcggttttaccgcagtgatgacgctgccggtgggaacacagtatgcgggcatgtatgcaaagttatattattacaatgaagcaaagggacggctggaactggcatcgtccggaaaagtagatgcaaacggaaatgtggagcttacctttgtacatgcatccgattatgtggtggtgctggatcagatgcctgcagtgcagacgggagatgacactccgtttgcagcagcagtgatgatgcttcttgcaggtatggttctgcttgcagcggcagcacgcaaaaaaaggatatttttgaaataagggtggttaaaacatgaatttcaaaaagagcaagatacgcagcctggtgcttctggcactggctgccgttgctttttgcggactgatctggttcgcgaataaagacagaccggtttaccggagcagcaacatggcggggacggactatgaggtcggaagagtcctgcgggttgtggaggatcacaagacggtggaggaggagatggacggaatctggcggggaagtatgacgctggaggtcgagatccttaccggacgttacaagggcgacacggctattgtggaaaattatttcagctccctgtacaacgtcagggtggcggagggagataaagtctccatccgcatcgacacgacgggggaggacgaatatcaggtctcggtctacaattattaccgcgttccgcagatgattggctgcatcgtggcgtttgtgctgcttctcgtattgatcggagggaaaaaaggtgcaaaatctgtggcggggctggcgtttaccgtggtatgtatcctctggattttactgccgcttgcgctgaagggttactcgccgctggcggtcactatcctgctcattctggtctgcaatttcgtcagcttcttcctgatagacggcatctcgaccaagacggttgtggcggcaatcggaagcatgctgggtgtgcttgcgggagcagtgtttgcactgatcgcgcagaataccatgtcgattacgacctaccagatggatgaggcggagacactgcttctgatcacaagcaccacggaactgaagatccgggatctgtttttgtgcggtattctgatttcgtgtatgggagccgtaatggatgtggcgatgagtatttgttccgcggtggcggagatccatcaggtggaccggtcgcttggcatggcgaagctgtttgcctccgggatgaatatcggaagagatgcgatgggaaccatggcgaatacgctaatcctggcagtcgccgggacatcgctgaatatgatgttgatgatctactcctatgatgtcagctttcagcagctgatgaatacggactttgtggcgatcgagattatccagtgtattgcgggaagcgtggggatcgtgtgcacggttccgctggtagcactgctgtccgctaccgtatttggaaaaaagacaaaaaaatgagactgcactatggcaggatgacgatctgccgctgatattcggaggcggggggaacgtcatgctcctgcatacgggcggcgcgcagaggcgtgccgcctttttgattgcgcatctgcagatagagatttccggcaaacacatcgtgctcaaatattcgcatggcatccgaggacaaaagctttggagcctgcgatggccgtgtgataagtggaactgcagcggatgcctttaacgcggcaagcaggggagcagcgcttttccgaaagccgagaatgcgcaggtagggaattttatccagtgcattgccgcatgcgtaatcagaagaagtaatgccaaggatggagtgcagcaaaatgcggttgatgcgcgtgagcgtcatttctttgctttttaaccgtgacgcgaaggaggaaaaagaggtataataaggaagctggttttgcatgcggttggcaaactccggggaggaatcggcggtccgggcgagctgcgaggcagaactgcttaacaacagataccccaggatgccggaaaagtcatcggcgcacagcagcggaaaatctgcccggtagtcctgcaggatggccagtgcttcctgcggcatggcatgacgcagaatcccggcggcagaattcccacatgctccggcagcgtcggcgaagagtgtatgccggatcgcggatgccgaggccgggatggcagatgcaccggagaggatggacgtttcgtggtacgcggcgccctcccgctttagcagatagggcgtgatcgaagacgcgcggcggcgcagcgcttttaagtattccagagccagtatgttgttcggggaggcgagcagggaggagagcgcctctgcggatacgggcagggcgccatcctgaccggcggagccggaaaaatacgagagcagggcagcttcccttgcctttgggaatgtactgccggattttaggttgtgcttcagggaagcctttaaatccgtcggttcatccgcgagaacgtccgcaatgcggcgaaggagggcaaggtcgccgctctcagcgccaaaacagatgccgtttacgcagcccgttttctcaaagagggagattccggcgtccgcgaaaagctctgcggaagcggtggaccagagtacgggaagctcgagcacgacatccgcacccgaggagagcgccatgcgggcacgggtgtatttgtccagaagggcgggctctccgcgctgtacatagtcgccgcttgtggcgacaacgatatagtcggcgtgaagattttttctgacatgcgcgatctgataggcgtgcccgttgtggaatgggttgtattctgcgataatgccaatgacgttcatggcggatcctcccgtactgcaatgtaataaaaactgtagctatcatagcatactgtgaaatagaaaaaaagaaaaaggagcatttcacgtgaagagaaacagaaacattggatcgattcttctgattgcggcagggcttttgctgattgcggcagccctttatgaactgatcccggcgctgctcgcgtacaagcgggcggacgatacctacgaggcgctgcgcgagacttatgtgaccggacagccggggacatcttcggatgatccggcggaggagggagaggagctgccggcatggtatgaggcattgcaggtggattttgagacgctaaaggaagcaaatccggatgtgatcggctggatttattttgacaatatagagcagatcaattatcccattctgtattccggggatgacgagacctacctgcataccgatctctatggaaatgcgtcgaaatccggctgcatttttatggaggggaacaacgtccccgattttaacgactgccacacgattctgtacgggcacaacatgaaaaacggaagcatgttcggttcgctgaaacaatataaaaacggcggcttttatgaaaaaaatgcgtattttaccgtgtttacggaggatgcagcctaccgctatcagatttttgcgtacagtgatgtcccggaagattcggatgtctatacgaccggatatctgccggatgagacttttgacgggttcctcacagaactgcttaagtcctcctacaaggatacgggcgttgcggtgggaaaggatgacaaggttctgacactgtccacctgctcaggcgacgggctgcggtttgtggtgcacgcggtgcgggttgatgaacacgaaagcggaatgtgactgttaaatttttgtcaggctgtttttcattttgtacaagaaaactggcaattactggcttgtttcgtgggcgtgacaagcgtatactaaaattatatgcggtctgtgagagacagaccttcgcaaaacaaggaggcagatcctctcctcgccagagggctcggattttgcttcacaaaacaaggaggcagatcctctcctcgccagagggctcggattttgcttcgcaaaacaaggaggatattatgaacgtattagttatcaactgtggaagctcttcattaaaatatcagctcatcgattctgagagcgaagcggtactggcaaagggtctctgtgagagaatcggaatcgacggaagactggtataccagaagaccggactggacaaagagattacagaagctgcaatgccgacacacaagcaggcaatccagatggttctggatgcactggtgaatccgaataccggcgcaatcgcaagtctctccgagattgatgctgtcggacatcgtgtcgtacacggcggagagaagttcgcagcatccacacttctgacaccggaggtattaaagggaatcgaagagtgcaacgatcttgcaccgcttcacaacccggcaaacctgatcggtatcgatgcctgcaaggaactgatgccgaacgtgccgatggttggcgtattcgataccgctttccatcagacaatgccgaagaaagcatatctttacggtctgcctcatgagtattatgagaaatacaaggtcagaagatacggtttccacggaacaagccacagctttgtatccaagcgtaccgcagagttccttggcatggatcttaaaaattccaagatcattgtggcacatctcggcaacggcgcatccatcagtgcggtattaaacggtgagtgtgtagatacctccatgggtctgacaccgcttgagggacttgtcatgggaacacgatccggagatattgatccggcgatcatggagttcatcgcaaagaaagagaaccttgatatcgagggtatcatgaatgtattaaataagaagtccggtgtacagggaatgtccggtctctcctctgacttccgtgacctgcaggcaggacacgaggcaggcaacgagcttgcaaccaatgcgatcgaggtgttcagctatcgtgtggcaaaatacatcggctcctatgttgcagcaatgaacggcgtagatgccatcgcatttaccgcaggtatcggtgagaacgtgaacctggttcgcgagaaggtaatgtcttatctcggttatctcggcgtgacggtagaccaggcagtgaacgatgcaacccatggcgatgaggcgatcatctctaccgcggattcaaaggtaaaggtatgtgtgatcccgaccaacgaggagcttgcgattgcaagagagacggtagcgcttgtaaaatagtttttgctgtcaaggaaaaatccttgacaaaaaagcaaaaaagtgattgacaaaccaggggcgtctatgtataattggttaggtgtgaaaacctcatatgtatgaggcgaaggagtaaaccatgcagatcgatatttcagagattgtatcttgtgagaacagagaagttaccgagaaggttcatatcgagcaggatacgtttgtatcgaggcttggtgagttcccgatcacagagagcgcgccgtttgatcttaagattgcgaaccgcgagggcagtgaactgcttttgagcggggagacagatcttacagtatcaatcccgtgcagcagatgtcttacggaagttccgacggacatccacattgtcatcgacaagaagctccgcatggacggaacggaagttgtggatgatgaaatggaagaaacagactacctgattggattaaatctggatatagataagcttatctatggagagattttggtgaactggccgatgaaagttctgtgcagagaagattgcaaaggaatttgcaaggtgtgcggaatgaacctgaataaggggaactgcgattgccagagaacagaactggatccaagaatggcagcaatccaagatgtctttaacaaatttaaggaggtgtaagtaaatgtctatttgtccgaagaataaatcttccaaaggaagaagagataaaagaagagcaaactggaaaatgactgctcctgcattagtaaaatgcagcaagtgtggagagctgatgatgcctcacagagtatgcaagaactgtggctcttacaacaaaaaagaaatcattccgcaggactaattccagcggtacagaagagatccggatttccgggtctcttttttgtgtaataggaaggaagtttcctaattacacaaaaacacttcgcggggatgcgcgcattttgctctttatctcgttaaagaacaaaagtattaagaaaatgctaaaaatggctgcatttttttattccagatatttacaataatatctgtaacgtcacaacaacaaggaggaaatgttagtgaagaaggaattaaacgagacagaaacgaaacgttccgctaagagaaacggaatggctcgcagaattacagcactggttcttgcaggtgtgctgacattcggaggtacggcaaccgtatctgcggcaacattgagagatgtatttgatgcacagtattattctgagacctacagcgatctcaaggatacattcggcacgaaccagacagcattgtacaagcattataagacattcggtaagaaagaaggcagaacaagcaccgcacttatcgacgtacagaaatacagagcagcgtacccggatctggatgcggcattcggcgataactgggatgcatatgtgaatcactacatcaaatacggctttaatgagggaagaaattctttcggcacctttgatgcaagagcatacgcagacagatatccggacttaaaggcagcattcggttacgatgtgcttgcgctttacaagcattacttaaagtttggtagagcagagggaagagatgcgagcgcagctgtagcagcaacatccagctacacagagtcttcttacagcggatcttctaatacaggaagtgctgacaacggcaacaatacttctaccaacacagcaccgatcagaacaaacggccgtctgacaaacccggagacaggtgcaccggttgcaggcgcaacagttacattcagactgacaagcttcaatgtaacagcagaggaagcagaagcagctacagagtctgttgagacaacggctgagacgacagagtccacagaagctacagagacaacagagtctacagaagctacagagacaacagagtctacagaagccacagagacaacagagtctacagaagctacagagacaacagagtctacggaggcaacagagtctacagaggagacagaggagccggagaatggtctggttgtaggcgatggttactatgagattaccacagacgcaaacggttactatgagattccggaattcgtaccgggtgtatactccgttcaggcagcagctgttggttacttaaccttgacagtgaactccatcagcatcaacgctgacaatggaagcttcacattgccaacattccagctgttgagctctgatatgagcggtgtgaataccgttgcaggcgttgcaaagaatgcaaccacaggtcttggtattgaaggtgtaaccgtaaatgtacgtgcgaactggaacagtcagtccggcgatgtgatcgctacgactaccacagatgcagatggcagctacagctttttccttgagagaggttactactacactcttgagttcgcaagagacggattcgtatccacttttgtaaacgtagcaagctccaatgcaattggtgcatgcgaaggcgtattaagcccgaccagcacaagcgaggttaccagcacagaattcagaatcgttcttacctggggtgagacaccgagagatctcgattcccacctggttggattagatgataccaactctgtattccacatcgcttactacaataaggtagagagagatacagacggtaacgtgatcgcatccctggatgtggatgatgtaagctcctacggaccggagacggtaaccatcgtaaatgcacgtacagatgctacctattactattctgtaaaggattatacgaactattactataatgcttcatctacacagatgtctgcatccggtgcaaatgtaaaagtatatcagggttctgctcttgtgaaagagtacaatgtaccactgaatcaggcaggtaccatctggaatgtatttaagattgagaacggaagcgttgttgacatcaacaactacaatgcagacgagaccacaatgtatggtgagtatgcatccgagtacaattactaaaatgattctttagggaaaacgctttgtgctgcgccttttgttccttgaccggggcgttatggaaagctataataaatgaatatggtacaagagaaaaactgatggaaacggattgaagaagaaatgcgtagagtgcatagatgcaggatgaaggcagtgctgatgctttggggtatagggcttttgctgggactgggaggctgtgcagaacagacacaggatgctgccggggaagagagcgggacaatggagcagataccgcagagcacggaacagatgccgcaaggcagcggacagactggagtggaaacagaacaaatggcaccgggcagcgggcagaccgggacgggaacggaacaagcggtacagagcagtgaaggaaccggggtggagacggatggcgcggaagacactatggaagcggtgctggagcaggcattgccgtgtgtggtacagatttatcacgagacgccggagggaggacataccgcgggttccggttttattatggaaatgacggatgatacggtgtatctgtgtacgaatcgccatgtcatagcaaagtacgacgactgggatgtgtatttttatgatggaacctgcatcccgggaagcaaagcgggtaccgacgatgtttatgatgtgggcgtcgtggcggttgaccggacggcgattccaaaggaagtgcaggaaaagctaaagacggtgtcgtatgatcttgcgagctgggaagaacttggcaatgcagagttgccggtcggaatcgtgcgcatcggacaggaaggcaatgtgctccacacgctgacgggaagtcttcttcggaaagagacggaattcctgtggggacagggagagaaggagacggaagtgcgcctggcggttactgacggggattccggatcggcggtttttgatgaaaacggaaaacttgtcagcatgatattcggatgttcacaggatgccggaggggagcgcgactggggcgtcccgcttcgggcgatcgtgtcatgttatgagaaaataacaggagaaacataggagacagaaagaaggattcatatgggtgatttttttaatttggataataagttttttcagggactcagtaaggtggttgactgtgtgatcctaagcgtgctgtgggtgttctgctgcatcccgatggcaacgacatttttcctggcatggcagagcgcatcagtattcggatggattctgtgctggctgacatcgtttctggcgggaccggcaacgacggcgctctattatgcggtcaataaggtaatccggcacggaagaagctatctgtggaaggaatactggtatgcgtttaagagcaactttaagcaggcggcgctcgcagcgctgattctgacaggagtggttctgtttctgggactggactgctatattatgtatcagtttgctgcgcagggacaaaagagcggcgtgctgtatgtggttttcctggtactgattgtgcttgtcgtgatgctggcggtatatctgtttgcctacatggcacgctttgagaacagtctggggcagtcgtttaagaacgcggcgctgattgcggtggcgaatcttccgtggtcgctacttcttctggtgcttctggcagcgagcgcctttggcttgtggatacttccgtggcttatgatactgcttccggcagtctacatcctggtggcgaattttatcctggagcgcattttccgcaagtatatgtcggcggaagatctggaggcggagcaggaacgaaatcaggaatttttcaattagaaataagcgtattttttattgttgatttatagaaagagttatagtatattcattagtaggcgtggagaactagactccggcaggacagatgggagatggagtatgcagcagagcagcggggctgtgaggacaagaatcgtattggatgcgatgggcggagactacgcaccggcggagccggtcaagggcgcagtggatgccgtgaacgcacggtcggatattcaggtgctcctggtaggacaggaggatgtcgttcgggaagaactggcaaagtatacgtaccccggagatcagattcaggtggtacatgcagaagaggtgatagagactgcagagccgccggtgaatgcaatccgcaggaagaagcagtcatccattgtcattggaatgaatatggtaaagcagaaggaagcagacgcatttgtgtcagcgggaagttccggtgcgatcttagtcggcggacaggtgattgtcggtcgcatcaaaggcattgagagaccgccgcttgcacctttgattccgacggagaagggagtctctcttctgattgactgtggagcgaatgtggatgcgagagcttcgcatctggtgcagtttgcgaagatgggttccatttatatggagaatgttctcggagtgaagaagccgagagtggcgattgtcaatatcggtgcagaggaggagaagggcaatgcccttgtgaaggagacatttcctctgctgaaggcgtgtgaagacatcaattttgtgggaagcattgaggccagagagattccgaagggagaggcggacgtgattgtctgcgaggctttcgttggaaatgtcatcttaaagctgtacgaaggactcagcagtacgttaatcggtgccatcaagaaaggcatgatgagcacgttgaagagtaaaattggtgcagcacttgcattgccggcattaaagtctacgttaaagactttcgatgcaacacagtacggcggtgcaccgcttctgggactgaatggtcttgtggtcaagacgcacggaagtgcaaaagcaaaagagattacgaattctatttttcagtgtgtgacgttcaaggaagaggacatcaatggaaagatcaggaaaaatatagtaagttctgcggaacaggaaggaatgtaggttatggaatttgaaaagctgaaaaaaatcattgcagaggttttgaatgtggatgaagaggagatcacgatggagaccacattcgtagatgatctcggagcagattccctcgatatttttcagatcattatggggattgaagaggaatttgacattgagattgcaaatgaagacgcagaacatattgtgaccgtatcagatgcagtagaagagatcaagaatgctttaaactcataagagacaatttgatgatgtgtcataaagcccttgtccggaaagcaagggcttttgttgataagaggaacccgcatggcggcgttgccgcggggcacagagattttgaggctttttcttactctatacaaaggctgtagggcaagaaaagacctccgaaagagacgaggaggataaggaaatgtcaaaactgacagaactggaacaagtgattggttatgagtttaacgagcagagactgttgcagcaggcgctgacacacagttcctttgcgaatgagaagcacatgaagaagctttcggataatgagaggctggagtttttgggagacgcggtcttagaggtcgtgtcgagtgagttcctctacaaggagcatacagatctcccggagggcgatctgacaaagctgcgcgcgagcatcgtctgtgagccgacgcttgcgctgtgcaccagggagattgaccttggaaagtatctgtatctgggcaagggggagaacctgaccggcggaagaggacgcaagtcgattctttcggatgcgctggaagccgtgatcggtgcgatctatctggacggcggttttgagccggcaaaagcttttatccaccgcttcattctgacggatattgagcacaagaagctgttctatgacagcaagacgattctgcaggaagtggtacaggggcattacgaggaaccgcttcactatgaactcatcggcgaggagggaccggatcacgacaaacgtttcctggtggaggcggtgatcggaaatacgacaatcggcgagggaagcggacataccaagaaggcagcggagcaggaggcggcatatcaggcattgctctggatgaaagagagaggtttatatgtatcttaagagcattgaagtgcagggattcaaatcatttgcgaacaagatcgtatttgattttcacaacggaattacgggaattgtcggaccgaacggcagtggaaaaagtaatgtcgcggacgctgtgcgctgggtgctcggagaacagagtgccaagcagcttcgcggtgccagcatgcaggacgtcatctttgcgggtacagagaaccgcaaaccgttaagttatgcctatgtggcgatcaccatggacaattcggatcatcagcttgccatcgattttgaggaagtgaccgtggcgagacgtgtgtaccgctccggtgagagcgagtatctgatcaacggaagtccgtgcagactcaaggatgtgacggagcttttttacgacaccggtatcggcaaggagggttactccatcatcggacagggacagatcgagcgtatcttaagcggtaagccggaggagcgcagagagctgtttgacgaggcggccggcattgtaaaatataaaaagcgcaaggcgacagcgcagaaaaagctggagaatgagcgcgagaatctggtgcgtgtgaatgatattttagccgagctggagcgccaggtcgggccgttggagcgtcaggcggagaaagcccgcatctaccttaagaaaaaagaagaattaaaagaatacgatgtgaatatgttccttctggaagtggagcgcattgaggcgcagcttaaggaagtggaaggaaaatatcacatcgcggacgaggaatcgaaggaagccagccagtcttacgagaatatcaagagtgaatacgagaagctggaacaggacatggcgtccatggatgacaagattgcatccattcgtgaggagatgagccagtccaccgtgaccaagggaaagctggaaggacagatcaatgtcttaaacgagcagatccacacggcggagatgacggatgagcatttaaagagccgtctggactcgatcgatcgggaaaagcaggagcgcatcgagtcgcgcggtacatacgaagcggaaaagcaggaactcgacgcagaacttgcagctgcggcgacggaaaaggagacggcggcagagcagctgcggaacattcaggaggagatcgcgcgctgcaccgagggcattgaaaagggcaagaacgagattatcgaactgttgaaccgcaaggcatccgtcaaggcgagacagcagcgctacgacacgatgatggagcaggtgaacatccgcaaggcgcagctgacgcagcgtctgcttgcgcgcaagaccgaggaggcggatcttacctccgttctggaaagctatcagaaggagctcgatgcggtaaacgcgtcgatcgcagaactgaagaaaaacgctgccggaatggatgagcagaaccgggagtggaagcgcaagtccctggaagccaatcagaaactggagagcgcggttgcacagtaccataagcagcagtcccgtctggagtctttgaaaaatattgcggagcgctatgacggctacggcaacagcatccgccgtgtcatggagcagaagagccggaatgcgggaatccttggcgtcgtttccgatctgatccaggtggacaaaaaatacgagacggcgattgagacggcactcggcggaaatatccagaacattgtgaccgaggacgaggtgacggcaaagcagatgatctcctacttaaagcagaaccggtacggacgggcgacgtttctgccactgacgagtgtggacggcaagggcaactttaaaaacacggaagccttaaaggagccgggagtcatcggtcttgccaataccctcgtgaagacggaggaaaaatatgctggagtgaccgcttatctgctcggcagagtgatcgtgacggagaatatcgactatgcgatcaagctggcgaaaaagaaccgctactcgttacatattgtgacgctggagggagaatatttaagcccgggtggttccatgacaggtggagcgtttaagaacagcagcaatctgctcgcaagaaaccgcgagattgaagaactcgagaagaacgtaaaagatctggataaacagattgcagagcttaaaaaccgtctggaggacatcaagacggcacagagcctgctcgcggaggacgtcgagagcaataaggcgagcctgcaggaggcgtacattgcgcagaataccgcgaagatgaacgtggagcgcgcgatggagcagaagaacgagagcgagaacgtgtttgcaggcttacagatggagaaccgtgagattgagagccagctccgtgagattgcggagaacaaggacaagattgcagaggaactgcagtcggcaaaggagcgggaggcacagatcgaggaggagagcgccggattccagaagattctggatgaaaatgcgggcagagcggaagaagcccagaaggcagtatccgatgtacagttaaaggaagctgccgtgcgccagaagttagagttcgttctgcagaatctggagcgtgtgaacggagagataagacgttacgaggaagagcgcgagggattcgtcacggaggcgaaggaagcgaaggcggacgccgagaagaagcgccacgatattgaggagatcaaaaagacgatccttgcgtcaaaggacaattccgagcagctggagcaggccctgaaggagcacacggcgcgcagggaagaaatgtccgcggaatacaagggatttttccagaagcgcgaagacatttccaagaaaatctccgatctggacaaggagattttccgtctgaacagccagcgtgaaaagctggaagaggcacatgagtaccagaacaattacatgtgggaggaatatgagctgaccctgcatgcagcaatggagcttcgtaacgaggaatatacagatcttgcggcgatgaagaagttgatcgcgtccatcaaggatgagatccgtaagctgggcgatgtcaatgtcaacgcgatcgaggattacaaggagatctcggagcgctatggatttttgaagacacagcacgatgatctggtcgaggcggagaagacgctggtcggtatcattgaggaactcgataccggcatgcgcaagcagtttctggagaagttcgcggagatccagaccgagtttgacaaggtattcaaggagctgttcggcggtggaaaaggaacgctggaactggtcgaggatgaggatattctggagtgcggcatccgcattatcgcgcagccaccgggaaagaaactgcagaatatgatgcagatgtccggtggagaaaagtccctgacggcgatttcactgttgttcgccatccagaatttaaagccgtccccgttctgcctgctcgacgagatcgaggcggcgctcgacgattccaacgtcggacgttttgcaaagtatttacataagctgacgaagagcacgcagttcattgtgatcacgcacaggcgcggcacgatggcggcggcagaccgtctgtatggtattaccatgcaggaaaagggtgtatccaccctggtatccgtgaatctgatcgagggcgatctcgacaaatagcaggaggaatgagtacattatgggcgaggaaaagaaaggcttctggggacgtctggtcgagggcctcagcaagacgagagataatatcgtatccggcatagattccattttcagtggattttccagcattgacgatgatttctatgaggagatcgaggagattctgattatgggagacatcggcgtcaatgcgactgagtcgatcattgagagtctcaaggaaaaagtgaaggagaatcacatcaaagatccggcagagtgcaaggaacttctgattaacagcatcaaggagcagatggatgtcggcgagacggcataccgctttgagacggagaaatccgtggttctcgtgatcggtgtcaacggcgtgggcaagaccacatccgttggaaagctggcgggaaagctcaaggaccaggggaaaaaggtcgtgcttgcggcggcagatactttccgcgcggcggcgggagaccagctgcaggagtgggcaaaccgcgccggtgtggatatgatcggtggacaggagggtgcagacccggcggcgatcgtctacgatgcggtggcggcagccaaggcgagaaatgcggatgttctgctgtgcgatacggcgggacgccttcataataagaagaacctcatggaggaattaaaaaagatcaaccgtattctggagaaagaatatccggatgcgtaccgtgagacgcttgtggtgctcgatgcgacgaccggacagaatgcgttaaaccaggcgagagagttttccgagtgcgctgacatcacgggaattattttaacgaagatggacggcacggcaaagggcggtatcgcagtggcaatccactcggagcttggcattccggtcaagtatatcggcgtcggggagacgatcgaggatctgcagaagttcgattccaaccagttcgtaaacgcattatttgaagtaggagaggagaaaagcggatgttgacattagacaagttcgaggaagcaagtgaaaaagtcaaagaagtgacacttgagacaaagctggtatacagcgattactggagtcagcagaccggcaacaaggtttaccttaagccggaaaacatgcagttcaccggggcatacaaggtgagaggcgcatattataagatcagcacattaagtgatgaggagcgtgcaaaggggctgatcacggcatcggcgggaaaccacgcgcagggtgtggcatacgctgcaaaatgctacggctgcaaggcggtcatcgtcatgccgaccaccacaccgctcatcaaggtgaaccgcaccaagagctacggcgcagaagtcgtgctttacggagatgtctatgacgaggcgtgccagaaggcatacgagcttgcggacaaggagggatatacctttatccatccgttcgatgatctggcagtggcaaccggacagggaacgatcgccatggagatctttaaggagcttccgctggtggagtacattctggttccgatcggcgggggcggactggcaaccggtgtgtccacactggcgaagcttctgaatccgaagatcaaagtcatcggcgtggagccggcgggagcgaactgtatgcaggcttccttcgcggcaggaaaagtaacgacgctgccgcaggtcaacaccattgcggacggcacggcggtcaagacaccgggaagcaagattttcccgtatatccagaaaaatctggatgacatcatcacggtggaggatgatgaactcgtcgtggccttcctggatatggtggagaatcacaagatgattgtggaaaactccggtctgctgaccgtagctgcgttgaaacatctggatgtttccgacaaacgcgtggtatcgatcttaagcggcggcaacatggacgtcatcacgatgtcctccgtggtacagcagggactcattttccgcgaccgtatcttcaccgtgtcggtacttctgccggataagccgggagaactgtccaaggtttcggcagcgattgccgcagagcagggcaacgtcatcaaactggagcacaaccagtttgtgacaacgaaccgcagcgcggcagtggaactccgtattacgctcgagagctttggcaccgagcacaaaaaacagatcatgaaagcgctggagaagaaaggttataagccgaagctggtgcgcacgagtctgtaaacaaagaagaggagaaagaaaatgttagaaaagtggtttaaactgaaggaaaacaacacgacagccaagaccgaagtcatggcaggtatcacaacctttatgacgatggcgtacattctggcagtcaaccctaccatgcttgcagcggcgggaatggataagacagcagtgctcattgcaaccgcgctggcatcatttattggtaccatggcgatggcgctccttgcaaattatccgtttgcactggcaccggggatgggactgaatgcgtattttgcatacacggtctgcggtgcgatgggatattcctggcaggtagctttaatggctgtttttgtggaaggtctggttttcatcgtactttctttgaccaatgtgcgtgaagcaatctttaatgcgatcccgctgaacctgaaaaaaggtgtgagcgtcggcatcgggctgtttatcgcatttatcggtctgcagaatggcggcatcgtagtggcgaacagctccacacttgtttcctatgttgactttaccagcaatttcaagactgccggcatctgtgctttgttagcgctgatcggtctgtttgtgattgcaattatgtacattaagaacgtaaaaggcgcgattttattcggtatcgttattacctgggtgcttggaatgatctgtcaggcggcaggaatctatgttccggatgcggaagccggtttttattccctatacccggcgctcggatttaccgacctgaccgcgatcggtcagacattcggacagtgcttcaaactggatttctccaatgtgcgtgtctttgacttcatcgcagttgtatgtgcatttttgtttgtagatatgtttgatacactcggaacgttaatcggtgtggcaaataaagcggatatgttggacaaggacggcaagctgccgcgcatcaaggaagcgctgttagcggatgcggttgcaaccaccgcaggcgctgtgctcggtacctccacaaccaccacgtttgttgagagttcctccggtgtggcagcaggagcaagaacaggtctctcctctgtagtgaccggattcttattcctgatctctgtggtactgtccccgattttctgctcgatcccgagctttgcgacagcaccggctctgatcttcgtcggcttccttatggtgtctacggtgacaagcatcgagttcacggatatgacagaggcaattccggcatacttatgcctgcttgcaatgccgctcatgtacagcatctccgagggtattgcgatcggcgttatctcttatgtcatcatcaatgtcgtatgcggtaaggcaaagaagatcacaccgctgatgtatgtgctggcggtactgtttgtgtgcaaatacatcttcttataaaatgaaaaccgaaggtatggaggtatccctatgcgcagatggataaaacagatcatggtctggctggctgcggcagcatgcggtattgctgcggcgcttgtgatctgcagatggagcggcactgccttcggtctttttatgtggccggtcattgccgcgggggcagggttcgtagtggctggcgtgggatttttttcaacagaaggaaagagtgagattctctatggaatctgtgcggcggcatgcctgttctgcatgatcgtgcagacggcgatggcggtgtaaaaagaaggaaaaagtgtgtcaagaaaaaatacttgacacctttttccttttatgctattctatcacggtggcaatgagtgagagatgccggatacggcgtgattgtgggatttcagatggaagagaagattgaacaggcgtatctgtatgatttttacggagaactgctgaacgaacatcagagaagaatttatgaggatttcgtgttcaatgatctgtccctcggagagatcgcggacgaggaaggtatcagcagacagggcgttcacgatatggtgaagcggtgtacgaagacccttgaggggtatgaggagaagcttcatctgatcgcaaagttcatgtcggcgaagcacagcgtggaacagattcatgcattgacgaagcagtttcatgagagccatgacgaggcagtgatcgtggagattgaacagatttccaatcagatattagaggagttatagatggcatttgacagcttatctgaaaaacttcaaaatgtattcaagaacctgcgcagcaagggacggctgacggaagcggatgtcaagacagcgcttaaggaagtcaagatggcgctattagaggcggatgtcaacttcaaggtcgtcaagcagttcgtcaaggacgtggaggagcgtgccgtcggacaggacgtgatgaacggactgaacccgggacagatggtcatcaagattgtaaacgaagagatggtcaggctgatgggctctgagacagccgagatcacactgcagcccggcaaggcagtcaccgtcatcatgatgaccggtcttcagggagcaggtaagacgaccacagcagcaaagcttgccggaaagttcaagcagaaaggcaagaaggtacttctcgtggcaggcgatgtctaccggccggcagcgatcgaacagctgcagatcaacggacagaagcaaggcgtggaagtattttccataggtgataagaacagcccggtgaacattgcaaaagcggcgatggaacatgccgcgaagaacgattttaacatcgttatcatcgatactgccggacgtcttcacattgatgaagatatgatggcagagttgattcagataaaagaaaatgtcacagtgcatcagaccgtccttgtggtggacgccatgacaggacaggatgcggtgaatgtggcgaagacctttgatgagcgcatcggtatcgacggagtcattctgacaaagctcgacggtgataccagaggcggtgcggcgctctccatcagggcagtgaccggtaagccgattttttatgcgggtatgggagagaagctttcggatctggagcagttttacccggatcgcatggcatcgcgtattctcggtatgggcgatgtgctgaccctcatcgaaaaagcccaggaggactttgacgaggagcgggcgaagaagattgagcagaagatgcgcaagaacgaatttgactttgagatgtatctggagtcgatgagtcagatgaagaagatgggcggtctgtccagtatcctcggtatgatgccgggactcgggatgggcgcaggcaagatgccggatattgacgaggcagcagccgagaagagcttatcgcgcacggaggcgatcatctattccatgacgccggaggagagacagaatccttcccttttgaatccgagcaggaagcgccgcattgcggtgggagccggtgtcgatattgcggaggtcaaccgtctggtgaagcagtttgaacagatgaagaagatgatgaagcagatgcctggcatgatgaagaagggcagacgcggtggtggaatgttcggcaagcttccgttttaatgttagaaattgcgtataacgcattctaaatagatcagttaagcaaatttaaggaggtgaaagtaatggcagtaaagatcagattaagaagaatgggacagaagaaagctcctttctatagaatcgtagtagcagattccagatccccgagagatggcaagtgcatcgaggagattggaacatacgatccaacgaaagatccaagcgagtatcatgtaaatgaggagttagcaaagaagtggttagctaacggagctcagccgaccgatacagttgctcgtattttcaagagcgcaggcatcgagaaataggattcgcgaggtggacctaatgaaagaattagtagaagtaattgcgaaatcactcgtcgattatccggatcaggtcatcgtaacagagacagagaatgagaaagccatcgtgcttgaactgcgcgttgcgcagtccgacatgggcaaggtaatcggcaaacagggacgcattgccaaggcaatccgttctgttgtgaaggctgctgcctcaaaggaagagaagaaagttattgtagagatcatgcagtaacaggtcagaggagctgtcgcgccagataatggggtggcagctcctttgttcatattgcggctactgcggatatcagagacagaaacggaggacatgcatggaagatttattgcaggtcggtgtcatcacgacgacacacggggtgcgtggggaggtcaaggtatttccgacaacggacgatccagcgcgcttcaaaaaactcaaaaatgtgattttggataccggaaaagaaaaattagaacttgagattgcaggcgtcaagttctttaaaaatatggtgattctcaaatttaagggaattgatgatatcaatgatgtggaaaaatatcgcaaaaagagcctttatgtgacgagagagaacgcggtaaagctgaaaaaggacgaatactttattgcagatctgatcggcatgaaggtgtcgacggacgagggtgaggaattgggaacgctgtcggatgtgatgcagaccggcgcgaacgatgtctatgtgatctccatgacagacggggaggaagtgctcattccggcgatcagggactgcatccgcgatgtggacgtagagcagggacagatgtgcgtgcatctgcttccgggactgcttgacatcaaccgaaaataggaggcacagcatgaattatcatattctgacactgtttccggagatggtgacgcagggactctcggagagcatccttggacgtgcggcaaaaaagggactgctgtccgtgaatgcagtcaacatccgggattatacggcggatcgacataaaaaagtcgatgattatccttacggcgggggagccggcatgctgatgcaggcgcagccggtctacgatgcgtggaaggcagcctgcgaggaaatccggagccggcagccggaggagctgcgggacagaccggtgcgcacggtgtatgtgacgccgcagggagccgtgttcaaccagcagatggcaaaggagttcgcgaaggaggaagatcttattttcctgtgcgggcactatgaggggatcgacgagcgtgtattagaggagaccgtcacggactacgtgtcgatcggcgattatgtgctgaccggcggggaacttccggcgatggtgatgatagacgcgatctcacggatggtgcccggggtactggcgaacggagagtccggggagacggagtccttcgagggcgatctgttagagtatccacagtacagccgcccggaggaatggcacggaaagcaggtgccaaaggtgctgctgtcgggcaatcagagaaaaattgccgagtggcgcagacaggaggcggagcgccgcacacaggagaggcggccggatctctacgcaggctacgagagactgatgtcctgcaaaaaggtgcttgccggggacaagctgctgcatgtggatatgaccgagctgattgcgcgcgggcaggcgcgccttgtttttgcagaagggaaaaatatctgtctgcaggataaagtcagtggggcgtattttcatacggcggaggacatcaaagccggctgcaggatgcttgaaattctacacggggacgccggggaggagagcggccttctggtgctgcatcaggagttcatgacggaaccgacagaaaaatatctgggatttcgcacggcgatgacctgcaaccagatcgtgtatacaaagcacgaaaagctgcctgtcaccggactgtaccgcatggacggcaaaccggctgaaaacggcgtggtcatccgtccgcttacgatggaacacttagacgcggtggtgcgcgattacaatacgatatcggatgaggcgtatgtgacagaccggatcaaaaaaggagcgctcttcggtgcgtttgtggacgggcagcttgcgggctttatcggaatgcacgcggagggcggcatcgggatgctcttcgtctcgccggagtaccgcagacgccggatcggcatggcacttgagacatatatgatcaatctcggattagagcgcggtgagagaccctacggtcaggttgagatcggcaatgatgcatccaaaggactgcaggaggccctgggactctgtttttctaagggacgcatctactggatggagcgtgaagagagagaatgaaaatatttgccgaaaatgcttgcaatccgtacaatctgtgttatactggaatagttgtgaataaatagatggtcctctgttacgaatcgacgtattaagaacatccaatgaatcaggaggtcacaaaatgaacgcaagtgaaatcattaagagcattgaagcagagcagctcaaggcagaagtaccgcagtttaacgtaggtgatacggtaaaggtttacggtaagatcaaagagggtaaccgtgagcgtatccaggtattcgagggaactgttttaaagagacagggcggaagcaaccgcgagactttcacagtcagaaagatctctaacggtgtcggcgtagagaagacctggccgttacattctccgaacgttgagaaggtagaggttgttcgtcagggtaaagtcagacgtgcaaagttattctacttaagagaccgtgtcggcaagaaggcaaaggtaaaagagcttgtaaaataatacaatgcagcgctaagaagccgggacatattttgtatggaacaggattccatatggagtgtgttccggttttttcgcattgtaaggcaccaaaattaaattgcgaagccacagggtttgtgttaaagtaaagcaggaatcgtgtgcggcgggcacatggcacatggaggataagaatgcgcagacgtagaagcggactgaactttggcagacagaagaaaaaagtgaatatgtcggtcgtgaaggaagtgtgtgtgtggatcattgagatcgcgatcacgcttctggtagcgtttacactggtatattttgtcggactgcggacaagtgttgtgggacagtccatggcggagacgctaaacggcggcgatgagatcctggtcaaccgttttatatacaaagttaccgatcccaggccgaacgatgtgattgtatttttgccgaacggcaatgaaaaatcacattattacatcaagcgcgtcatagcggtgccgggggatacgcttcagattaagaacggcgaagtgtatgtcaacggcgaactgtttgcggaagatgtggatgtggcacagatggaggatgccggactggcggcggaagaggtcacgctgggtgaggacgagtatttcgtgctcggcgacaaccgcaataacagcgaggacagccgttatgccaacatcgggaacattaagaaggaatatattatcggaaaagtatggttccgcgtggcgccgtttaaggactttggatttttataaaacagacagtaagagaatggagagtaattatgcagtttcagtggtacccggggcatatgacgaaagcaaagcgtcagatgcaggaagatatcaagttaatcgatctggtcatcgagcttgtcgatgcgcggattccgctcagcagccggaatccggacattgacgaactgggcaaaaataaagcgcggctgatcctcatgaacaagtcggatcttgcggacgaggaagcgggaaagctgtggagtgcatattttcagaagaagggctattatgtggtaagcctggattcgagaaacagaaacggcatgaaacaggtgacggcggtcgtcatggaggcgtgcaaggagaaaatcgagcgcgacagaaagcgcggcatcatgaaccgtccggtgcgggctatggttgttggaatcccgaatgtggggaaatccacgtttatcaattcctacgccggaaaggcgtgcgccaagaccggcaacaagccgggtgttacaaagggcaagcagtggatccggctgaacaagaatgtagaacttctggacacacctggaatcttatggccgaagtttgaagaccagacggtcggattaaaactggcgttaatcggtgccatcaaggacgagattttaaacatcgatgagttgtccctggagttgatcaaagtgctgacagcctactatccgggagcgcttcaggcgcgctacggaacagaggagcaggccatcgacgagacggcggcgccggcagagatcctgcgcgggatcgcggaaaaccgtcgctgtgtggcaaagggcgacgagattgactacagcaaggcggcgacgcttctgattgatgaattccgcagcggcaagcttggcaggatcacactggagcggcccgactagcacaggcagcgggaacatacggcgggagaggaagcagatggagacgaaaaagatcggagaaatcagggaagaattcaaggcggcagaggagaccatgctgccttcttttatcgaaaaatacaggtcggatgagcgcgcgggcgtacaaaagctcatcgagcaggcgaacggacgccttgcaaagctggaggcggagcgtgcaaggatcgaccggctgtggaagtacgagcgcgagtacgggatgtatacgcgcatttgcgggattgatgaggtggggagaggcccgcttgccggccccgttgtggcgggagcggtcattttgccgaaggactgcgacatcctctacatcaacgattccaagaagctctcggcggcaaagcgggaggaactgtacgatgtgattatggaaaaagcggtggcggtcggcatcggcatggtgggaccggagcgcattgatgagatcaacattctgcaggcaacgtacgaggcgatgcgggaagctataagcaaattgggcgatgcacccgatatattattaaatgatgcggtgacgatacccggggttgcgatacggcaggtgccgattatcaagggagatgccaagagcatctcgatcggcgcggccagcattgtggcaaaagtgaccagggaccggctgatggtggagtacgacaagatcatgccagggtacggattcgcagcgaataagggctacggctcggcggaacatattgcggcgctgaaaaaatacggaccaacgccgatccatcgccggagctttattggaaattttgtagaggtatagacgggaagagggaacatacatgcagatatcggatctggtaggacagtacagccggaatgtggccaacggaacggaagaattgcatggggcgcagagcgttcagaaactggtgtcgacgatcggggatctctccgcgggaagtattttcgaggggacgatcaacagtgtgcgcggcggaaaagtgacgctggcgctgggcaacggacagaccatcaccgcacggctggacggaaaaatggatttacagcagggctcgagcatgtttttccaggtgcgcgccaatgacgggcagacgattgcgatccgcccgtacaccgagcttggaaatgtcagcaatccgattctgctcaacgcgctttcggcggcgcaggtgcctgcgacggaccggacgcttgtgatggtggatacgatgatgcaggagcagatgtcgatcggcagacagagcattctcgatatggcgaagctggttggcgcgaatccggatgccaatgtgcagaccatcgtgcagatgacgaagctcggactcccggtgacggaggagatggcggcgcagtttgaaaattatctgtccgaccggcaggcactcgtgggagagatggatctggcagcgggacatatgatggaactgctttcggacgaggcgctctcgccggagacggcgttttctctctatgagaaaatgctcgatatttttatgcccggggcggaagcggcagatgccggagtgaccgcggcagcggaacaggaatcttccgcagcagaggcaggcgccggagtaatggcggaagcagtgggacaggaaaatgcagccacggtggcagaagcagaggcgggcgcgcccacggcggcggaacagggaaccgcagcggcatcggcagtagcggaggaggcaggtgccgcttcgaccgcggagacagcgggacagggcgcagcggcagaagcagagacaggggtcggagtgaccgcggaactgacatatggaaggacggcagagactccggggacagtcggggaactgttgtcgaaggagcagatcgagcatctgggaaaaatgcttcggaacattccggctctgattggcaacgaggagatttttgccggcggagagcaggaggaagtctttgtggatacgctctcggaagaaggtccagaggtggcaaaactgatggcgcaggaggaagcggcgcaggagcagccggtcttgaatgaaaaattgacggcagaacagtttttgcagaagctcggcagagcgctcgcacagaacggcgggttcggctttgcgggaatgcagaagctttttgccggaaaggaatttcagaccattttccgcagtgtgatcgagaagcaatggcttctgcagccggaggaattaaagcaggagcataaggtgagcgggctgtatgagcgcttagagcagcagctttcccagatggaggaggcggttcgggcgaccggaagcacgcagaatacgtttttgcagacggcatcgcaggttcacggcaatctggagttcatgaatcagatgaaccagatttatcactatgtgcagctgccgttaaagatgtccggacaaaatgcgaacggggaactctatgtctatgcaaaccggaagaatctgcgcgatccggatgcggaactgacggcatttttacatctggacatggagcagctcggctccacggacgtctcagtgcggatgcagaaccgcagcgtacgcaccaatttttatctggaggatgacgcctcctatgatctggtggaaaagcacctggaagtgctgaacaagcgtcttaagagcaagggctaccagtcttccatcacggtcacacatgagaaaaaagacatcagtttcaaggagaacatcgtaaagaaaggaaaggcgacggtgggaagcctgcaccgctattcttttgatgtaagagcataggaaagcaggattctttgaagggaggatgtggcgatggcggagaacaggcatattgcaggaaaagaaaagacggcggtcgccgttgcctacaatccgggcgaggtggcgccgaagatcctcgcagtcggaaaaggcgaggtggcggagcgcatcattgagacggcaaaagaaaacgatgttccgttttatcaggataacaagctggcggagaccttatccagacttcagatcggggatacgattccgccggaactctacgaggtggtcgcggagatccttgtctttgtggacgatatggaccgcatgaagggaaaactcaaagaatccggcttactgtaggcagatgacagatgccgtgatggtaacagaaggcacgggaagaacccggacggcggaacgtggtgatggatcggacgaaaggcagggagagaggataccggatgaacaggcggcagacgggaacagcgtatgagagacgggcgggggagtatctgaaggaacagggatacgagctgattggatacaatttcagatgccggcagggagagatcgacatcatcgcccgcgatggcagatacctggtgtttgtggaagtgaaataccgcagagacgggcagacgggcgatccgctggaggcggtggaccgggcgaagcagcgccgcatcagcagaacggcgcaatattactgcctgacgcacggatacggggagacgacgccctgccgctttgatgtggcggcggtgcttggaacagacggggaagtgcggcttgtgagaaatgcatttgaatttcagggatgacgggaggatgagacttgacagcgtttgtgagaaaagcagcagaggatgcggttttgcgggaggactggcatgaaaatgaggacggcagcaggctgctgctgttaaaatatccccttttggagcgcacggggatcgtggagcattgttttacaacacggctcggaggcgtcagtgcggatattttttccacgatgaatttaagctttaccagaggcgatgaggaggctgcggtgcgtgaaaattaccggcgcctggcgagggcactcggggcagaggtggggcagtttgtctgctcggatcagacacataccgtcaatgtgcgccgcgtcacggcagcggacgccggaaaaggactgaccagagagcgggactaccgggatgtggacggactgattacggatgagccgggacttgtcctgtcgacgttctacgcggactgtgtgccgttatatgtggtggatcccgttcaccgcgccatcggaatgagccattcgggctggagaggcacggcggcgcgcatgggagcggtcactctgtctgccatgcaggaggcatacggcaccagaccagaggatgtggtctgcgcggtcggtccgtccatttgcaaggactgctatgaggtgagcgcagatgtggcagatattttcgcggaggaatttccggggcatgagcaggagattctggcagagagtgagaagaacagcgtcgggatggctcacgcagacaaaaaataccagctggatctctggaaggcgaacgagatcatttttcaggaggcgggcgtgcgaaaagagcatctggcagtgacggacatctgtacctgctgcaatccaaagctgttgttttcccaccgcgcaagtcatggaaagcgcggaaatctgggcggatttctgtacctgaaataaggatgtataagatcgtcctccaggtatggtctgtagatagaattaaatagaaagcggaaaaggagaaaaaagatgaagacaaaaaaatacgtggaatatatggtcgaggagacaaagaagattctggcaatcgacagcccgagcggatataccgcagatgtggcggattatgtgatgaaagcgtaccagaagctcggttatgagccgaagctgaccacaaagggcggcgtgctggtagcgcttggcggcaaggacaaaaagaatgccgtgatgctcgaggcacacattgacacgctcggcgccatggtagcggagatcaagtccaacggcagactgcgcgtgacaccggtcggcggaatgaacgccaacaatgccgaggcggagaactgcagaatccatacccgcttcggggaaaaggtctacgagggaaccttacagcttgccaatgcatcgatccatgtcaacggcgattacaatgacaagaagcgtacatttgacgagacggagatcgtgctggacgagaaggtacattccagagaggacgtggaggcactcggcatcatgacgggagacatcgtctgctttgatccgcgcacgaccgtcacagagagcggctacatcaagagccgtttcctggatgataagcttagcgtcggcatcctgcttggctatgcgagatatttaaaagaagagaatgtcacaccggagcgcatgatctaccagcacatcaccgtctttgaggaagtcggacacggcggagccgcttcgattccggagggtgtgactgaggttatttccgttgacatgggctgcgttggagacggtcttgcctgcgaggagacacaggtgtccatctgcgcgaaggacagccacggaccgtatcactacgacgtcgtgacgggactgattgcggcggcaaagcgcgaggaacttgactttgcggtggacgtctacccgcattacggatcggatgcggatgtggcgctgacggcgggctatgacgtgcgccacggactgatcggcgcgggcgtgtacgcgtcgcacggctacgagagaagccatgtggacggcgtgaagaacaccttcaaactcctgtgtgcatatctgggctgatgccgaagttaaataaaagttaataatttcataggattatctttattgtatgagggaaccttccatgctatagtagctgtattaagacaaatagtacagttggtacagatgggaggttatgatttgattcagttaaattaccgggactccaaaccgatttatgaacagatcaaggatggctttcggaagctgattatcacaaattctctttcggcaaacgagaagctgccgtctgtccgcgaactggcatccggactggcgatcaatcccaatacgattcagaaagcgtatcgcgatctggagagcgagggatatacatacacggttgccgggaagggaacgtttgtggcggagcacagggaaatcctgaatacgagacagcatgaactgctggaagagttcgatgaagtggtggaggagctctgtttcctgtcagtgagcaggagcgatctgatcacacggatcgaacatgcggcagagggaggagagaaggtatgattcaggtaaacggattaaaaaaggcatttgacggatttgtggcgctaaacggtgtggacatgcacgtggaaaagggagccatctacggtctggtcggaccgaacggagcaggaaagtccacactcatccgccacctgacgggggtgtaccgtccggatcagggagaggtgcagatcgacggggaaaatgtatatgagaataaggcggtcaaatcaaaaatcgcgtacataccagacgaactgttttatttcatgcaggcagacacgatggagatgaagcgtttttatgaggggatctatccgtcttttgatggaaagctgttttaccggatgcaggagtttttcccgaatattgatgtgaagcgcaatatcagacggctgtcgaaaggaatgcagaaacaggtggcattctggcttgccatctgctgcaagccggatattctgattctggacgaaccggtggacggactcgaccctgtgatgcggcgtcagatctggagcatcatattgtcggaggtcgcagagaaagagatgaccgtgcttgtatcgtcccacaatctgcgtgaacttgaggatgtgtgtgaccatgtcggtatcatgcatcatggaaaaatcatgatcgagcgttcgctgagtgatctgcagggaagtgtgtcgaaaatccaggtggcgtgtcagagcggaatgccgaagcttccggaacattttcaggtgcttcacatggcaaatacagggcgtgtgtataccatgatcgtaaagggagatccaaaggaagcagaggcggcactgtcatattgcaatccgacgattgtggatgtactgccgctgacactggaagaaatatttatctacgagatgggaggggcagattatgaagtcaaagacatcctgttttaaccgcacgatatttaagaagaacttcacgcatttctggccgctgtggctgctttaccagatatatctccttgtggtgattcccgtatgggtgtggcagaaggctgccagtccgtactactattatggaacggggaacgaggacacaacctaccgcatgtatcagctggtggagctggcagtacaccggatgatccctcctctgccggtctttttcttcgcagtggcagcggcgctggcagtgttttcctatctgtattcggcaaaaagcgccaatatgatgcatgcgttgccggtcaaccggctggaactttatgtgacgaattatctgtcaggactcatttttctgatcgtgccggagatcatcacattctttatcacagtgctcgtatgcctggcaaaccagtttacctgtatacagtatctgttcgctgcgctgttggcacaggctggtgtgacattttttgcatactcacttgcggttttcgtggcgatgttcacagggcaggcgtttgcaatgccatgctattatgtgatcgtcaactatctgtatgtgggatgcatgtttattgttgcaaaggtgattgaaaccatcagctacgggattgagaatgcatggaatccgggaaaaagctgcattttatcgccactttattatctgaacaataatcttcgcagcagtcttatctacacggagaacgggaatggaattaccggcattaagatcacgggcatgccgctcaccggaatctatgcggcggcagcagttgtgcttgtcgtggcggcttaccagttgtataaaagacggcagattgagacggcgggcgactgggtcagcatcgggatcatcaagccggtattccgctggggagcagcactttgcggaggtctggtcgtcggtgtcacggtcatatccatgctcacggatctgccgcagctgcgcaaatatccgtgtctcctgctttgcagtgtggcgatgggcttcctctttttcttcggggcagagatgctgctggaaaagaatttcaaggtatttcgcagaaaacgcgtgctggagtgggcggcgactgccgtgatcacagtggtgtttgtatccctgtttgaaatcgatgcattcggtctggagcgctatgtgccggaggtggcggatgtggagacggcgttcgtctatctggattatccggtgcaggtgaaaggagaagaacttgcgacactgacggagctgcagcgccagattattgcaaataaggatgcctatcaggaggtagaacgtaccggttcgggattttattatacaacgttcctgtattatatgcaggatggttccaaggtggagcggcggtatgcacttccactgcctgaggcggatgggggtgctgacagtacaccggcagagcagatccttgcgtgggagagcgagccggagaatctggagcgtgagatttttggtatcggaaattcagagtgccggtttacctctggatatatggatctgtatacttctacggggcttaacaatacgcacatgttttccgagaaggagattgagcagatcttaaaggccatccgggcggatatcgaggatggaaatctggcgaagtattatcagtattgcgagcagccggaagacacgtactacagcaacattgaactggaatattatagtacaggcaggtatgttgacaactggatgtattattatgactattataacagtttagagaagctggaaggaaaagccgtggacggtcaggagatgacagcgggcggcaatctgtatctgacgttcggaccggactgcgtgcatatcgtagagacgcttgagaaacttggcatcacaaatgacgagtggaagctgatgacgaaccaagagatgatgcagtagagatacggcaggaagaggaactgccgcacgaagcatattgtgctttgtgttgataagtaatatggtttagaaacatacttggggatttcatgtggaaatgcaggtggaaattcgtttgagaaaaatgtgagcatttcttccggctgaatgtttgcatcggattccgtgtctcttccacgtttggacaatccgacgggtgcatgtccgacacaccggagacaatgggcggactttctggtgtccctaatggcacctcttcacagacaatataaaaccgcgcgaaccgaactcgccggcatctgctattgaaaatagggcagatgccgactcagacagcggcttcgcgcggttatgttttgttcagaggtgccataagggacacacaaaaaagtcctacaaattgtctccgggatgcggacatgacccgcggagtgctccaaacttggaaagacacggatc

SEQ ID NO: 11573 - DNA, 718 bp, Unknown
  gut microbiota DNA sequence
agaaaggttaaatctgaaactggttatctctgctccagcggtttcctctacttctttgagttccagggatagcccctcaaacatatcatacaagttctttatggtttcttcggcaacaatgaccttcttttctgctgacacaggtgctccaacaaagtgatacatttctatattttcaacatcacctacctcaaaaggtaaatcaatattgactgtcttgttgttgcacctaaccaagccaagcacacaaaccactgctaaaactaatgctatcaactttttcatacaatcaacctccttcgtcaaattccgatttatccctctgccccatgcttacattgctcttcttccccctcaagttcctgcaacgcatgataataattttccatccacgctgcctgttcccgcgcttttaacgcttctgaatcctcctcctcgatgtcctcaggccactcttctccttcttgtaatccctgcataagcaaccagttgtgaggcatttgaaattgaagtatttctcccagatcactttccaacgtaaccgctgtcatcatcggctcgcccggcaagcgttcctcatctccatcatccatttcgtccattcgttgtattgtccacatttcaaagttcctctatcccagtgataagcccctcaaaaatattacgttcatattacgctccggcaaaagtccgggcgaggcgcgttcacatggcgcat

SEQ ID NO: 11574 - DNA, 1831 bp, Unknown
  gut microbiota DNA sequence
aaccgtctctgttcatacccgcagtgctcgtccgaaaaatcatagattttccggactgacgggcattcgccctatcatccgcaacatctgcgatatatagcctgcaagcagacatatatcgcagccgtcacgtctggcactgctcattgcatatgcacattatatcacatctttttttaattgcaaacaaatgttcgcttttgttataaaaagagttctctccacagaatgcattttcttataaagcaggaaaagacacccatccacttcgtacatatcactttgtacaagtaaacaggtgcctttttcccaaccagcgatcctgaaacgatcgcgctatttcttcttttgttatccgtaatttatataagaaagtctatgcttcccacaaaacacaatgataaagtcagtaacacaattactgattgtccatgcttgcagcaagcgcatccgcaagtgcctcaagctgtccttcctgctccggtgccatcgccgattttatggtgatctgtgtatctaggatcgtcacatttttcagttccgccagcttttctctcatctgctttgccgtcgtcggtgcccaggtgccgttctccatcaatgctacggtcttgttctggacggcaagcgctttcatgtcggcgagcaggttctccatcaccggatagatgcctccgttgtaagtcggcgccgcaaacaccacatggcttgcgcggaagatctcactgatgagctccgacacatgggtgttcgagacatcataaacggcaatcttcttcacgccctttgccgcaagtcttcctgcaagcgcatccgccgccgatgccgtgttaccgtacatggttgcatacagaatcacaaccgcctgatcctccgcctcataggtgctccacttctgatatttttccagaatatagcccagattctccctccagatcggtccgtggagcgggcagatcactgcgatctccagcccggaggctttctttaacaatgcctgcaccgatgcaccgtactttccgacaatgttcgtgtaatatcttctggcatcatccagccagtcgcggtcaaaatcgacttcatccgcaaaaatattgccgttcaatgcgccaaacgttccgaatccgtccgcagcaaaaagcaccttgtccttctcatcataggttaccattacctccggccagtgtaccatcggcgccatcacaaagtgcaatgtatgcgcaccggttgcaagcgtatctccctcttttaccgtcacggctctctccgcgaaatccgttccgaagaactgttttatcattccaaatgtcttggtgtttccgaccacctgcacttccggataacggcgcaccagatccccgatcatcgcacagtgatccggttccatgtgattgacaatcagataatccagtttccgtccgtcgagcacatgctccagattttcaaaaaactgtcccgccacggacgcatcgactgtatccaaaagtaccgtcttctcatccaataatacataagagttgtaggataccccgcgcggaattggaaatatattttcaaacagcgccagtcttctgtcactggctccaacccaaacaatatcctcagtcacttttcttacgttgtacatagtgttcctccttctgtccggcagtctgccgtctcatattctacctgtttggtatgaattataaatcagatttctggaaattgccacccaaaaatgcactctgtatgtatttttctgcatacagatgaaaatatgcaaaaagagcattcccggcaaaaattatctacctgaaatgctctctcctctgccgtttgcagcactcct

SEQ ID NO: 11575 - DNA, 4867 bp, Unknown
  gut microbiota DNA sequence
gcttatacttcttgccgcttccacacggacacggatcgttcggatatacctttgccgcagcacgcttcttcggcgtgttcgtcgcagactcatccttgttcgttccggtcactttcgctacctgctcacgctcaaccttctgctcaatcttcacatgatacagtagccggatcgtatcctcctgaatgctcgccgtcatctcgtcgaacatgtcaaatcctgccatcttgtactcgacaagcggatctctctgtccgtaggactgcagtccgataccctgacgaagctgatccatatcatcaatgtgatccatccacttgcggtcgatcaccttcaggagaacgacacgttcaagttcacggaactgctccggctcagggaactccgtctccttcgcctcatacagcttcactgcacgctcctttaacagatgcttcagttccttattattcttaacgctgtccacgtcctccggcgtcactgcctgcatcggaatcatggagaggatcagctggttcagttcattcagatcccactcttccttcggaatatcagaagaaatacaggtatctacacaattttccacacgatccgtgatcatcttgaaaatcgcatcgcgcatgttctctccgtccagtacgcggcggcgctccttgtagataatctctctctgatcgttcataacctgatcatactcaaaaagattctttctgataccgaagttgttgccctcgatcttcttctgcgctttctcaatcgcagatgtcagcatcttatgctggatctgctcaccttccggaacaccgagtgcattgaaaatgtccatcagcttctcagaaccgaacagacgcatcagatcgtcttcaagagaaatgaagaactgggactcacccggatctccctgacgtccggaacgaccgcgcagctggttatcaatacgtctggattcatgacgctctgtaccgatgatcttcaaaccgcctgcagccttcgactcatcatccagcttaatatcggtaccacgtcctgccatgttggtcgcgatcgtcaccgctccatgctgtccggcaccggctacaatctcagcctctttttcatggaactttgcgttcaataccgtatgcggaattccctcgcgcttcagcatgccgctgatcagctcggaagtatcgatattgatggtaccgacaagtaccggctgtcccttttcatgggattttaccacttcctccacaaccgccttgtatttttcattctttgtcttgtatacaacatcatgatgatcgatacgggcgatcgggcggttggtcgggatctcgacgacgtccatgccgtagatgtcgcggaactccttctcctccgtcaatgcggtaccggtcatacctgctttcttctcaaacttgttaaagaagttctggaatgtgatcgttgccagagtcttgctctctctcttgaccttcacatgctccttcgcctcaatcgcctgatgaagtccgtctgaataacggcgtcccggcatgatacgtccggtaaactcatcgacgatcataacctggtcgtccttcaccacgtaatcctggtcgcggaacatcaggttgtgtgcgcgcagcgccagaataatgttatgctgaatctccagattctccggatcagccaggttctctatcttgaagaactgctcaaccttcttcacaccatcctgtgtcaggctgaccaccttatccttctcgtttacgatgaagtctccggtctcctcctgctccacgcccatgatggcatccatcttggaatactccggcatgtcctcaccgcgcttcatctggcacgccagaatatcgcatgcttcatacagtctggtggatttgccgctctgtccggaaatgatgagcggtgtacgcgcctcatcgatcaataccgagtcgacctcgtcgatgatggcaaaatgcagtccgcgctgcaccagctgctccttatagattaccatgttgtcacgcagataatcaaaaccaagctcattgtttgtcacgtaggtaatgtcacagttataggcatcccggcgctcatcgttcgtcatctcgttcaaaaccacgccgactttcagtcccaggaattcatggacctgtcccatccactcagagtcacgctttgccagatagtcgttgactgtgacgatgcacacgcccttgccctcaagcgcatttaagtatgccggcagtgtcgataccagagtcttaccttcaccggtcttcatctcagcgatacgtccctgatgaagaatgataccaccgataatctgcacgcggtaatgctccatgccgagcacacgcttcgccgcctcgcgcaccgtcgcatatgcctccggaagaagatcatccagcgtctcgccgttctccagtctctccttatattccttcgtcttgttctttaattcttcatcggaaagtgctcccatcgcctcgcggtaagattccaccttgtcgacaagcgggtaaatccgctttaactcacgctcgctgtgggttccgaagatcttcgttattgcactcataaaaagctcctactcctgtttttacacaaaactgtgtcaaaatccattctcctgcggggctcctgcaagagggtatgaccccgcacaatattgttattgtaacacttttccagcaccaccacaataaaaacaggcgtaaaagaattgtaaattttttattaactgccgctttactgcaaatttttcttgcacacttccggttccatgttatactcaaaagtgatctgaacgatctattttttcaataaaggaggatttcaaaatgacatacacatataagaccaagggcacctgctccacacagattgatcttgaattagagggcaacatcgtgcataatgtaaagttcaccggcggctgcaacggcaatcttcaggcgattccgaagctcgtcgagggtcttaccgttgagcaggttgaggagaaaatcggcggcatctcctgcaacggacgcccgacttcctgcggcgatcagctggctaaggcctgtcgcgaagcctacgaggcatccaagcaggcgtaaggaaacacctgtaaacgcaaaacgcgcctgtcccgggacaggcgtattgatttttgtggactaagttgcaggagtagaaaccgagcgctcaatgttccggctgtaacggaggcggcatttctaatcgcaaaatccgcccctgccagaagcggccggaacataagatgctctgattttttgcataataaaacgtccccggcattttccgcctctgcctccgcccggctccgtcagatctgcgttacgtcggggtctgcagaatcggctggatctgtttgccggcgagcgccgcctcgattgtgtccggcaggagctccatttttgcgatcatggagttcggcttgctcttgcagttgtcctgcccgaacggaacgaaataaatatttttcatattcatcagcattccgatattcttaaagctggcgccgagcgcatcgttcgtcgagatggcaatcacaagcggcttaccattgcgcatatgcgctttggtcgccatcagcaccggcgtatccgtgattccgttgcagagttttgccgccgtatttccggtgcagggcgcaatgaccatgatgtccagaaaattattcggtccgatcggctccgccgcacagatggtacggatgccctcatttccggtaatctcgcagattccgtccacataatctttcgcacttccgaaccgcgtgtcacacgtctgcgcattaaatgaaaaaaccggcaccacattggcgcccatatcgcacaaccgctgtatttcttttcttgctttcgcaaacgtacaaaacgaaccggtaattccaagcccgatattataattggaaaaatccatcacatttcatgctcctttcgcacgaatctctccaccgcccggtccagaatataggcgctctccttcggcgcatattttcccggaagtccaagtgccagatccgcacggatgccgcactctctggcgcaggcgaaatccgtaccgcccggtttggacgcgatgtctaaaatatatgcatcccgcggcagttcgtgaatgatcgcacctgtaaccacaggcgcaggaaccgtgttgaccagcattgccgcccccatcgcttcctccggtccaaacgcaaaatccgcggcataaaatccatccttcttggcaagtttgcgcacttcccgtcttcttgccagcaccgtcacgcgcgcgccgagcgctttcagcctcgcagccaccgctctgccgcagcagccgtaaccggtaacgataatttttgcctcctcaatgttataagggctgtggttcacaagctccgcgatcacgccctccgccgtcgccactgcattttcttccgtcacaatctcatctctcataaaatccagatagtgaatgtcccggcgctccaaaagttcctgctgttctgtggagaagcagcctccaagcaccagcgtatcgttcgtcaggtttttattcaatatatcgttcagcattttctgttccggtatctttgtcaccggaatcgggaggatcagcatatccgcctccgccagaaaacttttcaacttctcgagctgttcttttaccgtcccgctgtttctgatatccaggcagcgtacgttgagtcctcttttggtcataatctccgccagatagacctgacgcatgtcactgatgagaagtatggtctgtctattcatagaattacgctcccttctctttattatatgaaacgcgcgctcttctgccacagcgaagcatttacatgtattttacgaaaaatatatattatatctattgcatctatattttcagaatattttca

SEQ ID NO: 11576 - DNA, 36744 bp, Unknown
  gut microbiota DNA sequence
gacagaatcagagccggatatggaagcggagccggagctggtcatggaaccacagccggaagaggtcatggagccggaagcggattttagcatgccggatacaccggaggaggaactgccggttgtagatgcagagacggtgacggatgacaccccggtgatggaagagtatgaggaaccgatcgtagattccgacgcgattgtggaagaggaagatgcggcagctgccacagacgatcagaatgaggctgaggcagagagcggggagatagacagtttcgatttaggagcaggcggtcttgatttcggaggagacagcttagaccttggagtggacggtcttgatctcgggacagagaaccttgacctaggagcagataacttagatgccggagcaggcggacttgatcttggatcagaaggacttgatcttggggcagacagcttagacctcggaggagacagccttgatttaggagcagatagtctcgatcttggagcagagaaccttgaccttggaacagagaaccttgatctcggagtggatagcttagatttaggagcagatagtctcgatcttggagcagagaaccttgaccttggaacggagaaccttgatctcggagtggatagcttagatttaggagcagatggctctgatctcggaggagaaagcctcgatcttggagcagatctgaaagaggaagccgcgccggagaatgaagcaccggacgagccagagccagtagccgcgccggagaacgaaataccggacgagccgaaggtggcggaaccgcagaaagagcctgagacaaaggcagaggaagctgcaccgatggatttttccgatccacacaagcttatgactccggaagaaattgccgcattgattgcaaaaatgtaagagcaggttccgggataagaaatgaagttattagcagtttcagaataaaaaatgagcgtggaagattctttgaagtaaaatgtgagaatttcttccacgctcattttttatctgaaacgataatacttatttatatatcccggaacttcctattacgggaatctatgcggcaattctttccgtaatcttacagatcagactccgcgacgatcgtcacgatattcttgatgatggagactgctgtctgcatgccctccacgctgatatgctcatacggaccgtggaagccgtagccgccggtgccaagattcgggcacggaagacccataaaacttaatctggcgccgtctgtaccgccgcggaccggacgtgagagcggtgtgagaccggtcatcgagattgccttttttgcaatgtccacgacataaggatgctgttcgatgatctcaagcatattggagtaggaatccgtgatggtaagagagacggttccggtgccgtatttctggttgatctccacttccagtgtgcggagtctgttcaggcgtgattcaaaagaagccctgtcgtggtcacgcacgatataggaaagttctgcaaaagcgacatcacccttcatgtcggtcagatgatagaagccctgtctgccctcggtgtgcgctggtgtctcctccggcggaagctgcgactggatatcgcacgccacaagagcggcatttaccataatatcctttgcctcgcccggatgcacattgacgcctttaatggaaaattttgcgctcgcggcgttgaaattctcataggcgacttcgccctcgtaatcgccgtctaccgtgtaggcaaaagcagccttaaaataatccaggtcaaataaatctgcaccgcagccgatttcttcgtccggggtaaatccaacccagatatctccgtgaggcattccggaagaaatgatctcttcgagcgctgtgacgatttctgccacaccggccttgtcatccgcgccgagcagtgtcgtgccgtcggtggtaatcagggttcttcccttcaaatccttcagcgttggaaaatcggaaacctttaacattgccccggtaccgtttaaacggacgtccccgccgtcataatccggaatgatctgcggtttgatgtctttgccggagtagtccggtgcggtatccatatgtgagataaaaccaacggccttgtgtccctcacagccggcagttgccggaagcagaccgtacacatagcagtggtcggtcagaaccacatttttaagaccgagatcccgtaattcctgctccagtacctttccgagatcaaactgacgctcggtagacggaatctgtatcttgccgtctgccatgttattctcatccgatgtcgtccaataggacacatatttcaataatcgctgttcaacttgcataataaacctccttgatctatgccattctatctataaaataacacaattgaaaaaaaatttgaagttttttaaaaaaaatgttgcatttctaaaatttctgttatataataattttcgtgctcgagtgatacagaacacgagatacaaaataagcgccactagctcagctggcagagcacctgactcttaatcagggtgtccagggttcgaacccctggtggcgcattgaaaggtaccgattttacagcattgactgtggggttggtgctttttttgtgcttacaacgcatattattaaaatttaaaaaaagagtgtatcctactttaacagaaggaaaaacctgacgatataaaaagcagatactatatgaaggggagagagtcagatggaacaaaagaatattgaggtgcaaaggaaaaaaggtctgaatctgatgatgaagattctgatcaccgcgatcataccgctgatcattcttgtggcttttgcagggctggcaatccgggcggttggcgttactgtgtctgataaactgatgcagcatgaattgaagacatcggtctatgccgtgaaccagacaatgtccattttgagcagtggtgactggaatacggatggagaccagctgtacaagggagattacaatttctcggaacatcaggatgtgctggatgcttttaaggaaaataccggacaggatgttacgctcagctggaatacgacccggatggcgaccagcattgtgagtcaggacggcagccgcgagatcgggacggagatagcagcagatgtgtatcaggctgtgaaagaaaagggtagttattttgtgtccgatactgtgattgacggtcagaaatattacggatattatgagggattgtacaacagtgacggttccatggcaggtctggtgtttaccggtatgacgtctgcttccgttcacgaaatctacaatgaccgattgaaaaaaaatataatatttatggtagtgcttgcaatctttgcatgtatctttctggcaattgtgatgataaagattgtgaaggcaatgatgtcgatgatcgatcatctggatgctgttgcggagggaaatctggacagcaagatcagcgaccgcatgacgagccgctcggacgagatcggaaatattgcgcgtgcgctatattcacttattggcggactggccatgattgtaaaaaacatccggacatccgcaaagtcgctggatgatttcagcgccaggttccagaacagctttacgacgatcaatgagtccattcataatgtgaatacagcgatggaggacattgcgaacggagcgacgaatcaggcgggcgagatgcagaaggtcaatgagcagatcagcgacatgaacgaagccattgccgagacgacaaagaacgtggaaaatctcacgggcagcacggaggagatgaaagagcagaatcataagctcgacggcacgatcaaagatctggtggagatcagcgaccgcaccagagaatcggtggatgaggtcaaccgtcagacagacaggacgaaccagtctgtcatggagatcggcagcgcgatccagatgatcacagatattgcaagccagaccaatctgttgtccctgaatgcgagcatcgaggctgcgcgtgcgggagagcatggaaaaggatttgctgtggtggcggatgagatccgtcagcttgcggatcagtccagtgactccgcgaagaagatcggtgatattgtggaagaactgattaagaactctaacaagagcgtcgagacgatgaacggtgtgctggatgagatcaatgagcagaacgagaagctttcgaccaccagagaggcattcgacggactgaatacggaggtcggcaatgtggtagttgcgattgacaatatccggcgtgagatcgagacagtcaacacggcgaagaatgatgttatgagcagcatggagagtctggcagcgattgcacaggagaatgcggcaagtaccgaggagacttcagcttccatgacggagttaagcggcatcgtcacggactgcaatgcgcagacgaaaaacctcgtggatattgcagaaaatttaagcgacaatgtcaaccagttccggatcaaagaataaaagaaaacagaacacaaaaaacacccgcaggcggatcgagaaaaatccagactgcgggtgttttttatctggaagcgatcagcttgcagatcggattgccgagggaggagaacttctcctcgtactccgtcatgatattgccttcattgagcaccggatcgtgatgcagatctctggtggaggcgtccagatgccagccggcttccgggatctcctccagggaaaaggtaaaaagatcctgattgtcggtcttgaactccagacgtccctccggtgcgagaacctcatcgtagcgcgcgaagaactgacgggaggtgagacggcgcttggcgtgtctgtccttcggccacggatcggaaaagtttaagtagatccggtctacctctccgtgatcgaatacctcagcgacatcggcggcgtccatgcagatgaaaaacaggttcgggagcggattctcttccattttctgcagggcgcgcagcaggacgctggagtagcgctcgattcccagataattgatgtcgggatgcgctgcggcaagatccatcatgaagcggccctttcccataccgatctcaatgtgaagcggctgctgtgacggaaaaatctcctgccaatggcctttgtgcgtctcggggcttttgatgcagtagacgctctctgtgatggcggcgtctgcacccggtatatttctaagtctcatatcgttcctgcctctcataagaaaatcttaataaatgtcgggaagtcctataattgtggacatacaagatattctacaataaatctgtggataaaaaaagagcttttgccagaaaaattgttgcatgtatttttttctgcgattatactgatactagttatgttccggatatatatggaagaaatggacaggatttctggatagaatggagttataagcaatgcgaagagcgaatgtgtggaaaaaggcggcatgtgtcgccttaagtttactatactttttacagataaagccgcaggtggtgcaggcggcagattactggccggaaggaccggaagtacagtcaccgtccgtgatactgatggagatgtcgacggggacggttctgtacgaaaaaaatagcgatgagcggaattatccggcaagtatcacgaaaatcatgacgacgcttctcgcgctggagaattccgatctgaatgaggtcgtcacattttctgatgatgcgatcaacaatactgagggttccggaatctaccgcgattacggggagcagatgacgatggagcagtgcctgtacgcggttatgctgaattcggcaaatgaatgtgcctacgcagtggcggagcatgtcggcggtacggtggagcattttgtggatatgatgaacgaaaaagcggcggagctcggctgcaccaacacgcattttgccaatccgcacggtctgttcgatgagaatcattacacgacggcgcatgatatggcgctgattgccaaagcggcgtaccagaatgagacgttccggattattaccggcacggcacgctacaccattccgccgacgaacaagcatgatgagccgacggatctgcagaatcacaatgagatgctctacccgttcaagacgctcaagtatcggtatgagtattgtaccggcggaaagaccggatatacggatatcgcgcgcagcacgctggtcacctacgccgaaaaggacggcatgagcctcgtatgcgtcgtgatgcatacggaatcgccgaatcagtggaccgacagccggaatctttttgattatgcatttgataatttccagttgttcaatatcgcggataatgagaccagatacacggattccgaggcggtggaagttggagctttgaacaacaacaaagcgtttgtggacgtcgatgcgagtgccaatatcgtccttccgaagacgacagactttaatgatgcggcatcggagatcacgtataatgacgtcagcgagaacgtggtgggaacgcttgcctacacctatgcgggacgtcaggtcggaaaagcggacattgtgacaaccggtgcagttgtggacggatatatttttgataaccagagcgaggtagagcaggagacagacaccgaggaggaggcggtctccacggtgcggatcagaccgctcacaatcctgcttatcgtagccggaatcctgcttacagcagggttgatctttgccggaaagaagttctacgataactattatattatccggcacaaccgggaagtgcgcaggaaccgtaaagagcagttccgacagatgaaaagcaaacccaaataccgcagaagacgtaggagatagtacaaagaaataaaaaacgacaatattccatgttgaatattgtcgttttttacattatggacatgaaaaaattgatgataaattatctgacaattaagctcttcagcaggatttcaagctgattcgggttctttgtatagaagagaatgccgccgggcacggtgtgcgcggtcagatattttccctgaaacagaggggagtctgtgatgcgggaaagaaggtaggaggagaccgcatcgtccgcctttagaaacagaggctggtaatcatccatacggcagacgtcggcattcgcttttttgaaaatataggtaagctcctgttcctgctctaattgttcggcagtcttgttcggaatgaaatagccaagttcatccttcggcatattcaaagaacggatggcgcgctgcacctgtttggtcagagcgtcggacgccggataaagagactcgaagtatttcatgaaatcggcagccgtgcggaaatgttcatttttccccttctctaagacctcggtcatcaggatccggcggatgattccctcgcaggtttcccgggatggattcttgcgcagggagggtgattttgcttccatagagaactcctttctgtaaacgacaaaaaaattgtcttttatgacattataggacaaaacaggggctgcgaacagccggaaaaacgacaaaaacgataaattgacaaacagcaggggatcctttatagtaaaaataagcaataaataccacaaacatatacatagagcggagaagttatacagaactttccccaaaatgcgctgcagaaggggatggctcaacaggaaaggtacggggaacgatatgtcagaatcttatgtgattaacgaaaagcgggaactcattctggatcgtgtcaaagagttcatctatcagaatggcggtgtggtgaaaaagagccagctgaatgaactgggaatcgattaccggaggattctggattttgtggaaaagggagatctgatccggatcaagaacgggtactatgcggtgcggctgagtgatttctcggaggaggagctgattgcgcggctgtttccggactgcgtcttaaacctggagaccgcattgtacgcgtacggctatctggaccgcaagccttacggatacaaattgtcggtggacaagaacacatccaagtcgcggtttaagctggattttccgccggtggtgccgctgtatgcggagccggagaccctgacactcggtgtgacggagattgactacggcggcgcgaagatgaaaatttttgaccgggagcgcctgatgtgcgagtgtctgaaatatgaagataagatggagcgcgagcttttcaaagaagggcttttagcgtacatccgcgatccgaagaaggatgtcgcaaagctgatgaaatacgcaagggaacgcagagtggtaaagaaagtacagacgatgataggagtatggctgtagatgaaacatacgatcatagaaaaagctgcactgaaagcaaaaagtgaagagaccggtattccgttttccaatctgctggcaggctatgtactggaagaattgatgtatctgatcgaggattcgccgttttccctgtttctctggctgaaaaacagcagcgcactcggagtggaacagtaccggaagaaaaatctgctgacgctggattttgcctatgtgacagatccccgcgcgatgaagcgggaggggatcgttccggggcaggagctgtctcttaagatgggatatgtcatgctcgcgtacatcctaaaagtggaaaaggtgccggacatttcctggaagggaagagcgagcgcgggggatcaccgcgtggatctggagattgcgggggagttcgaggagatgacggttccgatccatatccgcgtcacggaactgaccgaggaaggactggttccggtcaagcggacttttacgccgtttatggaaggcggaaaacagattccgtatctggaatatccggtggagagtattctggcggagaatttgttctatctgatccgggatatggaactgcttccggatatgagcgtctatgataaggtttacgggattctaaagacggagccggtggacggcaggcatatccaggaactgctcggcgagcattgcaggaaacagcagctgctttttgaggagtcgcggataaaagagattctttcctaccgcgattacagctacatgagaaagcgttgggagaaatatttaagacaccggaaaagaaaagaacccgcatggacagaggttatgcaggttctggaacaattccttccgcagatgtggagcaccctgtgccgggatgagatctttttcggagactggatgccggatctgcagcggttcttagattagttaaatgcagtgaaggtgccggagcgcccgatagtagtcgtccctggtatccagatgggaaaactgaagatctgccggaacatcggagtctttgatcgcttcttcgcgcttcagataggacacgctgcatttctcacgcagcgtatcgaaagtgaactggtgcaaaagcagacactttccgatagatggcaggcagcttttggagtaggcggacgcaggcactttttgatccgtttcggtgtcggataccgcggcgatgtcaaaaccgtccagatgctccagcaactgcagtccgacttccggttccagaaaaggggtgtcgatcggcagaataaacgcctggtcttcatccatcatggagagaccggaaaatacgccggacatcggaccggcgttcatgtatagatcggcaatttctgtgacagggagtgaaaggtgcgtatattcgcccggcttttttacggataagtaaatatgtgaaaaatgtggcttgtacttgttcacaaggtattccagcagacttactttgccaaaaggcagcagggctttgtcggttcccatgcgcgtgcttccgccgccgcacaggataatgagtgcgtggttcataaaaatttccgccatttctattaaataaatatatcccatatcataatggaaaacggtggaatgttcaagtgacaaaaattctgccgcgccaatcgacgggacaaaacaagacggattgagaggtgaaggggacaggaaccatggagagagagcatttgtatcaacaactaatttcatacggggaatcggatgtctatccttttcatatgccggggcacaagcgccgggcacttccgtttccaaatccgtacaccatcgatattacggagattgacggatttgacaacctgcatcatgccggagggcttatcagggaagccgaggagcgcgcggcgaagctctacggtgcggaccggtcgtattacctggtaaacgggagcacctgcggactgcttgccgccatctgcgctgccgcgcggcggggagataaggtactggcggcaaggaactgccacaaagcggtctatcacgcgatttccatgcagggactcgcggcggagtttctctatccggcaatcacgcggggagatctgcagggacagattaccgcggcgcaggtggaggaggcgctgacaaagcatccggatattgcggtcgtgatcctcacatccccgacttatgaggggatcgtgtcggacgtcgcggcgattgcagcgtgctgccatgcacacggggcggcgttgatcgtcgatgaagcgcacggggcccacttcggattcggagccggattcccggaaaatgcggtgcgccttggggcggacgccgtgattatgagtctgcacaagacgctgccgtcgtttacacagacggcgcttttgcattgtaacggcgggcggatcgatacagagcgcgtggcacggtatctgggtgtctatgagacgagctcgccgtcgtatctgtttatggcgggaatggatgcatgcatcgacctgatccgggagcagggggcagaactttttgcggaataccggagacgtctggatgcattttaccgtgatacggcggatcttgcgcagctgcatgtcatgcggcgggaagacctctgcaaggaagaagcgtatgactgggacgattccaagctgattatctatgcgggtgccatgggcggcgaggcgctgcatcaggaactgcgcggacattatcatctccagatggagatggtgtcggcggactatgtgctcggcatgacaagccttatggatacggacgagggcatgcagcggcttgtgacggcgctccatgagatcgatgaaaagaaccggcgtatggcggagccccatgagaccgctgaagagaaccggaagacggaattagacggagaagtgccggaagccggatttacggcgcgcatgtaccggaagaatccgcgccggatgcagatttatcaggcgctggatctgccgtaccgggaggtgccgcttgatgaggcagtcgggaaaatggcggcggattacgtttacctgtatccgcccggaatcccgctcatcgtgccgggagaagttatcacggaagagtttatccggcacatcagagagtgccgggagagaaagctgaacgtggaagggcagggaaatcttgcccccggtcggataaagattgtatatttttaaagactatattatactagaaggtgcagcgaatgggaaaaatctattgcatgatgggcaagagctcaacaggaaaagatacattatataagatgcttctggaagacggggcgctttcgctgaagaagatcattccctacacgacgcggccgatgcgccggggagaaacggacggcgtggaatattatttctgcggagagaaggaactggccgatcttctaaagcgtggcaaagtcattgaacttcgggcatacgatacggtgcagggagtatggaagtattttacggtggatgaccatcagatacaggatctgcggcagaattatttgctgatcggtacactggaagcatacgggaagctccgtgactacttcggaaaggaacgtattgttccgatatatattgaagtggaggacggaatccggctggagcgtgcgatcggaagagagcggcagcagcgggaaccgcactatgaagagatgtgccggagatttctggcggacgcggcagatttttcggaagaaaagcttttggacgcacagattacggtgcggtttgtgaatgatgatttaaagcagacggaagaaaatatccgcgattatatattgtctcagaacgattgacggatcagggaaagagggtggcagattggatattaaggtgaatcaggcacagatggtaacgcaggtgccggacacggtgacgacggagaccggcgacggaacgttcaagttcacgctggcgagcgcgatcacggatgcagagcttcaggcgaaggtggacagtctgttatcggacattacgtttcaggggaaccggattgcggaacatatggacatccgcgatatgaaaaagtaccgcggactgatccgtgattttatgaatgaagtggtctaccgctctcataagttttcaagagagaatttcctggaccgcaagggacgccacagagtctacggactgatccggctgattgatgccaacctggacgaacttgcacaggaactggtcaaggatgagaaggatcatatcacgatcttgagcaagatcggggagatccagggacttctgttggatattctgacttaacataaaacgagggaagctatggcaggatttaaagctattttagggcatgagcagatcatagagcatctgcagaatgcagtcacaatggataaggtatcacatgcatacatcataaacggaccggataagtccggcaaaatgatgctcgcggaggcgtttgcccagacactcgagtgtgagaagctggaggacgtggtgaaaaatgccgcgcagccgtccgacgtggagccgtgtatggaatgtcattcctgtaagcaggcgatgacgaagaaccagccggacatcatctatgtgcggcatgagaagccgaatacgatctcggtcgatgatatccgtacccaggtcaacaacgatatagtaatcaaaccttacagcagcagatataagatctatatgatcgatgaagccgagaagatgaacgagcaggcacagaatgcgctgcttaagacgattgaggagccgcctgcctacgcgattctgattcttcttaccacaaacgctgccgcttttctgccgacgatcttatcccgctgtgtcacattgaacatcaaggcagtgccggatgagaagatccgcggctatctgatgcgcaagtatcagattccggactaccaggcggacgtatgtgtggcattcgctcagggcaacgtcggaaaagccattcagcttgcgtcctcggaggagttcaacgagttaaaggacgcggtgctccagctgatcaagaggcttcgggacatcgatctgtatgagatgacagaggcggtaaagcagatcgctacatacaagctttcgatcaatgattactttgatctgatgatggtatggtatcgggacgtgctgctgtttaaagcaaccggcgacgtgaacggcctgatcttcaaggatgaagtgtacgacatcaagcggcaggcagagaagagttcctacagcggcatcgagacgatcttagaggcgctgcgcaaagcacagatccggctcaatgccaacgtcaactttgaccttacaatggaactgctgttgctgacaataaaggagaactagaaatatggtaaaggtagtaggagtccgctttcggaatgcgggcaagatatattattttggaccgggcaagctggacattcatgcgggaatgcacgtaatcgtggagacggcccgtggtgtcgagatgggaacagtcatgatggagccgaaaggggtttcggaggaggatgtcatccagccgttaaaaccggtcatccgcattgcgacggaggcggacgagaagacggttgcgaagaaccgggaaaaagagaaggatgctttccgcatctgtcttgagaagattgccaagcacaagctcgatatgaagcttgtcgaggcggaatacacgtttgacaataataagctgttgttttacttcacggcggacggaagaatcgatttccgtgagctggtaaaagacctcgcagcggtattccgcaccagaatcgagcttcgccagatcggtgtgcgcgatgagacaaagatcatgggcggaatcggcatctgcggacgtgcgctgtgctgcaacacctatctctcggaatttgcgccggtttccatcaagatggcaaaagagcagaatctttctttgaatccgaccaagatctcgggtgtgtgcggaagactgatgtgctgcctgaagaatgaggaagagacctacgagtatctcaacagcagacttccgggtatcggcgaccgcgtgacgacggtggacggactgaaaggagaagtgtcttcggtcaatgtgctccgccagatggtgaaggtactggtagaggtggatgatgaaaaagaactccgggactatccggtggacgagctgaagttccgtccgcgccgcagaaaggaaaatataaagctttctgcaaaggagctgaaggaattgtccgcgcttgaggataagggaggaaaatccaagattgatgacaccaaataatcttgtccatgaaaacgagcgtctggatgaactgcaccggaacggctactatatcattcaggatccggcgagattctgtttcggtatggatgccgtgctgttgtcgggattcgcgcgtgccagacgtggagagcgcgtgctcgatctggggacgggcaccggaattatcccgatcttaatggaggcaaagacagaggcagaagattttaccgcgctggagattcaggaagagagcgcggatatggcgagaagaagcgtattatataatcacctggaagaaaagatccgggttgtgacaggcgatatcaaagatgcctcgggaatattcggggcatcttcttttgatattgtcaccaccaatccgccgtatatgatcgggcagcacggaatcagctccggcgcggaggctaaagcgatcgcacgtcatgaggttctgtgtactctggacgacattctgcgggagtcggcgaagctgcttgtgccgggcgggagattttacatggtacaccgtccgttccggcttgcggagattatgagcaaaatggttgcttacggcattgaacccaagcggatgcagctggtctatccatatgtggacaaggagccgaacatggttctgctggagggatgccgcggcggcagatcgagactgaccgtggaaaaacccctgatcgtttataaggaacagggtgtatacacggatgaaatctatgatatctacggatattaacaaatgaccgggtatggcggcacagaaagcagcggacaggacgctgtggcagaaaggaaaagaatatgtttaatgatattgtgataggaccgattaccattcatatgtatggagtgatgattgcagcgggttttctggcggcattgctgatgacgctgcgccggggcaaaaagagaggctatgatgaggatctcatctggggcatttttttctgcgccatcatcggcggaatgcttggaaccaggattttatattatattgtagagattccggagatcctgaaagatccgtccatcctctgggatttcaagaacggctatgtggtctacggaggaatcatcggaggaattctggcaagttatatctattgccgcacgaaaaagcaggcgtttatgccgtattttgatctggtgatgccggcggtttcgtttgcacagggcttcggccgcttcggctgcttttttgcgggctgctgctacggcagggaaaccgatgcgtggtacggaatcacgtttcataactcctcattcgcaccgaacggtgtgaagctgataccgacacagctgatctcatcggcgggagattttcttatctgtgcgctgctgttatggtttgcatcgaagaaaccgaagaccggacgcgttgcggcggtttatcttgtgctgtacggaatcggaagattcgccgtggagttcctgcgcaacgactacagaggaagtgtgggtgtgctgtccacgtcgcagctgatctccatcggtgcggtgattggaggaatcgtgctgtattttgccgcaccgaagcttgcgggagcggggaaggcagaggagaagactgccggttagccggcaggaattgcacgcgggaagtatacaggatgtgcacgctttatgcacgacgaaaggaaaagttatggcgggaaagttatatttatgtgccactccgatcggaaatctggaggacatcacgtaccgggtggtgagaaccttaaaggaagtcgatctgattgcggcggaggataccaggaattccatcaggctgctgaatcattttgagatccggacgccgatgacgagctatcacgagtacaataagattgagaaagcgtatcagctggtggataagatgcgtgaagggctcgacattgcactgattacggatgcggggacgccaggcatctcggacccgggggaggatctcgtgcgcatctgctatgaggaaggcattgaggtgacgtctctgccgggaccggcggcatgtatcaccgcactcacgatgtcggggcagctgaccagacggtttgcgtttgaggcgtttctgccgagggagaaaaaagagcgggcagcagtgctctcgcagctggtcaatgagacgcgcacgatcatcatctacgaggcgccgcaccatctgatccgcacactggaagaactgtatgggacgctcggagaccggagattaactgtgtgcagggaactgacaaagcggtacgaagagaagacattaacgacattttcagagattcttgaatattataaagacaatgaaccccgcggagagtatgtcctggtaatcgccggaaagacatttgaggaattgaagcaggaagagcagaggaactgggagaacctgtcgctcgaggagcatatggaagtctacgagaagcaggggatcagccggaaggaagcgatgaagctggtggcaaaggaccgcggcatcagcaggcgcgatgtctaccaggcgctgttgtcttaaaaaaatacttacataaacgaaaatactgtgttatattagaaaacgctgcaaacggggatgaccgtgttgcagcgttttttaccaatatcatattataattcgcaaaaacattttggtttaattggaaacgatacatgtgacgcataagctgcgccggggctattggggagccgcatccggcagataataatcatccagataagtttcaatgatcgaaaaaggtgcaggaccgatggagagcagagccttatgaaaagcgatatcgctgtaggcgcttccgtaggtttcctgtgccttttcttttaaatccacaaattccatatatcccacataatatttcagataatgggcgggttcttccacgatcagctcatagatttcgcgcagtgcggtctgatccgtgatgccgaagtctttccagaaagcggttgtgtcggaaaagctccagccgtcgtagtggattcccagatccgtcgacgcatagagactcaggagggcggactgattcagggagagcagcgaggcgaggtcatcgtccagcccggcataatggtacgagatcatctccacataggtcgcccagccctcgacatagcccggataattcagcagaaaccgcacgggatgcagtccggcttcataggacatcacggtctgatagaggtggccgggaaagccctcgtgcgccagcgttgtgaaataccgcagagaggaggtgtcggtggaggcattgataaatatggagttctgcgcataatcgtcaatgggcgaggtgatgtaaaacgcaggcgccatatagtcttccatgcactcgtcaatagaacttacagtgaatgtggtctcgggtggtgcaggaaaatttgcgcgcatcgcctcctgcagcccgtttagcgttgcaatgggatcggcggcaggaagccggacggtcgtctgggatgcttttaactgcgggttttcggagaggagtgctgccgcctgctgcaggtcgctttgccgtttttccaagatccggtcctgcagcgccggaagatcggaagcgctcccggtgttgtggcagaccaggtagcggtagtaatcttttccgtctgcaaagtaacagagccccatatcgtttttgccgctgccgagaagttctgtgagcgccgcggcaagatgggtgtaggcgggaagcacgtgttcccgcaccagagcggcattcttttccttgtagagtgtcttttgttcctccatcaattctgacatggcatcgattttgtgatcgaaggtctggatgagatagtgttgatccgggtctgctgtgaaggcgttgcactgtgaaatcagcgtgttgcaggcatagtcggacataaaaagtccggcctgtgctttctgctgctcgaagcggatgatctggtcgaaataatcgccggtcagggcgaggagtgcgagatagtcctccacgtcggctggctgccggaaacggtattcctcatatagtacgggaagctgcgattgaatgccggtcgtagggcgcagcggctcgtcgtagagagtcagatcggatgcggagagctccgtcttaagataatcctgcaagacgtcataggtgagctgaccggagggcggaagggcatcgcggtcgtattttgccagagccgcgagcgtgttctccagagatgcatgggatgcggcaagtgcttcttccgagagactgccgagcgtgatcggagtctctgtaatgccgtagttttccggatgggacagtgaaaaatgaagattgatcgtgttggaggagacctccgcccggaaaaaatcatcaagaaacgtatcgaaggaggacgtggaaccggcgacgaaatccgtctgcatggagaagcgggagcatccgttgagcagaaaaacggacgtcatcagtggaaaaaggacgaattgccgggaaaatgtgtggataaacgaagaatgcaaacaaacacctcgggaaacgcggcagcggagaaacctcctgtgccggaaaattaacatattctatgtgggaaaatgtgcaattattcaaaagttctgcgatgcttttgcgcatcaaggggatgctgtcaagatttgttcctggatgcatatatatggagaaacgataaaaacgggtgaggggatatgaattatctctgggcatttatgattctgaccggcatcatctacggggcgttccacggaaccctgccgcagattacgacggcggcgctcgattcagcaaaagaggcggttacgctttgcattaccatgatgggagtgatgtctttctgggtgggactgatgcggattgcggaaaaggcggggatcattgagggactttcacggagaatgcgcccggtgctgcatttcctgtttccggatctcccgcaggagcaccccgccaacgaatacattgcgacgaatatgattgcaaatgtcttcggacttggctgggcggcaacgccggcgggattaaaagcgatggaggcattgcaggagcgtaacttggaactctgcggacaaaaaggaacctcgcggaaacgcggaccggatattgccacggatgagatgtgcacgtttctgatcgtcaacatctcgtccctgcagctgattccggtcaatatcatcgcgtaccggagccagtacgggagcgtcaatcccgcagcagtagtgggcccgggacttattgcgactatatgtagtaccgcggcggcaattatcttttgtaagttaaaaaaacgttgctgaaaggaaacgaaaaaactataatagtacataggagaaacgcagatcgtgtttcaaggtacgggggcttgtatgggtagaagaaaatatgtactgatcgtagatgactgtcagcaggaccggatggcagtggcggatgttttgagatcggattacgacatcctagaagcatgtaacggaaagcaggcgttggagatcctttccagaaaaagagcgcagatttcgctgattatgctggatctgatgatgcctgtgatggacggttatgaatttttggagatgtatcggaagcggaaggagtacagctatcttccggttgtggtgtgtacgacagaagacgaccctgagagagagcagaagagtctggagctcggcgcatgggattttgttctgaagaattccagccccgggatcatgagactgcgcgcaggaaacgccatcgagaaaagcaaggtgcggtttctggaatatgatttccttaccggcatttacggacagcagaagttctatcaggcgacgcgtgagcttttagaccagcgcgcgggagagaattttgcctttatccattttgacatcgaccgttttcggattatcaataccctctacggctccaaagagggagaccggctgatccattttgtggcgggagccatccgcaaggtcatgacagcctacggcagaggcacatacggacgccttggcggcgatgtgttcggaatgtgtgtcccttacgaagacggtgcgacgatttatcacatactggaaggaatccgggcagagatccggaaacattccgtacattattatctggagacctgcgcgggcatttatctggtggacgatccggatatggaagtggcggcgatgcacgacaacgctgagattgcggcggcacagtgcaagggtcagtacatggttcacgatgttttatatacggaggagatcggacagaaagtgctccgcgaacagcatatcattgacgagatggatgccgcgctggcagagcagcagtttatcgtctatttccagccgaagtaccagctgaaaaagatggctccgtacggagcggaggcactggtgcgctggaagaagccgagcggtgagatcgtgcttccgaacgaatttataccgatctttgagcgcaacggctttatcacgaagctggactattacgtgtgggagaaagtctgccagttcatagacagtgagctttcccagggaaggaatccggcgccgatttcggtcaacgtatccagagtcaacctctataacccggattttatggattccctgattgacctcatccaccgctatcatattcctccgcattatctgaacctggaactgacggagagcgttttttccgaggatgcggaactgatccagagagcggtgaattatctgcatgacgccggatttacgattctgatggatgactttgggagcggttactcctccttaaacattttaaaagacgtggatcttgatgtgttaaagatcgacatgaagttcttctctaaggggaataccgcggaaaagggtgcaaagatcatcgaggcggtcatccggatggcggaatctctggacatgatggtgattgcggaaggtgtggaggaaaagcatcaggtggattttttaaatgacctcggatgcgactatattcagggttattattttggcaggccgatgtcgcaggatcagtacgagaagctgacgaatcatgaggaggaagagcagcgcgacatgccgtagcccgaaagttcatgaatatgaatatttaccgttcggattccatatagtagaataacggaagattctggatgtatcatgggcgtaatgatttttctatcggacataatgataccgcttctcattttcggtattgtcggttatggaattctgaacaggcagaatatctatgaagagttcatagacggggcaaaggacggctttcagacggtcatcggaatcatgcccacattgatcgggcttatggtggcggtcgggattctgcgggcttccggttttctggagtgtttttccgggctgctgggacgggggatcggctggctgggttttccgccggagctgataccggtcacggtggtcaaaatgttttcgtcctctgcggcgaccggtcttcttttggatatatataaggagtacggcgcggattcgatgctggggaagatggcatccatcatgatgagcagcacggagacgatcttttatacgatgtcggtctattttatggcggcggggatcaaaaaaagccgttacacgctggtgggcgcgctgatcgcaaccactgcgggaaccgtcgcaagcattatcctggcgggatatatgtgagcagccggcggctgtggctgcgcccgggaaggattttttctgcaaaaatgtctgtgaaaacagaaaaatgaaaaaatcggttctataggatgtcagctctgcatataatgatagagtaaggcaggaaaaagcagagtgcggaagcggatttgacaagtgggtacgaaagagttataatacattatgttaacaagcaacagacattgtgatacaggaagcaatggtggttgcatatagcgcgggatggagcagtctggaagctcgtcgggctcataacccgaaggtcataggttcaaatcctattcccgcaactctttaggcagcagtcgcatgactgctgtttttttgctttatcaaaaagacctgggttctgctgtatctgatgtttgcgttttagaaaacggtttgggactctgtcggacggaataccgatagattttggcgtgcggttggtgtatgatagagaaaatcgcagtgggatgggaggcgccagtcaatgacaaatatcgaacaatttttgcagatggtgaaggaatcggacaatattgtattcttcgggggagccggtgtatctacggagagcggaattcctgatttccgcagtgtggatggtctttacaaccagaaatatgactatccgccggagacgatattaagccattccttctatataagatacccggaggagttttaccgtttttaccgggataaaatgctctgccttaccgcagagccgaacatcacgcacaaaaagctggcggagcttgaggcggctggaaaggtaaaagccgtcgtgacgcagaatattgacggtctgcaccagctggcaggaagtaagcgtgtgctggaactgcacgggagtgtgcaccggaattattgcagaaagtgtggcaagggatttgacgcagaatacgtgagggattacccgggaaaagtaccgctttgtgatgcgtgcggcggcacgatcaagccggatgtggtgctctatgaggagggactggatcaacagaccctggaagacgccgtgttctacatcagccatgcggatctgctgattattggaggaacttcgctggcggtatacccggcagccggactgattgattattaccggggaaacaaactggtgttaatcaacaaatcgacgacgccgatggacgcgagggcagatctgctgatccaggcgggactcggcgatgtgttcgggcagattgaggtgtagacgggcaccaggcaaatgaaattttttctaccgcagcggagtgaaacatgctacactatcactacatcaggaaagtgaggaagaccatgaaccagtaccattatgaagtgggagatatcgtaaagctgaaaaagcagcatccgtgcggcagcagtgagtgggagatcctgcgcgtcggcgcggatttccgcctgaagtgtgcgggctgcgggcatcagatcatgattgcaagaaaacttgtggagaaaaataccagaggactgcgcaaggcgggggagacagaataggcacgctgcgcagtttttgcacttttttcaagaaagcacttgtaattacagggaaaacgtgttatagtagatgctcgtgatataataattattccttgctcatgtaatgaaaacgtgggccagagaccaaaaggaggaaattcgcatgaataagtatgagttagcactcgttgtcagtgcaaagatcgaagacgatgcgagaacagctacagtagagaaggcaaaagagtacatcactcgtgccggcggtactgtaacagaagtagaggactggggtaagaagaagttagcttacgaagttcagaagatgagcgaagcttattactacttcattcagttcgatgcagagccgactgttccagcagaagttgagcaggatgttcgtatcatggacaacgtacttcgtttcttagttgtgagaaaagacgagaaataagagattctttgatctgataacgtttgtttgagggaagagaggaatcgtatatgaacaaagtgattcttatgggaagactgaccagagatgcagaggtgcgttactcacagggtgagaactccaccgccatcgcaagattttcgcttgcggtagaccgccgtttccgtcgtgacggggacgagcagacagcagattttatcaactgcgttgcatttggcagaactgcagagtttctggagagattcggacgtaagggaactaaattcgttctggagggacgtattcagaccggaagctacaccaacaaggacggacagcgtgtatacacgacggacgttgttgctgagaatgtagagtttgcagagagcaagaatgcttccggtggcggagataattccggttttaccccttccgacagaccgtcaccgagcagtgcagcgggtgatggcttcatgaatattccggacggaattgatgaagagttaccatttaactaatggacgataataacaggaggtaattatcatggctttcaataaggcagcagacaaagaaggcgctccaatgaagagacgcccgatgcatagaagaaaaaaagtttgtgtattctgtggtaaggacaatgtgatcgattacaaggataccaacaagttaaagagatacatctctgagagaggaaagatccttcctcgtcgtatcacaggcaactgtgcaaagcatcagagagcgctcactgtagcgatcaagagagcacgtcacgtggcattgatgccgtacgtatgcgaataagttttacttaatcgcagcgaataagcttcgcataatcgcagcgaataagtttcacttaatcgcaacgaataagctgataagtaaaagaccaacaatccttccgattgctggtcttttttatgtgattgcattttcgtaatgccactgattctaaaactttccttaagaatagaaaaatgggcttggaaatgagacaggaatcatataatattatgggtatgtgtaagagcaagaggtgcagaggagtgggaacgcggatgagaggacactggtacaaaacgacagtcatgctgacaatggttctgatgctggcaggatgcggcggggatggcgcagaggcagagcagacggtgcagaccgagcaggtggaacagacggagcagacgcttgagcaggtgctggaagagcatttccttgcggcggaggatgcggaggatgtggcgacagtggtctcgcagtacgcggaggagacgccggatccggcgctggcggagtttctgatctcttattatcaggttccggacgaagagcagagcaagacccggtattactataatcatattgatctgaatgaggatggaacagatgagattttcgttgtcgtggttggtgagtatacaaaggtatcgttcggtgatccggctctgatcttatcggaacaggcagacggaacgttccaggtgatcgagtcgtttgagggaatccacacgccggtgacggtcagcgagcgcatgacgaacggctggcatgatattatttaccaggaatacggtcgtggagcggaagatggataccgtatctgccactacaatccggacggaggataccagacagatctgagtgaggttgtggatgaggtggagccgcaggacggcacccagatcatctctaacaactttatcgacgatatggataaggggaattatatgacgctcgcgccggcggaagatggcggaagcgaagcgcaaggcaactagataaagcgcaaaccaactagatatagcggctgaaattttggactgtccaacttgttgtgggcagtcttttttcgggcaaaaaaggctttatattgggcggtcaaaatggtataatgcacggtatgatagtgtttttgtatagaatgatggaggcttgcttgtgagaaaaagtaacgtaaagattaaaggaaagcttcgtacatatttgtatctgccgctgctgcttacaatgcttctgattatcatcaatgtgtttgtgtatatggaagacacttcttcgggagtgcttttttctgggtttgtactgctctattctgtgatcatgctgattgcttatctgcgcaataagccgcttctgatcgatgagttgatcaattttgcgacgcagtacggtctcgtgcagaaacaactcttaaatgagtttgaaatcccgtatgcactggttgattataatgcaaagtttctgtgggtgaatgagcagtttacggaggtcacaggaaaagacaagaagtatcataagtcggtcatgacggtattcccgacgctgaccaaggagctgctgcagcggagcgagccggtggagtcgatcaatctgacatacaatgaccggtattaccgtgtggcgttaaagcgcatttattttgacgccatgacacacgacagcacgatcgtatcgctcgatgagagcaatgaatatctgacggcgatgtacctgtttgacgagacagagttgaaccgctatatccgcgagaacgaggaacagcgtctggtcgcgggtcttgtatacatcgacaactatgacgaggcgctcgacagtatcgaggacgtcaagcggtcgctgctcgtagcgttaatcgaccggaaggtgaacaaatactttacagagatagatgcactcgtcagaaagattgagaatgacaagtattttgttgtctttaagaatcaatatctcggaaagctccgggaggatcgtttcagcatcattgaggacgtcaagacggtaaaagtcggcaatgagatggcggtgacgctcagcatcggtatcggtgtcggcggcgattcctacaccaagaattacgagtacgccagaatggcgattgatcttgcactcggacgcggcggcgaccaggtggttgtccgcgacaacgaggatgtgacctattacggcggcaagaccaacaagcaggtggagcgcaacaaccgcgtgaaggcgagagtcaaggcacatgcgctgcgggaggtgattgagagccgcgagcatgtgattatcatgggacacagcatcagcgatgtggattccctcggtgctgcgatcggtgtgtactgcgcagccagagtgctcggcaaaaaggcacagatcgttttaaatgaggtgacatcttccctgcgtccgcttgtggagggattttccgaggaaaaaggctatccggcggatctctttatcaagagtgaggaagcaattcttctgacgaaccgcaatacgctcgtgatggttgtggatgtgaaccgtccgagctatacagagtgtccggaactgttaaagcgcacggatacggtgtgcgtgttcgaccaccacagacagagcagcgaggtcatcgagaatccggtgctctcttatgtagagccatatgcgtcgagcgcctgcgagatgatcgcggaggtgctgcagtatttttccgaaaatatcaagctggagccgcatgaggcagactgcatctacgccggtattctgatcgacacgaacaactttatgaccaagacgggtgtgcgcacctttgaggcggcggcatatctgagaagagccggagccgaagtgacgcgcgtgcgcaagatgctgcgcaacgacatggcggcctacaaggcaagagcggaggcggtacgccacgcggaggtttaccgcggtgcatttgcgatctccgtgtgcccggcggataatgtagagagcccgacgatcgtgggcgcacaggcggcaaacgagctgttaaatatcgtcggtatcaaggcatcgtttgtgctgaccgaatatcagggcaagatttacgtcagctcacggtcgattgacgagatcaatgtgcagctcatcatggagcggctcggcggcggcggtcatctgaatgtggcgggtgcgcagttgacagactgctcggtgctgcaggcaaagcacatcattcaggatacgatcgacgagatgttaaaagaaggcgacatcgaggaataatacgatttgggaaatacaagataagcgcagcagaatgcgcggaaatgaggatcatatgaaagtaattttattgcaggatgtaaaggcattaggaaaaaaaggcgacgtggtgaacgtcagtgacgggtatgcgagaaatgcgattttcccgaaaaagctgggacttgaggcgacaccgaagaacctcaatgatctgaaattgcagaaccagcacgcagacaaggttgcacaggagaattacgaagcggcgctcgcgcttgcggaggaattaaaggataagaaaattacggtcaagatgaaagccggcgagggtggacgtaccttcggatctgtttccacgaaggagatcgcggcagcggcaaaggagcagctcggcatggagctcgacaagaagaagatgcagcttccggagccgatcagaagcttcggcatgacagaggttgccatcaggcttcatccgaaggtaacgggaacatttaccgttcatgttgtagaagagtagcaggaggtttatttcatggaagaggcactggtaaagcggattatgcccaacagtcttgaggcggagcagtccgtgatcggttccatgattatggataaggatgccatcgtgacagcgatggagatgctcatcagcgaggacttctaccacacgcagtacgggattttgtttgatacgatgattgaactgtacaacaagggacttccggtggatctggtgacactgcagaacaagcttaaggaaaaagatgttccgccggagattgcgagtctggagtttgtgcgggatctggtgacggcagtaccgacttcggcgaatgtgaagtattatgcgcagatcgtcaaggacaactcgatgcgcagaaagctcatcaagctgaatgaagagatcgagaatgagtgttatgtcggcaaggaaagtgtcgagacagtcatggatatcaccgagaagaaggtattcgaccttctctccacccgcggcggaggcggcgactacgtgccgatccggcaggttgttatgaatgccctcgagaagatcgagaacgcggcaaagacttcaggaacggttaccggaataccgaccggatttattgatctggattatcgcaccgctggtctgcagccgtccgatctgatcctgattgcggcgcgtccgtctatgggtaagacggcgtttgtactaaacattgcacagtatgtggcatttcacgaaaatatgtgtaccgccatcttttcgctcgagatgtccaaggagcagcttgtcaaccgtctgttttctctggagtccagagtggatgcgcaggcgctccgtactggtaatctctcggatgcagactgggagaagctgatcgagggagccggaaccatcggtaattccgagctgatcatcgacgatacgccgggtatctcgatttccgagatgcgaagcaagtgcagaaaatataaattagagcatgacctgaaactggtcatcatcgactacctgcagctcatgtccggttccgggaagtcaacagactcccgtcagcaggagatttcggatatttcccgatccctcaaggcactcgcaagagagctttccgtgccggtaattgcactctcccagctctcgcgagccgtggagcagcggccggatcaccgcccgatgctttccgatctgcgtgagtccggagccatcgagcaggatgccgatgtggtaatgttcatttaccgcgatgattattacaaccatgattccgatatgaagggaatctcagagatcatcatagccaagcagagaaacggtccgatcggaaccgtcaatctggtatggctgccgcagtatacaaagtttgcgaatatggagaaataataggatggaactgccgcaataagcatagacatcttttgggtgataagtaatattattagaaatagatacttaaaagttccagataaacatgcggcggcaaatctgaccgcaaaatctggtatttctaaccatgccgcagccggcatccgtgatgatccatgtctttccaagtttggagcactctacggactgtgtccgcaagccgacagacaattttaggacttttgtgtgtgtcccttatggcacctctgaacaaaacataaccgcgcgaagccgatgtttgagtcggcatctgccttattttcaatagcagatgccggcgagtttcggttcgcgcggttttatattgtctgtgaagaggtgccattagggacaccagaaagtccgctcattgtctgcggcttgtcggacacactcctagagtgtccaaacgtggcaaagacacggaatgggatgccagccgcggtatggaagaaatacacgaattttgcttcaaagattttgccgccgtctgtttattctggaacttttttgtctctggtattcctgtaatattacttatcacccccaagcgcgatatgcttattgcggcagttctattcttatgaggagtaccttacacaggtatcaagaaaaggtacagaaatcaggctggtgcgtatggaaacattggcagttgttgaaagcggctattgtgcatgctatgattggaaaatgtttcgcactacgatccagaggaaaacaggaggagcagatcatggatacagatatgacaggactgtccgcgcaggaagtgcaggagcgccgtgagcgcggagaaggcggcgctgccgcagagcgtattacaaaaagcagggcgcagattattcgtgaaaatgtaattacgttatttaatttactgaactttatcattgcagggcttttatttgccgtgggtgcttacacaaatatgctgtttctggcggtaatttttttaaatattgcggtcggaattgcacaggagctaaaggcgaaaaagctggtggatgaactctcgattctaaaccgtccgggcgtatgtgtgcgccgcggggcaaaggacattcaaatcgagctggatgaggttgtaaaggatgatttgatggtgctgcagagcggcaatcagatctgcaacgatgcggtggtcgtgcaaggcatgctggaagtgaatgaatcgctgctcacaggagagagtgatgcagtggtcaaggaagctggaagtgagctatattccggaagttctgtcatttccggtaaggcatatgcgaaggtaacgcatgtcggaaacgaaaattatgctacaaagcttgccaacgaagtaaaaaaggaaaaacgtgtggcatcggaactgcttggctctatgaataaggtaacgcggtttaccagtatgctgattgttccgttgggtgtgattctgtttttcgaggctttcctgctacggcaggcacccatgcgggatgcggcggtatcgtccgccgcggcgcttcttggtatgctgccgaagggactggtgcttttaatctcgatttcgctggcgaccggagtcatccggctggcaaaaatgaagatcctcgttcagaatatttactccctggagacactggcgcatgtggataccctgtgtctggataagacaggaacgattacaaacggaaagcttacggtggacactgtcatggaaatcggtgcggggctcttgggaaaggcgctgccgcagggcgaaccggaaaaactcgtgcagtcgtatctggcggcctccgacgacaacaatgcgacattccaggcgctgaaagaggcgtttggcggtcaggcattttatacaccggcgcataagatttcgttttcatcaaagcgcaaatggggatgtatcagttttgcgggagcgggcagcgtttttgtcggcgctccggaaaagctgatgcgaaagctgccgggggaactggaacagaagctggaagagggatgccgggttatcattgtgggctatgtcccgatgcagtgggaggacgaagcggcgctgccggaagagatacagccgctctacggggttgtcctggaggataccatccgtgagaacaccagggagacgcttgacttcttccaccgggaaggcgtggacgtcaaggtaatttccggagatcatgtcaagacggtctccatgattgcaaagcgggcaggactgcaccggtggaaggatgccgtggatttatcgacgctcggagaggacattgactatgagcagatctgccagcagtacgcggtgtttgcgagagtgacgccgggacagaaaaaggaactggtgtgtgcgctgaaacgacagggacaccaggtagccatgacgggagacggagtcaatgatcttctggcgctgcgggaggcggactgctccatcgccgtggcggacggaagcgatgccagccgccagatcgcgcaggtggtactgttggattccgattttaccaatcttccgcaggtcgtgatggaagggcggaaagtcgtgaacaatgtcacaagaacagcgagcgtcttctttatcaagaccatctactcggtgctggtttcggtgatctgcctgctggcaaacattccgttcccgtttatcccgattcagattactgtgctggatgcggcaatcgaggggtatccgtcgttccttaccatctgggaatccgacacgcgcaagatacgcggcagattcttaaagacggcgttatccaatgcgctgccgtttgccctcacagtcacggcgatggtcgcagtcaccagtatcattgctccgtttacggtggagcagcggcagacagtcatgtattttctgctgatctttatttccatggcagccgtggtgaagagctgtattccgtttaacggcctgcgcaccttcatctgcatcacgatggtgataggaacctttggcggtctcgccatcctgccgtcgctgtttgagatcagcgcgattaccgccgggatgggaaaataccttcttgcggggggaagcttatctgtcgtctgtctgctgcttttgcttggaacacgcggagttctcggcagaaagagattgtcagaggcagaggcggtgcggtagagaaccggttttccgttatatttaatagaaaaagaaaagcagagatacctttgatgcatttggtaatgcggtatctctgcttttttggtatagtaaaaagacagggggtgaagcggaggatggataagcgcagcacatcggaagaacagaaaagcggatacctggggctgaccagggcagacgaggagcggcatttggcggacgtgatctcggttgcacagcagaatctggaacgcgccggggcggacatacgcaaggttaacgaagatctggcggatcttctcgagacatacgacgtgaaagacaaagaaggccttgcactctggaataatgcgacggcaagattaaaggaaaatgaatacgatctgatccgctatgagaaggcgagaaaaaagccctacttcgggagaattgattttaaggacggcatctcccaggaggaggagacctgttatatcggaagagccggaattgcgaaaaacggctcagagccggtggtgctggactggagagcgcccattgcatcggtatattacgagagcagcatgggaccctgcacttatacggtaagctccgagggaacctatgagatggatctggtgcgcaagcggacgtacgagatcgaacaggatgtgctgaaggatttcttcgactcggatgtcgttgccaatgatgaacttctgacaaaataccttgcaaaaaacaagaaagcggtattgggagagatcattgcgacaatccagaaggagcagaatgtcatcatccgccgctcgccgcggacgaacgtcatcattcagggcgtggcgggttccggaaaaacgaccgtggcaatgcaccgcatatcctacattttgtataactataaggatgatttccggccggaggatttttacattgtgggaagcaaccggatccttttaaactatatcacgagcgttctcccggaactggatgtgtatggaatccgtcagctgacgatggagcagctgtttgtccggcttctatatgaagactgggacgatgcacgctactcgtaccacagtatggagagagacgatccggaaaacagcgtcaagtgtgatacggagtggtttctcgatttgaaagcatactgtgaagaatatgaaaaagagagcgtgcaggcggaggacatttatctggaaaagacgggaaagcttctgatcggtgcggatgagatccgccgctatctaaaggagcatccggcggattccatggagagcaaaatgctgatgctgggggagattgtccactccagatatgagaatgagatcctgggaagagacatcacgtttccggcagaagagaaaaagcggctcgaccggaaatacacgatgtattttggaaagggaaaatgggagggatcggtctatgcgttctatcaggatttcctggcggcgcaggcagcccgcggcagggaagtaaccccgccggggaactcctttgacgtctatgatctggcggcgctggcctatatctacaagcggatcaaggagacagacccggtcagggaggcaagccatgtggtgatcgatgaggcgcaggacttcgggatgatggcataccggtgtatggatgcgtgcctgtcgggctgcacctacacgatcatgggcgatacctcgcagaatatccattttcagtacggcttgaatgactgggatgaactgcgcagactcatcctgaccggcgactatgacgcctttgggcttctgcggaaaagctaccgcaacacggtggagatctctacatatgcgaacgagattctgcgccacggggatttttccatctatccggtggaaccgatcatccgccatggcgacggggtctgtgtggaaccggtgcagggagagcaggcgctgcttaaccgggcggcggagacgatacagggctggcagagaaaaggatacgagaccatcgcggtgatctgtcgggatgaagaggaggcagagcgggttgcggcccggctggcagaggacgttccggtaaagaacggcgccaaaggagagacggaggagttcggggacggcgtcatggtgcttccggtatcctacacgaaagggctggagtttgacgcggtacttctgtttgacccgtcggagaaaaaatatccgtcggacaacggtcatgtaaagctgttgtatgttgcggcaacgcgcgcgctgcatgagctgacgattctccatcggggggagttgtccggaattcttgcgggcagggcgccgcaggataagcatataaaggaatttgcggcggaaccgctcacaaaagccagggagtatgagaagcctgtccggacaaaaaaggaacagatgcagcagcgcagggtggaaggcgccatggatatggcggagcgggaatatttcggccccagacgcattgcggcaaaagcgcctgcggaggaggagaaaccggtcataagaccggcggcatccccggcggtccgtccgcagacagagacagtgcgcgggcagcaggcaaagacagtgcaccgtccgcagaccggggcaatggaccgtccgcaggcagatgcagcgcgcgggcagcgggatatggcgacgtctccggcgccggcagggaagcgtccgggaccggagggaaccaatccgtccccgtatgcattcgggacgatcccggagaataccaatctgcgcgtccgggggcacgcaaagggaaatcatgcggtccggtgggtaaaaaagagcagatcctatgtagagatggcgagcatgtacgggctgatgcggattacgccggtcgctccggacatcatccgggtcagctttgtaaaaggagtgacggaaaaaattgcagctacgggctggatggccaaagcggaggaagcatttttatggagcgccagggaatccaaaagcgttgttgagattgccgcgggtgagattacggtgcgggtagataaacggagcggagcggtctctttctggaacagggagaatcagcttctgcttgcggaaaatgccgcggagccgagagtgatcggcgaggagggaagctgggtatttttcgactgggacaagaaagagcgcatcaaggcaaagggcatgctcgatacggattttctggatgtgacattaaatgcgcgttatatatccttcggagggaaaaagcatagaatgccgcttgtgctgtcgaaccgcggctatggcatcgctgcggcggcaaaaaatacggtgctgctctgcgatattaagacgtacgggcaatatctctacgcggaaggcgagagacagctcgactactattttatctgcggggagaagccggagaatgtcatcacacgttataaagggttataaaggacaacggaaaggagcagagtacatgacaattaaagaaatcagtgaaaaatatcatattaccgcggatacgcgccgtccccgcgtccggcgatttgtgtcgtaataagacgagcggtttttgttgtacggaagaaacgatacacctataatataagttaaggaattacaatataggagggtgtatggaaaaggtacgttatatgatttccgatgcggcaaatatcgtccacgtcgaatcacatgtgttacgttactgggaagatgaactggaactgaatatcccgcgcaatgagatgggacaccggtattatacgaaggaaaacattgcggaatttcagagaatcaaggaactaaaggaacagggctatcagttgaaggcgatacgcatgattgtacataacggaccgatcgaggggctgacggcagaagcgccgcttcctgtgggacaggcaccgctttctgcgggagcagctgctgcgatcccgcagccggtacaaccggtcgcggcacagatggcagcagtcacacagccggtacagcctgtggcacc

SEQ ID NO: 11577 - DNA, 4851 bp, Unknown
  gut microbiota DNA sequence
ggtgaaaaatactaccgagagcccgcagagtattctaaacaatacggataagatggcacagttcacagaactgatgaccgagattgtgggaaaagcgcttgccgccaacaatgaagaactggggcagagcatcagcgaggaggtaggaaaacaggtgatcaaggagatgaattacctcatgcgggagcgggaggaggcagaggaggaccgctttcgcaggctggatgctgcgatccgtggaaacatccgcaaaaaggacgaacagaaagaaaagaaactctggaaaaagaaaaagccgtcacaagcgtgacggctttttgctatgtacgaaagattaaccctcgctgatagctcctgtaggacaaactcctgcacatgttccgcagctaacgcaggaacctgcatcgattacgaactggctgtctccctgagagatagctcctactggacattccggctcgcatgttccacagcttacacaagaatcagaaataacgtatgccattttaaattccctccttaatttgtaatcaaaatccggctacccttatggctaacctttaaaacattctaatacaaaagtacacggctttcaagtcaaaaaagccgtgtacttaaattagcacataatgctgttatgaaatatattccatgtcggagcttctgctagaatgttgaaaaatgatacagtgtcttggagcggaacggctcatccggtgtcagcacgatgctcgggaaattgtcgtggttgatcgcgtccggaaaatgctgtgtttcgagacacacgctcgtatggcgggcatactgcgtaccgttcttgccagtgaccttgatcggctggtttgccacatacagctgcatacccggctgatcggtaaagcatgtcatgcggataccgctctcctttgactggagaaccgctgcctcacggaatccggtgccgttgatgacaaagttgtgatcgtaggtgccgaacttgtgatactgctcgtagtcggaatccatcatctttccgatggtgtgcatggagcggaaatcaaacggcgttccttctaccggaaggaatctgccggtcggtgcctgcgaatcatcgagctctgtaatctgatcggcgtcaatgaaaagctcgtgggataaaacctcactggagccttcaccgttcagattgaaatagccgtggctggtgacgtttaacagcgtatccgcatccgtggaagcttcgtagagaagggacagctcattgtcctccgaccagccgtaggttacggaaagtgtgagattgcccggataaccttcctcgccgtcgtaggaattcatggttaaaatgagtttgtcatccttgatctttgcgtcccagggcttggaagcgtagccgatcagtccgccgtgcagatggttggagccgttgttgatggcaagctggtattccttgccatccagacagaaatgaccgtccttgatacgattggcaacacggccgacaactgcgccgaggctggcgttgtcgcgcgcgtaatcttccatggaatcgaaaccgaggcagacgtccgtcatttttccgtcgcggtccggaaccacgatctttacgagacggcagccgaaattgatgacttccacataagcgccgtttgcgttctccatatggtatatataaatattttctcctgtgtttaatgtgccaaaatctgactttgtaatcttcataggaaactcctttccatttatatcaggacaaacctaacgcagataattatgccacatttgcaaaaacatggcaagtgaattgccctattttcggaagaatgcccatagcgggcgaaatgtcaaacttgcctaaatcgtgaaattatgcaataatgttcacgaaagcgaagcggtcatgcacgcactgtaaagcaggtcaggagacagtgcatatgacggccgcaaaggcacaacaattgagaggcgaataatatgcagacaaaggttgttaagatagattctgcgaatatagacgatgcagccatgaaagaggcgtgtgatctgatccgcgcgggagagctggtggcatttccgacggagacggtatacggtctgggggcggatgcgctgcacccggaggcatcgaaaaagatttatgcggcgaagggaagaccttcggacaatccgctgattgtacatatttcaaagtttgaagatctggtatcgatcgcgagggaggtaccgccgcaggcgaagaagcttgcggacgcgttctggccgggaccgcttaccatgatcgtatggaaaaatgacagagtcccttatgagaccacgggcgggatggataccgtggcaatccgtatgccgaagcatccggtagcgctccggctgatcgaggggagcggatgcctgattgcagcgccaagcgctaacacatccggcaagccgagccctaccgaggcgtcccacgtggcgcttgatatggacggcagaataccgatgattctggacggagggccggtcggcatcgggatcgagtcgacgatcgttgatctgagtgaggagacgccgatgatcctgcgcccgggatatatcacacaggagatgctgcaggaggttctcggcgagaaagtctgcatggatccgggaattattgcgtcggattccaccagaaagccgaaagcgcccggcatgaagtacaagcattatgcgcccaaggcggatcttgtgctggtggagggcgagacggacaaggtcgttgccagaatcaatgagctggtcagagaaaagcagcagctcggacagaaagtcggagtgatcgctacggatgagacgtttttacgctatgaggcggatcacgttgtcagcatcggcgccagggaagatgaggatgccattgccagacacttgtacaagatcctgcgtgagtttgatgactggaatgtggatgcgatctactcggagagttttgccacaccgcgcatcggtcaggcaattatgaaccgactgctgaaggcggcggggcatcaggtgattccggtgtagctacatcagggagagggcagacatttctatgagacaatataatcgaatcatatttgttgcagaaagcggcacctgcagagcacctatggctgcaggaattctgcaggaatgcaatttaaaacatccggtggaaatacttgccaggggactggtggttttatttccggaaccattgaatcagaaggcggaagctgttatgataagcaatggtatcaatatggatggattcatgtccacccagttgacggaggaggatttttcggaggatgcgctcgttttagtcatggaacacagccagagagagaagattctggaaaagtacgggcacgccgatccggagaatgtctatgttcttacggaactggtaggagacgaacttgagatcatcgatccctacggggggacgcttcaggcgtacggactctgctatgagacgatgcgcaagacgatcttaaagcttgtgaacctattgaatgaaagtgaagataacggcacagactaggctctgtgtaagaagggaaggtacaaaaaatgtcaaaagtagtagttatggatcacccgctgattcagcacaagattggaattatccgcagggaggagaccggttctaaggatttccgtacactggtcagcgagattgcaatgctgatgtgctacgaggcaaccagagacttaaagcttacagatgtggagattaacacgccgatctgcaagaccacagtcaaagaattaaagggcaaaaagcttgccgttgtcccgatcttacgcgccggactcggcatggtggacggtatgctcaacatgatcccggcggcaaaggtcggacacatcggattataccgtgatcctgagacattagagccggtagaatattactgcaagcttccggcagactgcgcaaacagagaggtgtttgtggtagacccgatgcttgcgacaggaggatcttcggttgcggcgattcagatgttaaaggataaaggcgtaaaaagtatccgcctgatgtgcattatcgcagcaccggaaggcgtaaaaaagatgcaggaggcgcatccggatgtggacatctacatcggcgcgctcgacgatcatctgaacgagcacggctacattgtaccgggactcggagatgcgggagaccgtattttcggcacgaaatagaatctgtttgatgcggcggacgcaggtgggagtgataggaacatgagcggaaaacgtacagattatatcagctgggatgaatactttatgggcgttgcgaccttgtcggggatgcgctccaaagatccgaatacacaggtgggagcctgcattgtcagtgaggagcacaagattctttccatgggatacaacggctttccgacgggctgttcggatgacgacttcccgtgggcgcgcgagggcgaaccgcttgagaacaagtatttctatacgacgcacagcgaactgaatgcgattttaaattaccgcgggggaagccttgagggcgcgaccatgtatgtcacgctgtttccgtgcaacgaatgtgccaaggcaatcatccaggcaggcatcaagcggctggtttacgacagcgacaagtataacgggaccccgtcaaccatcgcgtcgcggaagatgctctctgccgcaggggtggatatacagaaatacgaacataccggcaggatcgtcacgatccagctgtagaaaaagggcttttggagccgccagagatggcggctcttttttgtgtcagtaaattccagaatatccatttatttttaaaacagtttctttgcgtcggttgatttttctttacaaatcttttatacttataaaagaatttgttatgggaaaaat

SEQ ID NO: 11578 - DNA, 14087 bp, Unknown
  gut microbiota DNA sequence
agtcattctctcctcatcatagcaaaaaaagctttcatctgcaaacccggatgaaagctctttttcttattctcatattgatttttcttttgtaatgccgtcctaagcctctgcagacagctgtaatctcgccgtaatctcccgcacttctttcataatcgcggcatacatttcatactcaagtccaaccggcgacatatgcggacattcctgcttcatccgataggcctgccttaacaggctgcgtttgttctcctcaagctcccagatctgctctctgctcataacttctccactttccgcacaccggcgtcccccgccttcttctgtgctatgatcttcttcgtgtatatatcttgtacacacacctctaccatcatagcatatatagtggaaaatacatcaggaagttgttcggcatttttaccaaattttataaccggatttgaggactttgcctatttacaaaacggcttttatctatttctcacaactgcatcagcatttcaagagcctgctttttcatgatacaaattccctgctctctgatatgtgcaatgtgcccctgatcggagtaatgcgcatcgtcatactcgatcgttccgaacgcaaacggacgcatctcctccttggcaaatcccgtaaaatccagaatcagatagtacgcgccgtccaacttgtagagactgctcttgggaatcttccctcgaaaagcaagcaggctcatcctgcgcatattctcaaaggaagcaaagcgcagtgcacagatcatcgggtcggtgcgcttatgcgtccctgcagtggctgccgtatccgctgtatccgctgcggcttgtggtgcattctccttctctgccttgccctgttttcctagtgcagcgtccggatccagctggctgatcatatggctgaccgtattcaccagatcctgcagtgacacctctttgtccgcgccaaaagtgatcgccatgctgtgatcctgcaaaagctccgccttcaccatcggagagatgccctccatctgaatatgttcctgttcctcgacgagttctaaaacggtatgcatgaattcctgcgtgatctcgctgttcgcaatgatctcatcaatatcgtatccgagactctcgatctcctgctccgtcagtgcgcagcggattttgttatcaccgatatgttctatttccataaatgatcgatcccatctattgtaaaatgttgtttttaagtgataccattatcctattttttgcactatttgtaaagtggcaatccttagaatacctttttttgcataatgcggacactgcccgcaaaagataccaccaatgtgatcagggaaaccagaaacaccaccgcagtcaccaccacaggatttaactgcgcagaccaccgcagccctcctgcaaaatcctccggcagcagcttctttaccgcgattgcagccccaagcacggcaaaccccaggatcatggttgccgtcctgcttttttccataccgtatttcaggctgaccggaagcatgactgccagaaaaattgtcatctctaataaaataaggaacatgggcatcagccattctaaaagagacgtcacatcccctcgaatgtaatctgccacaaaaccggccgccgcggaagcagcccagaaaccacctccgcaaagcagcataaatgcatatttttccagcacataatcttttctggtcaccggaagcgtgaacagaaacagatagccgtgatcaaattcgtcatacgagatcgtgtttactgtaaaaagcatgccaaacatggtacaatatcccacaatgatctgcgccggctgaccgctgcaaagaaaaatggctgcaatcagaatgataatcgtaaaataccgcttctgccctgccagaatccgaaaatccttcgtcaataatcctttcatagcttctcccccctcgctgtcaaaatcagaatatcatcaatgctgcctttttccatcacaagatccgggtaattttcctgataataccggcgctcgttcgtcagcaggcgataaccgtacgcttcccgcattccggcaagcagatatctacggtccagcgcctgatactgccgctcatccacttttaagataccatatgaatccagaagaacatccgtctccccgtgaagcacgatcttcccccggtcaatcatatagatatcatcgcagaacttttccagatcgctggagatgtgggaggatatcaggacagatctcggtgctccgccggttccctccgaatccagatattcctgcagttcttcaagcatcgcctctctggacatcacatcgagtcccagcgtcggttcgtccagaatcagcaggtcggcgtcatgtgacatcgcaatcagcaatttcagctttgcctgcatcccggtagaaaaatctttgatttttttgttcgccggaagttcataccgctgacatttttccaggaacctggcctcatcaaatctggtatacagattccgcagaatggcggttacatcccggacggtaaggaactggctgaagcccgaatccgcaagggataccccgatccgctcccggtcttttgcagtcagttctgtatatggttttccgaagatccttatctcacccgtctccggcggcaccagccccagcagaatctgaaatgtcgtcgtttttcccgctccgttcgccccgacaaatccggttgccatcccgggctgcacttccatggagcagtccagttgaaacgacccgtatgcctttgttactttattcagttgcaccatcccatcattcatatgattctccattcctgtgattgcactcctatgcttccaaaaacaattccagaaccgcccgcagttcttcgtcgctcatgccatacgcccgcgccttcgctaccagctgttccatccgctgctcgatctctcttttctgttcttccgcaagcagtgacggattcaccccgagcacaaagctgcccttgccatgcaccgttgcgatcagctgttcctcctccagggtatcatatgccttttttacggtgagagcgctcaccttaagatcctttgcaagcattctcacactgtcaagtggcgctccctcccgcagggttccctgcaggatctgtttttttatctgctctacgatctgctcatagatcggctgcatcgatgtgtgatccacaattatcttcatttttttgtattctcctccacctctgcgcagtatgtaggttttccttcgacaaacagtatataacagtatagaactgttgtcaactgttatatactgtttattacaaaacaatggttgcttttatataaaaaatcccggtcttaagacagaactgtcattctctgtccgcgaaccaggatttcctctctcatcgttcctttttatctctttatagtgttatcagtcaattctgatatttctcacatcaaaagcttattgtttcttaattgcatccatctcattcgtccaatgcaagaaatgcatcttttattgcagacacgtcctcgtcgaagcccatgacatataaaatcacatccccgatgctctccaccgcaacgctttccgcttccacgcagatccattttgcaggattggcattgtccaaaagcgtctgttttgccttcggcacatcggttccgtccggcacgcgcagcacaacacactgatacgccaccgatgtcatcatcggcgcagaatacgcagaatcggtataagtgatctcatctgtccccagcacatactcttccatatccgcgtcgatcgtcgtcatctcataatcctgcatggcgtcccgcatcgatgcatccagatcggccgtttcgtaaactttgtttaaaatgtcaatacagcttccgctcagtgcctccgcttcctcagaagcggtcgtcttcccgcaggcggcaaaagaaaacaacatcacaaacatcattcccaccgcagccgcacgctttccatatcctgccctgccgtccgttttacggttctttccagttctttttcccatatcctctctgtgatctcctttttgattgaaattttctactttatatagagtaaaacaggcttttggagatagtctgtccaaaagcctgtgtctttattgctgtcgctttacgctacttttcttccggcatctgaatgcggatatgaacgtcgtccagctgcttctgatctacagtcgccggtgctcccatcatgatatccatcgcgttcttgttcatcgggaacgggatgatctcacgaatgctctcctcgccgcagatcagcataatcatacggtcaacacccggagcgattcctgcgtgtggcggtgctccgtagcagaatgcattgtacatggcagggaattttgccttcacatcctcctcgccgagaccaaccagttcaaatgccttgatcatgatctccgggtcatggttacgaaccgcaccggaggaaagctctacgccgttgcacaccagatcgtactggtaagcaaggatggaaagcggctcctcgttgcagagtgcgttcataccgccctgcggcatggaaaacgggttgtgacagaactccagttctccggactcctcgccgatctcatacatcgggaaatctacgatccagcagaattcgtagcaatcctttttcatgtgcttctcgctcgcagcgccaagcagtctgcggagtacgcctgcggtcttctgcgctgccagcttcttgccggcggtcagaccgataaaatcacccggctttaatccaagtgcctcaatcactttttccttgcgctcctgtaagaacttggagatacctcccacaaattcgccgttctcgtccagcttgaaccagtaagccttgttggctgtctgcacttccacctcggcacagattccgtcgatcacttttctggtcgcagtaaatccgtccacgacaaccgcttttacggtctgtccctcgaacggaccgaatccgcagtctgccatgacgtccgtcgcatcctgcagtaccagatcaatgcggagatccggcttgtcggtgccgtacttgtccatggactccagatatggaatacgcacaaacggagccttggaagcagtcttgtatacaccatacttttcaaataccggcggcagtacctcctcgacaacggagaacacatcctcctgggaagcaaatgccatctccatatcgagctgatagaactctcccggagaacggtctgctcttgcgtcctcatcacggaaacacggtgcaatctggaaatagcggtcgaatccggacgccattaaaatctgcttgaactgctgcggtgcctgcggcagtgcatagaacttgcccggatgatttctggccggtaccagataatctctcgcgccttccggggaagagcaggtcagaatcggagtcgtgatctctaaaaatcccagctcgttcatcttattgcggagctctgccacaatgcggcttctgagcacgatcttgctcttgaccgacggatttctcagatccagatagcgatattttaatctggtgttctcatccgcctctctggactggttaatctcaaacggaagtgcattgtagatacactttccaaggatctcgatcccttccggcacgacttcaatctctccggtcggaagctctgtattcttattggagcgctctctgacggttcctgttacggaaatggtggactccttgttcactccgtccagcttctccatcatctcttctgtctcaacgacaatctgggtcgttccatagaaatctcttaaaataagaaatcccaggttcttgctgaccttgcggagattctcgtaccatccgacgagcgttactttctctcccgcattggaaagacgcagctcattacagttatgtgttctcgactgtgtcattttcttaactcccttgtatcaatctaaaaatgttcttcaaatctgtccgggcagcagcctgtccggcgctttttttatcttacaccatgaaacgcgatttttcaacggttttatccgttctaaataattctgacaaacactccgataagcacgaacacaaggatcgtcaatccaaatccacgcagcgttatctttgttctccgtaacggatctttcagtgcctcctccagacaaatcctctcaagttcatccagcacacgccataattccgtataatcacgactgttaaactcatattttatgtcttccacgcgtttgcctatgtagcggcatgcttcctccgaccactcctgtgccctcacatgttcaccaatttgtctccagaactctggttctttgtacagagtaatcgccaactccgattgcaggaactcttcccagcgtttcttctgggttccttccccctgcaatgtgagacctcgcagccgctccggcaactcctctgtcagcattttcctgcttctctcctgtccggcacgaatgcgtgcaaaatactcctgccattgtgcttctgtctcatcggtttcaggctgtccgttttccttctccagcgccgcgtcccgctcttttaagccttcccgtgccaccggtttcaccggactcggaaccatcctgcttccgttcaggtcactttctttctcttgtcttttcgcgtattgaatggcgcgctggtaagcatcgtgaagcactgcccactcctctggcttttcctccctgtgacagttctttactctggcagcatacacttttttgatctgtttttgatctgtagtctgggaaattcccagtatctcccatattgtcatattcttctagctggtcagatgtccgcccctccacaattcatattcctgttcctctttgcggtaatccgcctgatcctgcgcatcgaccgcctgcttactactctcataccaccgggaaaaaccgtctgctgttccctcaaatgccgtctcctgcagacactgctcctccacatagtccagaaacagattcagctgttttctgcccttgttgatggagaggacatcctgtcttcccagataataattaaaatactgtacacgactatcaatctgttcccggatatatcccgttgtctcacgatgcagcttttcagcacgcgcaagcaccagcctgttttcctcaagatctctcggatgaatcttcagtttattcaactgctccagtctttttttcagttcctcttctgatagtttgatcttatcattccggatcaccagctgtttttcctgtcctgtcgatacgacgtgcacatctaccaccagaattccattgatatcgtaggtataacgcacccgcaccttctcttttccttccggtccgacaggaaccggaaccgtgatgcttcccaacagcagattgtcctccgcgtacattgcttccccctggtatactttaaacctcattttggtctgcctgtcatgtgccgtcgtcataatagtctccctgctgaccgggagcgccatgttcctctcaatcagcacatcacagagatcacggttcggatctgcttcgttgtattgggacacgctgagagaaaacggacagatatccgtaagaagcatatcgcgaatatccgcattgcgttccttgatgcctgcatacactcctgcgccgagcgcaatcatataatccgggctgacaaccgcaatatccgtgcgctgcaacagataattcaaatacttttgcaccaccggcattttacaggaccctccaacaagcactaccgcatctacttctccggcactcttctgcccgtccgacaacacacgccggatcggttgtgccatccgttcaaacagcggctccgcctgcaggatcagctcctttctggagacctccatccgatattctctcccagcaagtgtcacacacatctgtgcagtctcctgaccggtcagttcaaacttacagttttccgcacgttccaacacaattgccgcatcctcagctgagaagcggttttcagaaagtccgcacgacttccagaacatatctgcaatcaaccggtcaaaatcactgccgccgagatgattgtctccgctgaccgccagaatctccacaatgttatcaaaacactctactaatgacacatcgagcgttccccctccaaaatcaaacaccagcatgacggcatcctccatctggcttcggcactgataatataacgatgcagccgaaggttcattgatgatgcgctccacatgaaatcctgccagttcccccgcattttttgttgcatttcttgcaagatcgttaaaatatgccggtacactgatgaccgcttccgtaatctcctcccccagataatgctccgcgtcttcctttaatctttttaacacaagcgcggaaagttcctccggacggtatttttttccggcgagcgaatatatcttttccgttcccataaatcgtttaaaaacgcttactgtatcctccgggtgtgtaaccagacgctcctttgcaatttttcccacgtacaccgtgccatctttgcctatactaactacgctaggcgtcagatagtctccaaacgcattcggaatcagatgactctctccattttcccacactgccgccgcactgtttgtcgttccaagatcaataccgataattcttcccatatgccctccatctgcaagctgtttctctttttttactttataccgttcgtaatctcctttaagaaacgtgcacatccacgcgaagcttttttatgtaatagaaacgaagtttcccattatgtaaaaaacgccatagatcatcctatggcgttctctgtcagatcatttccggatcagtctttgtaaaactcgacaatgtccttgtagccctcggctgtcagcttctctttctggaacttcttgttcttgttcatgcgcacgacaagcacctgcttcccggcaacacgctcctcctgtgccctggcgatcactttcgatacctgctccgaggtacagcctttttcaatgaggtatgccaccttcgggcgctgcatcggcacggtgaaaccgctctccatcagaagaagaatgatgcgctcaaagccgatggagaatccgcacgccggaacgtcatttccggtgaacttgccgaccatcttgtcgtaacgtccgccgccgccgcacgctgctcccagctccggcattgcgatctcaaaaatcgttcctgtataatagctcattccgcgcacaagcgtcggatcaaataccatcttaaagtcggctgtcttcgccgtctccacactatcgataatctcctggagattctgctccacctccggctccaaaaagccctgtaaggtgtccgccagatatttgataccgttctgcgcctttgatacgccctcaaacagtgccagatacttgtcaatcgactccttcgcatagccttcctttgcgagttcttccgccacgccgtcaagaccgatcttatccatcttgtccagaatgatgaatacggtatcaaattcttcctccgggaaaccgctgtacgctgtcatcgcctttaagatgcggcgctcattgatgcggatctcaaagttcttgaatccgagtctgccgatcgtcgttgtcgtcgcaaggatcagctcgatctccgcgagattgctcggctcaccgataatatcaatatcacactgcataaactggcggtaacgtccacgctgcgggcggtctgcacgccacacactgcccatctgcagtgccttgaacggggacgggagatcattagcgttgttcgcatagaaacggactaacggcaccgtcagatcgtaacgcattccaaaatcgaccagatccgcctcttcctttgcctccgcgatctttaacttctcaccacgcttcatcactttgaagatcagcttctcgttctcgcctccctgcttattgctcaaatttgcaatgttctccatgcaaggtgtctcgatcggtgtgaatccaaaactgcggtaggtctccttgataacctgctgcacgtaatcccggatctgcatctcttccggtaaaatatctttcatgccgttgaccggcttcttgcttaatgccatgagcgttcctccattttctgccttatatcctccgattattatacgttttgtgttcctgcacgtcaagcatcaaggaccatacaatcatttatcgcaaatatgatcccgtcgttaaaaaatcacttcaaaaactgtgcccccagacggattgtccctgattacaatattgccatcatgcactctcacaatttcataaaccagcgcaagtccaaggcctactccccccagttccctgcttctggatttatccacacgaaagaatggttcaaatacccgttttctgagttcctctggaattccgcttcctgtatcctctacggaaagaaaaacatgtttttctttccactccgccgtcacaacaacctgcccgcccggacgattgtattttatagcattctcaacaagattatataccagtctgtaaataaggatatcgcttcccaccatagttacatccttacattttccaataagccttatatttttctccattgcaagtggttccagatccgtcaggacctcttctacaagtgcatcaaccatgattttttcatcacgtaccacaatctgaagttcactcatatccagaagaatctttaccatcctgctgagtctttcgttctgctccgtcatcatggcaattgtcttttccgcacattcgtcattgcccgggtgctccatcgaattatataaatcaagctgtacctgcatcagcgacaacggtgtacgaaactcatgtgcggcatttgccgtaaattgcctctgtacctcaaatgcttctgagaggcgttccagcatcttgttgtaagaaacactgagccggtttaattccttaacttcattctcttctatcctcgaatctgccagattttgtgcctgcactttctcaattttatctgaaaaatttctaagcggtttaagtacatgtccgcttagaaaatatgtggcaacacctccaagaagcgcaagcagtgtagagaacagcaagcttctttttttataatctgctttgttgttatatacctgaatggaaaaatcatctgcaaaatcatcccatttatcatctggaatattaatatatatttcatcagtctcctcactgttgtcctcatcactctgggcatcaacagtatcctgcagcaaatcaatataatacacaccgttcttatatacaaacagggtaaggcatccacatatgactgcaataaacaatgtagttatgatcgtaagcctccactgaagtgacatttttttcattgttctgattcctctcgcatcttataaccctcaccaaccttgttcacaatcggatcatatcccagcactgccttaagtttttttctgagagaagacatatgtaccctgatagctccgctaaaactatccacagatgcatcccatacatgctctatcagttcttcctggcttaccggtctgccctgattaagaagcagatattccaaaattccactttcttttctggtcaaaggcaccctctcttcttttgcatatgcctcgcgcttttttgtatcgaaccttatgtccccattgttcaggcaaacatctctctgtacaaatttacgtcttgtcagacttctgatccgcgcctcaagctcctgcagatgaaatggtttttccatgtaatcattggctcctgcatccagcccttccactttatccgctatctggcttcgcgcagacagaatcagcacctttgtctcctcattctcccgcctgagttcccttagaatatccattccatctatgcccggtaaattcaggtcaagcacaatgagatcatattcctccgtcaggacatattcaagcgcctcgcttccattataagaggtatccacctcatagccaacatcatacagactttttgcaattgtatcacacaattctttttcatcttcaacaatcaataatctcaaaatatttctcccgcttcttaacaaggattttacatccactattgtataatactactgtcagctggtcaacaaagacaataacagcaaacgaaaggagtaatctgtctgatgcggaaaagaatatcacagttcgctttattcatcaccggtacacttatgatcggttatggtgcaatcagaggcgaagcagctaccgtgcttggcaaagcaattaaattatgtctggagtgtgtgggaattggataaaagaacaactatacgatcaaaaaaagtagcccgggtacgcgggtggattcaggcagctgccacattgcttaccaatattcatattccaaatttatttaaaggaaaaatatatcagggaaatgccaaaacagtatgtgtgccgggattaaactgttattcctgccctgcagctgcaggcgcctgcccaattggagcttttcaggcagtcgtcggatcctcaaattttaaattttcgtactacataaccggctttttcattctgctcggtgtgacacttggaagatttatatgtggatttttatgtccttttggatggtttcaggatctgcttcataaaatccccgggaaaaaattttctacggccaggctaaagcctttgagatacctgaagtacatcattcttatcgttttcgttatagcactgccgatgcttgtgacgaactccataggaatgggagatccgtttttctgtaaatacatatgtccacagggcgttttggagggtgccatacctctgtccctcgggaattccgccatacgatctgcacttggcaggctgttttcttttaaatgccttattttaattactgttattgtcttaagtattttgttttacagacctttttgcaaatggctttgtccccttggtgcaatttattcactttttaataaaatatcctttctcaacatcaaggtcgaaaacagtaaatgtgtcggatgcggtctgtgtacaggtgcatgcaaaatggatgtcgatgtccggaagactccaaatcatccggaatgtatacgatgcggcgcctgtatgaaagcctgtccaaaggatgcaatccattaccagtttatggaaaaaacatgtagcagcaatctcaataaccagcaatagccagccggcagctatttaattcttatcatttaaaggagtatttatcatgaaaacaaaaagaaacattatcgcactttttacactctgtaccgcattatcaatcaccggatgtgccgggcaggagacttcaaaaacagagaacacgcagaatactgctgctgtatccgccagcgaatcatctgccgatgactccaatgcagcgcttgatgatttatatcagcaggaaaaccagatctttgcagatcataaagatgtatgggacaaggtttttggcatgatgaataaaagtactgctgatccagatggaaattatgctgattatcttgctgatactgtcgaagcaaacaagacttcgtttacagacagcgagttaaaaactcttaccgatgatattaagaccattcgtaaaatcgaagaacagatcactgaaattgaaagccaaaatgctgtatccgatacttccggcgccaaaaatgattccgatgatacagcccctttccagaatttctccggaaaagattttgatggcaatgccgttgatcagaatttgttttccgggaatgccgtaactgtcataaatttctggtttaccggctgtaagccttgtgttgctgaattatctaaacttaacgaattaaatgatgctattaaatcaatggggggcgaagttattggtattaacaccgaaacttttgatgaaaatgaagctgctataaaagaagcaaaaaaaatccttgaaagccagggcgccgcttatcgcaatctttccattgactctgattcagccgccggtaaatatgctgctgatattatggcatttccaacaacaattttagtcgatagaaatggtaatataataggcgaacctatgctcggcggaatcgataaccaggacaactatgatgctttgatgaagcagatccagtctgtgattgatgctgacagtgcaaacaagtaaattctgacattctgtagcatcaatgacccttcacaaatgc

SEQ ID NO: 11579 - DNA, 30943 bp, Unknown
  gut microbiota DNA sequence
atttatctatttctttatttctctattattccgatccggtcttccaaaggtataaataaggtgtaaattattcgtcaatcatcaaaaaatcctttaaagcctaggctttcacagcatccattaaacactgccgtggcagatgaagaggatttttattttatcttgcatatcttcgtttttccttgtatatccttattttccctgggttttatcgcacttttacgacatctaacttagtgtacctatcctagcataaaatcgcatattttaccatatctcagtaagtaaaatgaatacaaatctaggtacaaacccgattcgtactcatcagtacttttttctatgctctttatttccttacttggcgcactttttcatttctttttctatcccttcaagccgctccatttctttctgtgcatcttccaacttaatatgtgtatacacgtttgaggtaaatctttgctattcgcaagctacgtaaatatgtcggaaaactccactatgaaatgcgtcctgttgggactgttcggcgtgtcgcgtcgcttcattttttctgcaatgactaaaataaaaagaattttcctcctttaagccaaaagaaaagagtagccatttcggctactctgagagtgaatgatttattgatatttctgaataaatgctaaaaactcatctccatattttgtggttctctttgctcttgcgcgttctcttgaaacaggcatatcaaaatctactatacctattaaactatccgaacaaagttgtccagcaatatgttttacaaacattatatcatctgcaaaacaaggtagtttctcaacaattccttttataggatgttctgttccaccaatttctcgaattgataccctaccgcttcggctaatatcattgttattttcattgtaattgttttgtgcaaaatattttagcaacattatatggcttagagtgtagttatcaagcaatgataaataaaaaagtttcttatctgttgatatatctatattatttacagatgaatatagcgcattagcaaaaagttcttgcttttctttctgatatgctctcatcgcccccatagtggcaacttgaacacaagaatagaaggcttcatcttgtgctaattcatctattgaacgtggtattttttctaatacttcctcaacttttaacttccactcatacattcttttatcagctacatatccttgagctaaactgatatactcagctaaaaatccacctccagggaataatgatacagctcctttcgcagttgctattaaagcatccgttaatttattttccaatttctcatctcctttactatatgataaaaatattataaattcagaagcaatcctgcaaagttcctccgaggcatctgttgcgacaacccgataaccgttcttcttaaatacatgggtatcacgaccacttccacatccccaatcaaagatatatccgccttccagaatataatttaaaatttatttctgacatttgacatgtccgcagacttgattatttctgcaaaactttcagcattctcattgtggtaatccaatgtatcttttatcacgctttcctccgaaagatttacagttggtcgtacttatcaacctttcccttcgctttctccaccggatactttgcctcgttctgagtcatcttcatattgataatctcatctgcgtctaatcccagcttatctagaaggttctggctatataccatgacatccgccagttcttccctcacatgctgcaaatcatattcctcattattccactgaaaacattccaaaagttctgcagcttcgatgacaatggatttcgctaaattggctggtgaatggaactggtcccaatcacgctcatcgctaaattttctgattctgtctattgtttcctgtttcataatctactccaagcattttcttaaataattcgctaaattctgatctgtgcaatacacatagcagcccttcattcctctagtcatgagagtacgataggtattcttaataatctcatctgcctcagccaaagcaaattcaggatcttctttgtaaagctttttaattccctttaaagactgatcggtgcttgctctcttagtaaaatccgttacgatatgaccatcttcatagcgcatatcatccccgataatgacaccggcatagtcaaactccagcccctgagaagtatgaatgcaaccaatttcattgactgaatcttcatcaatagcaaaggtggatgtattccccagattccagctcatttcaaagtcaccgatcttaatatcatgaacattagtgtcattctgaccagctttctgccaagcccaacaataaccagccaaaattctcgattgattatgagccttgttacgttcaataattaaatcacgtacttcatttggcgaatcaacaattctaatgtcataatctacatctgccatatcgaagtttgccgtatcacgaatttctaacacatcatctagccaagccaaatatccatctgaaccattacagcgaaattgagataataattccatttcagatacttcagaatccaattcttctgcccatttttttatttctttgactgtacctatatctgcaagagttactctctgactctcatctataaaaaacacgctacaaagccccgcatttataatttccttaatttgattttccccggcaatcttaggtccaagctgcgtttttccagtaagtcgatgaccttcatcacagataattacatctacaatattagaatcagcctcaatgtacgaacccgctcccttaaacatattattaatggatgacttcttatgtcccgtcagcttctttgcatatacatttctaggagcgctgttcttagatgtatattgtgcgaataatccttcgttggtaaattttgccaaaaggttaattgccacaacagtctttccagttccaggaccacctttaacgattacagtccgctttctcaggtctgtcatacacttaaacgctgtatgtaaaatttcctcataggcaactttctgctcatccaacatgataaattcctgattgccttcgatcatactcttaatcgagtcctgtagactcttagagggctttatttttccattatcaatatcgtaaagtaattctttgttatccccaatttttattgatttttttataaaatcacgaagcttggaaacttcgcctctggcaaaaataggcgcgtcatctacatactccttatactggttctgctccagtttttccggattgcctttacgataattgtgcatgtatgcacaaggatgaagcacaatgttccccatctgcacattttggttataatcgtaaatcattgccgcataagaccatgcctgataggatggatgaactgtcttacgcattgctcggccgataatggtttccaccagagcatcctgtccttcaactgcttctaccttatcccactgcttcaattcaataataatcacgttgggatcctccttttcatcgtaaccagagataataaaatccacacgcttcgatgtctgcggaatgttatactctatggcaattccggagttttcaggaatcgtattatcatttaaaaccttatacatatattccagagaattttcccatgcgcggaactcattctgagcagttctcttatgcatcttgttatatatattttcttcgatttctgtagcaatagagtcctgctctaccgctaacataaaatcactcttcaaacctgaataaactatcatttcttgtcttcctttttcgctttacaagggttctgtagtttcttagctgatttcagaatcatccccattcttcccatcatgatggctccatcgatctgtcactctttacaataaatagctactcttttttgtgatacattctatttttttgcacaatcggctgatatcatatagtccatataatatcctccataaaaattgttacaatgcatttcttttagtatattccttattgcgaataattgcaaaaaactttattcctttttgcgaacactttcaacttagttatttcacctcattttgactaaatcaaaaacatgaattggtatgtttattttgttatgattaagactcttaagcgtaagagtctctttacgagaggtataaaagcgttataaattcaattcacatataccgaaaaggcttgattttattggttttacgagtctacgcaaatctattgccgtggcaaacggatcatattttatcatagttttgatttactcctttttccccggaaacgccctaatttgcaagggttttcgtggttatggtaataggctcaaaaattacagcttatggcaagccagcgcagaattgaacaagttgctattacctgttcgtagtaatattgatagtaaaaggggatgagttactattatggattttttctattaatagtcaattcatcactctttaccttagcaacaaatttatgttgcctctcttgtagctgcgtcatttaccaatactccgacaaactgaacgcatatttgtcattgtccgtttcggttggctttgatgatactctttttggcatctctcgccatatcccgcaagcttgaattggcaagatcaaattaaatatacctccccatagatatggagtttttaatgaaactttctccaagtctacttttttagagatgtaagcaacactctcctatatctttgaacaccttgagcaatcgttgattttcaaacccctgccaatcaaattaccgatccaatactcttttctacttttcctctctcatctcccttgtgccacttcgctcatgcgtgtcattagcaattggtatcttttaaacgtatccggatttttattacaatattttctagacattttctcatttttctcgtagtttacctctatatcatataaatcaaactgatcacttgttaaatcaatatcccgtccatctattctgttaaaataatgcgttccgccatctgagaaccttacccgattaatagttccgccaaacaagtcataaactatggtagccgtaattgcgcattgtccatatgttggatcgttttcctgcacataatcatgctggcaactcggatatgcggtttctttgcaccacgactctaacaatattccaaacaaatcagcaagtgtctgcaccccataatcatttttttcaatgcatctgatttcttttgcattttcctctccccaaaacgaaatttctctgcccgattttgttttaaacatagtttccttctccttttattcaaacacttatacgactactttctaatattaaaccatttcccatcccctactcataatcgaacttcccgtcgtttttctcctccagcgcctttatcatatggtaggtaaactcattgtacggtgtcgggatccccagttcacgccccatgcgcaccaccgcaccggcgaacatgtccacttccgtgtggcgccccgcatccagatcctgcagcgtggaatagcgcgcccgatcccgcaccttactgccgaaagtggacgaggtatccgccttgtcaaaatcgatcccctttttctccgcgatccggtccacctcttcccgcagccggtcccgcaaaaatgccacatgctcactgtcacggtaggcgcctaccccgcatcccaccatcgcctgtgcctagttgttcggcacgttgagccggaatttgctccagatctccgtgaggatgacgtccgttgcacggtagtgcagccctgtatccgcgaaaagatcattcagcgcctcaatgcgtccggtgcctctgctaaaatccgcctctccatatacaataccgatggtcgtctccggattgaataccacctgattgccctttcgctccgaggcaaccttgatcaatgaatggacaatttgggacggatcaatgacctctccgatgatctcctcgctttccacgccgttcatcagactcatcactgtcgtgtgttcgccggtcacggtctgaatatcgccaagtgccgggcgaagtgcctgatacttggtggcaacgattaaaagatcgacaccggcagcctcctccggcgtcctgacagcggggtggtatgcctgcccgttaataacaaagccttccttttcatagcgcgccttccgctctcccgatgcgactacgcacagatcaatctctttcttttttgcaagcccccacatgacataagaacccactgctcctgcgccaagaatggcaaccgactgatatttcattgttttaaccctctttctcctgatacctgcttatcatttcctcactccgttaattatgaaagcagaaaatatttcatataaacattgccaaagatcaacacggcagctgcaacgataagcacaatcagtccgaaaacggcaatttcctttaacatgctgtgttctttttcaaaagaatcgttttcttcctggtcgatcacttccacgttatcccttttcattctttgatgatctgtaacatttccctccgtctggctttgatctacagcccgcagaaaatcttcttttgcgtgggttgcatgcatactttcctctgtctgccattgatctacagcccgcgggaaatcttcttttatgcgggttgcatgcatactttcctctgtctgtcttcgatatacagccaatggatccgagatatgcatgatcttactcctgaactcgaaaagccataaaacatcttcttcactgcatggataatcctcaaacgaaccttccccgtgtgccatctgattccttatatgtcttagttctctaagcctgtcatatgtctgattccattctggaatcctgtttctttgcatgaccggaacagccatcatatcattcagataacatgttacgccgccgctgtttttaccgtacatttccgaacaaagtttatccagctttttatattcatcaaagaaaatgacgcttgtattctctggcacgttctgtacctcctacctcttctcccgcagctttttcagatatgcattctttacttcattctcatgccggagtcttccgatctcatccttcagatactgcacatactctcttgtcagcttcacaccgccccggaccgccacgtcctcatgctgctccatctcatccagccactgctgcagcgatttatcccggatatcattaaatgtcgtatcttccttaaaaaacattgctctctccatttcctgcattattttctgcaccttcgcatcttccagctcagaccgcattatttttctgcgcacccgcatcttccagttccaaccgcatcagcacgagttcctgccatctgccgtcgcgggtcagaaatccccgcggatttcttccgtattccacaaacccgtacttcttatacagtctcactgcgttctcattgtcaccgaccacctcaagttccagctgccggaatccggcttctttcgcgcagtcaatgcaggcgccggtcagcgccgcgccgattccctgtccccagtattcccgcaggatactgattccgaaatccgcgcggtgccttagcttctcgcgtgtactaagcgcatggtttcccgccgatcccacgaggatgccatccacaaatgcacagatctcaatctccgtgcggctcgccttttgcgcggtaagccgttcttccatgtcctccaccgagtgcgtcccttcgtccgcatacgttgtcagaaaatctgtctccgcgtgtgcctgtgtaaaataatgcagaaacgccgccgcatccgcccgttccgcatttttcaaaagacattttctttgatcttttaagctgatctcccggtaatataacatattgctcctctcccgcttttgcgcagcaagccgttcatcaaacctcatttgtcaccgagtatagcacactcctacgcaaaaagaaagaacgcactcctggacacatcagaacctactttgctgcacacgcacgtaattctgcaatctgcttctccgtcagcggtaccgtctgagaattgtcatcacaggtgttcctgttttccacaattaaacttgtgtctgttatcctttcttccatgcgagccacaatcgcattcacttttttatctccacatccatctctctctcctttccctccacaaaaaactgccctgtttttctatttttattagtaagaaaacagggcagtcccatacacagtcttctgttccttgttgcagtacgccatgtgcatgtcattgtagtacagttcaatttcggaaaacaccgggtacacggtaacttttccggtccccgtcccatcctccgtttccactctcttcccgtctgatcaggtctcatccaaacaatatttttcatctgttccaaatcatggtatactggattgcagcgtaaagcaacaacaaatccgcgcagatacacaaaggaagtttattatatgaaacgaatcgattttgaacatggaaccattaccggaaatattttaggcgccgcccttcccatgctggtcgcacagctcttaagcctgctctacaatattgtagaccggatctatattgcccgcatcccggatgtcggcaccacagcgctcggcgccgtcggactctgttttccaatcattgtcatcatcaccgccttcagcaatcttttcggcagcggcggtgccccgcttttctcaatcaaccgcggcggcggagatacaaaaaaagccggtcagatcatgaatacctcatttaccatgctgtgcgccggcgctctggtgctgatggcagctggtctgctgtttgcagcgccaattcttaagttgtttggtgcctcggatgccgccctgccgtacgcctatccttacctgatgatctatctgctcggaacactgccgtccatgattgccaccggtatgaacccctttatcaacgcgcagggctactcggtcgccggcatgctctcggttgccatcggcgccgtgaccaatttcctcctggatccgctttttatatttgtctttcatctgggaatcaccggtgccgcacttgccaccgttctctcacagacgctgtccgcgctctatgtgatccgctttctgcaccggcgcgcggaatataaggtgcggctgctgcgcccggatgagtggagcgccagtctgatcgaagcaaaaaacatcgtaagcctcggcaccgccggatttatcatgcagctcacgaacagtctggtatccattttctgcaacaatgtcctcggtgcaaccggcggcgatgtctacatctccgtcatgaccatcatctcaagcgtccggcagatggtggagacgccgatctacgcgatcaatgagggaacctcaccgatcctaagttacaattacggcgcaagacggccgggccgcgtgcgaaaggcgatcacagccctcgccgtcctgattctgctctataccgccgtcatgtggagcatcatcattcttgccccgcgggcgctgatcggcattttcagttcggatgccgcactggtcgctgacgccatcccctcattaaagctttactttgccgcctttatttttatggatctgcagtacatcggacagaccgtcttcaaatccctgaataagaagaagcacgccatctttttctccctgctgcgcaaagtattcatcgtcgtgccgctgacctatcttcttccctatgctttgggcatgggaacagacggtgtctttgccgcagaaccggtgtcaaacgtcatcggtggaagtctatgctttataacaatgttgtttacggtgctgccggaattaaagcggatggaaaaagaagcataacccgttcctccctgctgtctttgtaatcacacacactgcattcatctcttatgcttcctcgtactccgccagctctgtctccgtctcaagcatccgctccagcaggctgtcctggttggcttcctccgcatccacagcgctctgcagttccatcagcttcggataatcgcttgcaagcgccgggtctaacatctgcatctgaagctccgccagcttctcctcgctctccgcaagcatccgctcatacttttccttctggcgctgcagccgggagcgcaccttgcccgggttgtaataggccttcttgtcaaaaacatccgagagcgtcggaacactgccggcatccgccgttcctcccgcatcggcttcctgtcctgcggcacttcccgcgttcgctaccacgccgcctgcacacttctgcttctctgcgaggtattcctcataattcatcgcatactgcctcacggtgtccccggaaaattccagaatgcccgtggcgatcctgctgataaaatagcggtcgtgcgacacgaacagcaccgtgccctcgtactcgcgcagcatctgctctaacgcttcttttccgatgatgtccatatgattcgtcggctcatccaggatcagaagattcggtctggtctgaagcattttgcacagtgcgagacgtaccttctccccgccggagagctgccccatttttttctccacatcctccccggaaaataaaaagccgccgagcgcgctgcgcacctcctcgcgcaggtaccccggatacgctgcccagaaattctcaagcacggtctgctggggcggtgcctgctccatcaccgctttctgctggtcaaaatacccccactccacgttctgcccgaatttgaagctgccgccaagtgccggcagttctccgatcagcgtctttaataatgtagattttcccttgccgttctccccgatgatcgccagacgctcctttttctgcagcaaaaaggacacctctgccagcggtgcatcatagccgatggagaggtcttttgcctgaatcacattggtgtagctctcgatacgcggcgtataccgcccgtgaaatgcgcgcgtatcaaagcgtctcggcttctcaatcttcaccatgtgctcgatcgccatgcgttttgagcgcgtcgccgccaccttggtcggtgtgttcttccacttttcaatccagtccgtcagccgtttgatctctttctgctgttcctcgtaatccttctcctgcttgatgagatcctcctgcttgcgttgcatgaaatacgtgtagtttcccggatagcgcttcatctcgtgatactcgatctcataggtcacatccgccaccttgtccagaaacatccggtcatgcgacacgatcacgaccgctttgtcgtagcctttcagataattttccagccactcgattgtcggcagatccagatggttcgtcggctcgtcgagcagcatgatatccgggcgcgtcagaagcagctttataaacgccactttcgtctgctgccctccggaaaaactgccgatcggacgccgcagatcctccagtgcaaatccaaaccgctggaacatcgtctccatatccctgcgccaggaatatccccgcatcgcctccatctgcttctgcaatctgtcatactcgcgcaggagcgccccatccggcgcagtctcctttgtctctgccgccgtcttcatctgctcctccagctctttcatgcgctcctcacaggcaaacaccggtacaaaaactttttttaattcgtcctccacggtcacctccgcgtccacaaagttgacctgccgcaggaaaccgatctcctgtctgcccgccatcgtgatgccgcactcctcgtcactgtctgggttgctcatctctatatccccggcaatcagtcttagcagggttgtctttccacagccgttgcgccccacaatcgcaattttttccctgtcgtgtacctcaaaattgacgtcccgcaggatcacatccccgccgaactggacgcgtgcgtgtctgatctgatacttcataatttaaacccacttctttctatattacagtgcaaaagccacggctgtctgccgcggcctctcttttccatggaacttcatatctctgccgataaactcctgttttgaattcttttggattataccgaatcccttctgtactgtcaacgcctcccgccgcaggttcccccccttttcctctcccatttatatacagaatttgctaaaattttaacaattttttattgattttatgagttaactatgtataattatggtaggggaagttggcaaattccagcatcccggaaaagatatcgtaaagcctgctatccgcaggtgtttaccatataaatatgaaaggaaagaggtttaataagatggcaacaatcgatttaagcaagtacggtattaccggaaccacagaagttgtgtacaatccttcttatgagatgttatttgaagaggagaccaaaccggagctggaaggctacgaaaaaggacaggtcagcgagctgggtgcagtgaacgttatgaccggtatctatacaggtcgttctccaaaagacaaattcatcgttgtagatgaaaactccaaggacactgtatggtggacctccgatgagtataagaatgataaccacccggctacccaggaagcctggaatgcagtaaaggacatcgctatcaaagagctctccaacaagagacttttcgtagttgatgcattctgcggtgcaaacaaagatacccgtatggctatccgtttcatcgttgaggtagcttggcaggcacactttgtaaccaacatgttcatcaagccaaccgctgaggagcttgagaacttcaagccggatttcgttgtatacaacgcttccaaggcaaaagttgagaactacaaagagttaggtctgaattccgagactgctgttatgttcaacatcacaagcaaagagcaggttatcgttaacacctggtacggcggagagatgaagaaaggtatgttctccatgatgaactacttccttccgctcaagggtatggcttccatgcactgctctgcaaacacagacttaaacggcgagaataccgctatcttcttcggtctttccggtacaggtaagacaacactttccacagacccgaagcgtcttctgatcggtgatgacgagcacggctgggatgacaacggcgtattcaacttcgagggtggatgctatgccaaggttatcaaccttgacaaggattccgagccggatatctacaatgcaatcaaacgtaacgcacttcttgagaacgttactctggatgcaaacggcaagatcgatttcgcagacaagagcgtaaccgagaacacccgtgtatcttacccgatcgatcacattcagaacattgttcgcccgatctcttctgcaccggcagcaaagaacgttatcttcctgtccgcagatgcattcggcgtacttccgccagtatctatcctgacaccggagcagacacagtactacttcctgtctggattcacagcaaagcttgctggtacagagcgcggtatcactgagccgactcctactttctccgcttgcttcggacaggcattccttgagctgcatccgaccaagtacgctgaggagcttgttaagaagatggagaagagcggtgctaaggcatatcttgttaacacaggatggaacggcacaggcaagcgtatctccattaaggatacccgtggtatcatcgatgccatcttaaacggcgccatcaagactgctccgaccaagacgattccatacttcaacttcgaggttccgacagagcttccgggtgttgattctggaatccttgatccgcgtgatacctacgcaaatgcttccgattgggagacaaaggctaaggatctggctgcaagattcgttaagaacttcgcaaaatacgaaggcaacgatgccggtaaggcacttgtatctgctggtccgcaggcataattgctgcgaacaatccgcctaagaatcataaaagaaggggctgccgcataaagcggtcagtccctttttacgtggtaagtactataatggaaaacagatcatgcccttcgatttcagatggaaatgtagctggaacattcgttgaaaaaaatgcgtacatttcttcctgtcggatttttgcatcggattccgtgtctcttccacgttttgacaatccacggaatgtgtccgacaaaccgcagacaatgagcggattccctagcgtccctagcggcactgcttcacagacaatataaaaccacgcgaaccgaactcgtcgtcatcagctattcaaaacagggcagatgacgactcagacagcggcttcgcgcggttatgttctattcagcagtgccgcaagggacacacgagaatcctaaaattgtctgcgggttgcggacacacccgtggagtgctcaaaacttggaaaaacatggatcatcacggatgcaaaaaccgacggggtagaaatgccgcattttttgatccgaatttccagatgcattccatctgaaatcgaaggatatgatcttctctttataatattacttatcaagtcaaaaaggggctgcccgcttatggggcagcccctcgttttactgcatcttaaagtaatcaatactgctgaccagctcatctgcgatctcgcgtagctgctctgcactgacatacacctgcttaaaagtatccactacctcttccgtctcatcgtatgtcttcttcgtgctgtccacattgccctgcacgatttctgagagttcactcaccgcctgcagcacttcatttctggaattttccagatgtcctgtgctttctttgatctgacggatactctgcatggagctgccgatctgcgcgattacctcttccactaccttctgcgtatcctgcatgctcgcactctggttcataatgatctcctgcatctgctgcataatctcaactgcctttgcagaatcctcactgagtgtcttcgcggtctcctcgatctccttgctcgactcattcgactgctcggagagcttcttgatctggtctgccacaacaccgaatcctctgccgctctctccggctctcgccgcctcgatcgaagcgttcagactgagaaggttcgtctcctccgcaatcgacgtgataaacgcggttgcctcatggatcttctgtaccgaatcgttggtccggttcgtctgctcctgcacttcaccgataatgcgttccacctcgacattgatgttacgcaaattgttgagcgtctctgccgccttctcactggactgctgcatggaagctgcattgtcatccaacagttccacctctgccgacgtctccgtaatattctcacccataatacgcatatgttccgatgtattctgggaattctgtgcctgttcggtggaattctccacaatctggttgactgccatgcgcacatgatccatggttccgtttgtctggtctgccgctgtaccgagcagttcggacgcatcgagcaggcgtttggcattctgtgaaatctcctggatagttgccttcatggcatcccgcagcgtaatcgtcacgcgggacagatcaccgatctcgtcgtgtctcccgagcagcttgtcttctacccagacattcagatcgccgtccgccacttttcctaccacctcaatactgctgcggatattgcggctcattgaggttgcaagcttcatgccgatcgcaatgcataagatcatcacagcgcataccgccatactgattgttcccagaatcttgttgatcacggcatccttttcctgcttgtccgttcccacaaaaatcataccaataatctcatccgtcgatccgttctgatataccggtataaaatatccatagttcaaagtgccctcgatcgacaccgcatgactgaaataggattcaccgccctgcaataccttttccacaatccggtcaccggctttggaatttaagatgcggtcaccgtttgcatcgaccgccgatgtcataatgcgggtatctccgtaaaaaaatgtgacgtccattccggtattgcctttgatacggtctaccagactctcggactttgaaatattataactgcccttccagatatccccgttactggtctgcagataatctcccgtgttctgatcgtaggctgcgagcgtggctgccgccgttccacgaagcgcttcctcgatctcctccagcatggcgctccgtaccattgtggttgtcaaaaacatggaaatcaaccccaatatgatgaccggtgctattgtaatccccagaatctttttcttaatgttcatactaatctccatttcgtctgtgcatctgcatgtcgcttttcgtccggctgctccttaatccacaacattcaccgtcttaaaataccagttgatgccgccggtgattgtcgcatcgtcgagcgtcttgcccgcttcaccgaccgtctctccggtatttgtctcgatcacaccgtcaaatacaccgttctgccccgaaaggatctgttccttcgcctcgtctaccttctcctgtgtgccctccgcacagaaatccgccagattggtaagaccgaccagattctcgttcatgccgccgtaataattgcttccatcccaggttccgtcaattaagctctgcactgccgcggtatagtaggcactccagttccagataacgctgcacaggcaggcctccggcgcattcttgctcatgtcggaattgtacccgatgctgtatacgccacgctcctgggcaagtgtctgcggatactccgtatcacagtgctgggcgatcacatcacaatccatatccagaagtgtctttgccgcattctcctccgcctccggatcataccagctgttcgtcaccttgacgtaaaccttcgcgtccggattgaccgaatagataccgagcgcgaacgcatcgattcctcccgtcacctctgaattgctgttatccatggcagccacataaccgatcttgttcgtcgtggtattcattcccgccacaataccgcttaaatagcgcgcctgatagattctgccgaaatagttattgaaattcctgccgttgctcatataaccggttccatgggaaaaataaacatcgggatattcctccgccatctccgctgtcgcctccatgtaaccccagctggtcgcaaagataatgttgcatccctcgtcgatacactcctgaatcgcctgctttgtcgcatcctcgtcggaatctgagacattgattttccgcacaatctgatcgtcggaaagtccgaggttctgctgcattccctgaattcccagatcatgcgtgtatgtgtatccgcttccctctgccgggtctgacagatgaagcaccccgaccttgatctcgtccttcggaattccctccgtcgcggatgctgccgcagccgccgactccgtccctgacgtctgctgcacgctctccgctccggcatttgtagcataatcatcaatctgcgtatctgcaccgcagccggcaagcagaaaacttcccatggctgccgcaatcagtctgatccatttttttctcatatccggtactctctttctgtatgctattatctgccaactttttacatctgcctttattatacacattttttattttgtcatcaataaatttgtaaatttttggaaatgtatcagaatgttttctctgaaactttcataggaaagttccactttcacacatgaatgtatcacggtatttcctatgaaataaaaaagccttcacagttctgccgcattttactgccggcggcaaatctgtaaagacttttcaaaatacatattcagttagctcaaaagattctgcatgctctttaagctgataaccagcgtagaggtgttatgcagaagcgctgatgtggtcggctgtaaaacgccgccgactcctagcaggatcaatccggtattgaatccgacaatcacgcggtaattcttgcgaatccgcttcatcaggccgtcgctcaacagttttaaggtcacgatctgatagagatcatccgagcttaccatgatatccgcgatctcacgcgcaatctccgcaccgtctgaaatcgcgatgccgacatccgccgcagagagtgccggggaatcgttgatgccgtctccgaccatgataaccttgcgtccggccgccttttcacgctcgacaaaaccggctttatcctccggaagcacctcggaataatactcgtccacgccgacgcgctttgcgatggcgcttgccgtccgctcgctgtctcccgtcatcatgacgatcttcttgatgccggagcggcgcagggaattgataactgcctccgcctcctcacggagcggatcttcaatacagatcacggctgcaagctgtccctcgatggccagatacagatgggaatactcctccggcaggctctcgaacagttccttcgtaccctcaggaagggcagctccctcatcctcaaatacaaaatgatagcttccaatcacggctttcctgccgttgatcgtggtggaaataccatgtgccaccacatactccaccttggaatgcatttcctcatgatccagacctttttccctggctgcctcaacaaccgcttttgccatggaatgtgggaaatgctcctccatgcaggctgcaatcctaagaagctcatccgggctgtccccgttaaaggaaaccacttttgccacggtcggctttgccttggtcagtgtgccggtcttatcaaagacgattgtatcagcctcagccattgcctctaaatattttccgcccttgaccgtcacattgtaaaaactagcctcacggatcgccgacaatacggagatcggcatggcaagttttaatgcgcaggagaaatccaccatcagaatcgacaacgccttcgtcacattccgagtcagaaggtatgtgagcgccgtgccaccgagggaatacggtaccagacggtccgccagatgctctgcccggctctcaagcccggactttaacttctgggattcctcgatcatctgcacaaccttgtcgtagcggctggagccgcctaccgccttcacgaaaatggtaagctccccttcctcgactacagttcctgcatagacataattctcactaatccggcgtaccggctcggattctccggttaaggatgcctgattgaccatcgcctcgccgtctgtcacgacgccgtcaaacgggattacattgcccatatggacaaccacctcgtctccctcacggacttccttcgcgccgacaagaacctccacgccgtccttcttcagccatactttgccgacattcaaagacatggtgcgcgcaaggtcgccgacggacttcttgtgcgtccactcttctaacagctcaccgatgccaagcaggaacatgatcgatcccgccgtctcggtatcaccgcgcagaatagacactccgatcgccgtcgcatcgagtaccggtacttcgatctttcgtgccgccagtgtctttatgcccttccagatgtagcggaacgacttgaccgtcgtccagcacgcccggataggatacggcagaaaaatcttggatgcatagcgtctcaccactctgccgatcagcttctcctggtagcttgcattcagctctcttccggaattctcgatcagcccgttcggcacttccacatcttcatagtgaaaatgtctgagcttgtcaatcagttccgctctgctgccgtcataacagatgactgcgtcacccgtacgctcatacaccttggcgcttgagacctgtatatcattttgtaaaaaatacagaagcgtatccgcctgtgcacaactcatgcggtactgtgccacgtgaatccgcatccgccccttaatctcatgcttgattgcaaacttcactttactcgcctcttatcaaaatcttattcttcggtgttctctgcagtctcggtcttctctgctgcttcttcctctgcatctgcaaatgcctctgcctcagccttagctgcgcgctcctcattgatctcctttgcgcctgcatagatgtcaccggcattctcctgtacggtgcttacggtgttcatcacgcactcttttgctcttaagaaagctgcggtacagcttgtgtaaaccttcttggcatccttgctggaaagtaccttgataccggctgttccaaataatacgccgcctgcaaaaattcctgtcttcttccaatcgatcttctcaaaacactttaacatatgtatcctccatttctatgcacaatcccgtgcatcctttgctgaacatgttgttcgctctttacattattgtgcattatagtaccgctttttgtatttttccagtattttttcgttattgataaacttcatcattatccaccattttccatcctgctcccggtttttaatacctccgccggatggctgcgttttttccttattataaaccggttcataccggctgcaataaccgatggcatcaaaaacctgtaaagcagcagagatttactcgatccctgccactccttttatttctatatttttctatttctcttccggttcgtcctcaagcatctccgtaagcgtgtgccagccgagtaccgcgcatttgacacgcgccggcatgtgtgaaatgtccacaagcgccgatgcctcctcgagttcttctaattcctcgtccgataccgtccctttaatcatccggaagaacagatcggccaggtgcatggcctcttccttggtctttccgatgaccagatccagcatgatatccacggaagcctgtgagatggcgcagccgtcgcccgtaaaggttccctccgcaatcctgccgtcctccacgcgcagctgcagcacaatatcatccccgcagctcggattcacaccctcaagcaccagatttgcatccgcaagcttctccttgtgccccggatagcggttgtgatccgtcagcacctcattataaaatgtccggttattcatatcccatcatcctcctgacttgtgccagctgatccagaaatcgtccgacatcctctggcgtattataaaatgccacgctcgctctggcacaggacgaaatgccgagccattccaacagcggctgggcgcagtgatgtcccgcccgcaccgcgacatgcgcctcatctaagatcgatgcaatatcatgcgggtgtacatcatccacggtaaagctcacaattccgcagtgctccttttcgtccccgcttcccagaatatgcacgcccggaacttttttcattccggcaagcagctgggcggtaagcatctcctcgcgctccgtgatttctttccagccgatggattccagataatcgatcgcggcggcaagcgcgaccgcgcctcccgcattgaccgtccctgcctcaaacttatggggcagctcggcaaatacggctccctctctcgtcacacggtcaatcatctccccgccggtcagaaacggcggcatctcctctaaaagttcctgttttccatagagcacaccgatccccatcggcgccatcagcttgtgtccggaaaatgccagaaaatccacgtcaagtgccgtgacatcaatcggcatatgcggcgctgcctgtgccgcatccgccagtaccacaccgccgttttcgtgtaccatcccgatcagtttttctgccggggtcgcccgtccaagcacattcgagacaagtgtcagcgcggcaagctttgtgtgcggtgtgacggcatcacggattttctcctccgtaaaactgccgtccggttcacactccagatatttaagcgtggctccggttcgtctggccgccatctgccacggaagcaggttgctgtgatgctccatgatcgtgacaagaatctcatccccaggctttaaccggggcagcgcatagctgtacgccaccaggttgatgccctcggtcgtatttctggtaaaaatgatttctctctcactcttcgcatgtacaaactgtgcgacgcgctctcttgcatgctcatactgctctgtcgcctccacgcccagctcatagagcccgcgcagcggattggcattccagcgctcatagaattcccgctccgcatcgagcacgcacgccggccgctgttctgtcgccgcgttgtcgaggtaagcgatatcgctttccgcaagcagcggaaaatcttttttataatctgtcatatgcattgctccttcagataagtgtcaacagcgccgcgcacctcctctgacgggatctggctgtttatcgcttcgatcttcgccagtgtcagcagtctctgtgcctcctccgggggaatgcctctcgtggcggcataaaagagcatgttctcgtcgagcttaccgatggaagcgccgtgattgccctccacatcctcctccgcgcacaggattaacgggatggtctggttgaccatattgtcaccgacaagaagcacatcctccttctcgtctcccttagctcccacacagccgtgcacaaaatcgatcgttccgcgcagcagcttcttcgcctcgttctttaagatgcccgatatctgcatattgctcttcgtctttttcccgcggtgtctggcgacataattcatatcaatcttctgcctgccggtgcccagatatccgcttacgagttctgccgtgctctcttctccactaagttcaaacagtgttcccgtatagacctcggcgccgcccagttccagctgcacttccttcacagcggcatctttttcacacgagacacccacatcatgcaggcagacggcttccgcattcatcgtctgcaccacatacagttctactttcgcgccctccccggcatataccttcgtctggatggcggagatcatcccgcccgtctccccgctctcgcagagcaggattacttttgcccggctgtgcgctccggcatagatatgcaggcggttataggcgtgctgcccgctttggtaggaaaaacggtacacatacggttcgccgcagtctgcatgttccggaatcgccaaaagctcggtatcccatgccacatctgtctccgacggctgatccatcgcctcgcccatcccggttgtgattttatcccaatccgtctgctgtgccatccgcagctgctctgcctctgcctgccctgcttcttccacactctgttttatcgctatactgccgtcgatccgcggcatcccaatcacggtttcattcattttcagccagttccaggtctttgcaggaagccggttgactgtgatcgtctgattctgttttgtcataagctcctcctttacccgatgctgcccttcatctcaagatcaatcagattgttcatctccaccgcatactctaacggcagttcctttgacacgttgcttgcaaaaccgctgacaatcatcgaccgcgcttcctcctcgctgataccgcgggacatcagatagaacacggcgtcatcgctgatacggccgattttagcctcatgtcccacatccgcgtctcctgtgcggatgtccatcgccggaatcgtatccgatcttgagatgtcatcgagcatcagcgactgacaggaaactgccgatttgctgccggcggcttcctttgtaatgctcacggaactccggaacgtgctgataccgccgtccttggagatcgacttggtgttcatgtacgaggaggtatccggtgcggcatgcaccacctttgccccggtgtccagattctgaccttttccggcaaacgtgatgcctgtgaattccatgtgcgccccttttccctttaagatactcatcggatagagatacgatacatgggagccgaaggagccggacacccactcgatccgtcccccctccttgaccagcgcccgcttggtgttcagattgtacatgtttttcgaccagttctcgatcgtggaatagcgcagtgtcgcgccctcctcgacaaacagttccacacagcccgcatggaggttcgccacattgtattttggtgcggaacagccctcgataaaatgcagatacgcccccttatccacgatgatgagcgtgtgttcaaactgccctgctcccggcgcattgagccggaaataggactgcagcggaatcgtcaccgacacgcccggcggcacatagacaaacgatccgcctgaccagactgctccgtgcagtgcggcaaatttgtgatcgttcggtttgaccagtttcataaagtggctttgcaccatatccgcgtattcgccctttaacgcgctctccatatccgtgtagaccacgccctgggctgccacttcttcccgcacattgtgatacaccagctccgagtcatactgcgccccgacacctgccagcgacttgcgctccgcctgtgggataccgagccgctcaaaggtgtccttgatgtcctgcggcacatccgaccactttgccgtcatctttgtattcggccgcacatacgtcacgatatggctcatatccagcccctcaatcgacggtccccagtccggcaccggcatctcattgtaaatctgcagcgcctgaagccggaacagttccatccacggcggatcctttttttcacgggagatctgctcgacgatcgcctcggtcagtccctcatcgaccttgtaagcatcccgttcctcatccttcacatcgtatatgctgcggtcaatgtcttctacgtatgtcttctctttcaccgctcatcctctcctttttgtgccagcttctcatactcctcgtaaccttcgcggttgatcttatccaccagcgatgcatccccggatgccacaatatgcccgttcaccatgatatgggttgcgtccacatgaagcgcgtccaggatgcgcgtgctgtgcgtgatgattaaaagtgcgccgtccggattctccttctggtactcgcggattccctcggatgcaagccgcaccgcatccacgtccagcccggagtctgtctcgtctaaaatggcaagatccggttttaacatcatcaactgcaggatctcggatttctttttctcaccgccggaaaatcccacgtttaaatcccgcccggcgtaggagggatccatgtgcagcacttccattgccgcttttaattcttttctgaaattccagacacgcattttatttctgccctgctcgctcaatgcactgcggataaagctctcgagggagagtcccggcacctcgagcggttcctgaaacgacaggaacattcccgccttggcgcgcttgtctgccgcctcctccgtgatgtcatttcccttgaaaaggatttttccctctgtgacgctgtatttgggattgccggtcagaacataccccagtgtcgactttcccgcaccgttcggtcccatcagcacatgcgtctctcctttttttatcgtaagcccgacctcgtgcaggatcaccttatcctccacgcgcgccgtaagcccttctacctgtaaaatctgctctgccatagctacctccgtttctgaagcgttttctgcagccggaatcctctttcatgattccctccgctgcccttttggttttctttgcgacgctcccacacatctttcatatcctagttgcaaggtaggatatgattcaaccacattctagaacgaaaccgttaagaaagcaagagagaaattgccccgctattgagattgtttctcatattcacagagagcgtgcgatcgcattccggatagaagcaggcggggaaattcggatcgcacaatacggaatttctaaccctgcgctttttacatctgcgataatccgtgtttttccaagttttgagcactccgcgggtgtgtccgcaggccgacagacaatttaaggacttttgtgtgttccttacatcactaatgaacaaaacataaccgcgcgaagccgatgtctgagtcggcatctgccatgctttcaatagcagatgccaacgagtttcggttcgcgcggttttatattgtctgtgaagcggtgatgttaggaacactaaaaagtccttaaattgtctgtcgtcacgctctcttccgaatctatgcctccgcaaaacgtgcgaatgaaagttccgctccgtttgccacgcggctgcagatattgactgcccggctcatcacatccgaaaactgtccgtcctttgtgaccacaaacagcatccgctcgtccgctttgatcgagacgtcctccacgtcagcgatttctctcatctcccgctgtacttccctgctctcatcctctgtcagcttttttgataatcgataatatcttcccataatgccatcctttctgatcgttgcatgttcggggttagttatatctaatcctgtttttattatagcactgcgatctgaaatgaaaacggggttgctgataagttttctcattatatccggctctgccgcatctttttcccatattctgcacatactgtgcctgtcacaacacggattacccggtatatcaataaaaataggagaaatcaacatgggaaataatatggaactcgattacgaaatgttctgctaccagtgtgagcagactgctaaccagaaaggctgcaccaagctcggtgtatgcggaaaaactcccgaagtcgcaaatctgcaggatcttttaatctttcagatcaagggcatcagctgctatgccaggcctctgatcgaaaaaggcactcctatggataaaagtgttgtcagcttcatcgaaaatgtgctgtttaccacacttacgaacgttaattttgacgcggaagtacatgtcgaacttttgcgcgaatcccagcgcatcaaagaagaactccgggcttacgcaggcgctcccagtcagcccacgcttcacgccacctacgatcttccgcagaccaaaaccgagatgctgcgcgacgcacccatcgccggtatcatgtatgacaagtcgctcgatccggacatccggtccctgcgtcagaccgttctctacggactcaaaggcatcagcgcctacgggcatcaggcgagagagctcggctattacagcgatgaggcggatgatttctatattctcgccctggaagccctcacggacgaccggctgtcggtcgaggaactgatccgccttaccatgcgcaccggtgagatggcaatcgaagtcatgaaaaaactggacgaagccaacacgaccatctatcagaacccagccccgcaaaaagtcaatgtccacctgaaaaaaggtccgtttatcatcgtctccggacacgatttaaaagaccttgaaatgcttttaaagcagacggagggaaccggcatccatatctacacccacggagagatgcttccctgtcacggttatccggggctgaacaaatatccgcacctcgccgggaatttcggcggtgcctggcaggatcagcagaaacagttcgacaatcttcccggctgtattctcatgaccaccaactgcctgatgcgcccgcgcgactcctacaaagaccgcatctacagcacaaatgtggtcggctgggacggtgtgaagcacattggcaaaaacgagaacggcgaaaaggattttagcgccatcatagagcaggcactggaactcggcggctatcccgaagaccaggacgtacaggaaatcctcgtcggcttcggtcaccacgccacactgggctatgctgatgcgatcgtggatgccgtaaaatccggaaaactgcgccatttcttcctcatcggcggctgcgacggagcgcgccccggacgcaactattacaccgaattcgccgagatggttccacaggactgcctcattatgaccctcgcctgcggcaagtaccgcttcaacaagctggacttcggggaggtggcgggtcttccgaggctcctcgacatcggacagtgcaacgatgtctactctgccatccgcattgccactgctctcgccgatgcatttggcacggatgtcaacggtcttccgctctcgctgattatttcctggtatgaacagaaagccgtcgctgatcttctcgctctgttaagtctcggcatccatgacatttatctcggtcccactctgcccgcctttttgagtccgaatgtcctgcagtacctgacagacacgttccacttaaaatccatcagcaacgctagggacgacatccgcacctgcctcggacaggcagtctgatttccgcagctttaaccgggttgttgaattatattctgattatatactatatccttctgtcactacagcgtctctccctccaggtagcgatgaggtaaaatccgctgactgtctcctgtcatctgctccacttccggttcagcgtctatcatggcaaaaagcatctcaacggcactttttgccacctcatccaccacattggagatcgtggaaagctgcggtgtcacgtatgccagcgtatcgatattgtcaaatccggtaatgccgtaatccaccggcgcctttctttttgcccgcttctgatccttcatgatctcaagtgcatactcatctgcggtacagacaaacgccgtccgctttccttcttttaatatggcatccactttctgcaggtactcccaggagagaatagtctccggccggagtgtgggatagcgcttcatctcttcctcataccccagcagacgctccttgtgaacatacagattctgccggttttttgtatctaacggcgggcagacaaacacgatgcgctcatagcccttctctgccgctctctgcactgcctcccgcactgctgcccgctggtcgatcccaacaaacgggatgccgtccgcaatccggttatccacagagacaatcgggcggtgcagggactccaggaatgtccggtacgcctccccctcgttgaccgaggagaggatgatcccgtcaacccggtaatccgcaagtcttgtcagctgctcgcgctccgtcccggcatccccgccgtgcagcgtaatgttgacgccgtagccgcgggcatatgcctccgtgctgatcgtcgagagcatctgggcaaaatagcggttcttcacgtccagcacgacgacaccgatgttgtacgtctgtcccttagccagtccggtggcaaggagatccggccggtagccgtgttcctttgccacctgaaggatcatctcctttgtctccggcttaatccgcccggttccatttaatgcccggtgtatcgttgttctggaaacgccgcataactgcgccagatcttttgtcgtgatcgccatattttcctgctccccgttttctttcttttcaaaaaactttcttctattttaatcgaatctgaaccatttgaaaagagagaggtacaagttccactgaaatttcgtttccgctgcaggagacgttttccagttccacaggtgttacacagtcatgttccttttgatttgtcgctttcttatcctcgtgaaacagtgcaatactttttaaaaccgcctccggctccatgccctgtaaagaaacggtcgcctcggcactctcctccatacggtttacaaagaaaaccgtcacttcatgcttttgcccgtcatagacgagcacatgatccacacagggtaccgtctcaaacgtgctgcacgcgtaggtgtctcccgtataccgtgtatctaacgtcacgccgtgcgcatacttcgccatcagggcaaacggataatacaccggctgcacccacacaccgccgtcctcctctgtcataatgcaggagctgatattcgtaagaagtgactggcaggcgatcttcacacgatccgcccgttttatgaaattcatcagcatacttgcaaacagaagcgcatcctccatggtatagatctgctcgctgatcgcgggtgccgtctgccacggtgcatcctccaccgatttctgcacctgcacgtcgctcatcgaccagacgccccactcatcaaaacagatgttgatcttatgtgacattttcttttttaccctcacatagtcgcaaatgtttaagaccgtctcgatatagcgctccatatccagcgactgtgccagaaactctgccgtgcccttctcctgtcccccgtaatactggtgcagggaaatgtaatcgaggcagggataacaatgttccagtacggtctgttcccagtcaccgaacgtcggattcgtggacatcgaacttccgcacgccaccagctcgatggatggatctaagattttcattgcctttccggtctcataggcgatcctgccgtattcctccgccgtcttatgcccgatctgccagtccccgtccatctcattgcccaaacaccaggtcttgatgccgtacggcttttcgtgcccgtttgccgccctgaggttgctgtaatacgtgccggtctccatattacaatattccagcaccgcaagcgcttcctcgattcccttggtcccaagattcactgcatagatcggtgcaacctctgccgcgtccgcccacttcataaattcatccagaccgacctcgtttgtctcaatacttttccacgccagatcccgcttcctcgggcgtttctccacaggtccgatcccgtcccgccagtcatagttggagacaaaattgcccccaggatagcgcaccgccgtgacccccatctgccttaccttctgcagcacatcgccccggaatccgttttcatctgcagtcttatgcgacggctcgtagatgccggtgtacaccactcttcccatgtgctccacgaaggagccgtagatacggtcgtcaatcctgccttttgtaaatgccgtatcagctttaattgtcacatgtctcatcttctctctcctctgcctctattctttcattcccgatgttgcgattccttccatgaaaaacttctgtccgaacaaaaacagcagtaacagcggcagaatcgcaatcaccgtagcagcaagtgtcggaccatatttgatcgaattacttccaaccagaattgcaagtcctgctgacagcgtccgcatttccaccgaacttgtcagcatcatcggataaagcagatcgttccagttattcatgaaatgatagattcccagtgtcacaagtgccggctttgcaagcggcagaatgattttca

SEQ ID NO: 11580 - DNA, 8003 bp, Unknown
  gut microbiota DNA sequence
cctacggtgtggttttctaataatattacttatcacccaaaagggatctatgcttattgcggcagccccataaaaaactccggcagactcttacgaatccgccggagttactctttttcggtctttacagttctttctcgaagaatgccttcatcgctgcaacagcggcatcctcatccgcgccgtccacgttgacggtcactgtctcgccctgctttacgccaagcgccatcactgccatcactctggtagcgtccacttccttctcacccttcttgatggtgatcttgctggtgaagttctttgcctcctttaccagaagacctgccggtcttgcgtgaattccaagttcgtcttttacggtgtaatcgaatgttttcatgttttccatttcctttctttttttaattatgtggcttttatttactccattccgacaacgcgctcacgcaccggaagtaccatcgcaggtgatacggacaattcgtcgattcccatcgcaacgaactgttccgtcaatgttgtatctgcgccgagttccccgcagattcctgcccagataccctccttatgcgcactgtcgatgaccatctgaatcatcttaagcactgccggatggtgggaatcatagaacatatcaagctttgcattctgtctgtcgattgccagtgtatactgtgtcagatcgttggttccgatactgaaaaaatccacttcctttgccagttcatcggcaatgatgaccgccgccggtgtctcgatcataataccgaattccaccttgccgtacggaatcttctgtgcatcaagttctgcacggatctccgccatgatctccttgaccttctgtacctcccagacggaaataatcatcggcaccataatggcaatgttaccgaacgcactcgcacggtacagcgcacgaagctgtgtcttaaaaatctccgggcggtccaggcagatgcgcactgcgcggtagccgagcgccgggttatcctctttgtccagattaaagtagtcaatcttcttatccgcaccgatatccaacgtacggatgataacttttctgccgcccatcatctccgctacgctcttgtatgcggaaaactgttcctcctccgtcggataatggtcattctgcagatataagaattcactgcggaacagtccgattccctccgcatcattcattaacgccgcgccaacgtcgccgatgccgccgatattcgcgtacagcttaatggatttgccggattttgttgcggtcggcttgcccttcaatgccgataacagttctttgcgtttgctctcgtcttctttcttcttctgatactccgccagaacgctctcctccggctcaatgatgattttgcctgccatgccgtccacaatcgccattttgccgtccatgccgtccgctaccggcgtacataccagtgcaggaatgttcatcgtgcgggcaaggattgcggtgtgggaattcgtcgatccctctctcgtcacaaatgccagcaccttggaacggtcaagctggatcgtctcgctcggtgccagatcatccgccagaatgatcgcctgctccatctccatggactgcgcgccgctgccgtgatgcaaaacggcgatcagacgctcggaaatatccttgacgtccgccgaacgcgccttcatgtactcatcatccatgccggcgaacatcgccgcgaagttgtcccctgtcgtggcaacggcaaactctgcattgacctcctgtgtcgtgataatgttgcggatggaatcgcagtaatcctcatcgtccagcatcatctgatgtacctcgaagatcgccgcattgtcctctccgacttcctttaccgctttgtcgtagagtgctcccagctcctccatggcgacttttttcgcctcctcaaagcgcgtacactcagctgcggtatcatcaacatgtgatcttctcaccgcgctgctcttcttggcaaactcccgaatcgggccgattgcgattccgctaaaagcggtttttccctcgatgcaaatcatatgcgttctcctttcattcttcgcttatttttctaatccacgcaatgtggtctctacctgttccagaatatgtgcggcatttcctgctgcataatcccccggtgcaatggcaagcaccggcagatttccgcactccgccgcaatcttttccctgcggtatgcgatctgcggtcccagaaggatcacatcataccccgtgcagtattccttgtaggcatgtaccccgacagccttcacttccagtggaagctgctccttttttgcatactttatcagttccccgcgcagaatgtcggtcgacattcccgcgctgcagacaagtaatatcttcattgactgcctccttttgtctccccaagcgcacggtagacatccacgatctcctccgcaagctcctgcgccagcgtcgccatcataaaatggtcctgcgcgtgcgccaccagcaatcctccgtctgtctgctgtccgcccgcctctctcaccagaagctccgtgtgcaccttatgtgcctccgtggcatagcgttccgcctcatccaactgctccgcggctccgccaaaatcaaatgcctttgctctgtgaatcgctgcaaacgcgcagcttctcgccgcacctgccttcgcaatgatctccatcgccgcctctctttgccgttctgtctcatcgatttcatccattctgcccacctccgtgaccgcctctgtcttattcctgaatctgcatcaatatggaaatgatgttcgccatctcgtcgtcggaaaaaatcatgtggaatttccgctcgaccggcgccacatatttccgcagatcccggtataccccgtgatacttctgcacaatttcctcgcggtgcggattctctatggaaacgcctcttcccgcaatccggttgaccgcacaggcaatgtgcatcataagccctgtcttggtgtctaacgacatcgggtatttttcctcaatctgctccgccagttccatgagcgcctcctttaagcggccgatgtccacatattccagatgatcgcccagacagcggaacatttcatcaaaatcaacctccgccttttccatgcgctgtgtgcgcaaaagctccggcagacgctccaccggcaccgccagcacatccgccgctgacagaaacggaatcgccagaatgtccggatcatacgttccgataatacacaggatcactgctccctgcataagttccagcagtttttcccgcagcaggttccggtccgataaggataaggcaatcacctccgcgtccgtgcaggctttatgctggatgagatactgcttcatctgcagcgcaacaccctcacttgtggtgcagagcgtaacgattactttttttggggaatgccacagcgccccgagcgactctgccgccatccggtaaacccggtccaccccatcggcgattgccgcccccttcgaccactccattccgaatcttgtgaccggaagcgctaccgcgcggagctgtgttcctgtctcgcaggaaattgtatacaacatctgctgcaataccttctggtcatacacggcaaggactcccgcccctctatcgatcgcgagcagtttttgccgcagcagctcgtaggtctgttcatccttctgttcgtaaggaatgtcaacggcatacacgtttccgcggtgaagctgctcctcgatggtatctgagagtgcccgcgcgactccctgtccgtaaaagacaaataaaagtaccggcgacggttcgtccgtccggatctgtggctcgctgacctgcgtctcctcggcaggcggcatttccggtgcaagtaccgtcacgcccccttcctgataggaatagcgcatctgcggttttaccagcgcatccaccgcctccttgtccgcgcggtagtttaagaatcccttgcgcacagacggatcaaagtcgctgatgtagaggtgaagttctcccccgtgatccatgtagtcccgcagataagcattcatgcaggctttccggatctgtgtctttaaggtcagtatctccttttcacaagggaacagcatcaggcaggtgagcacctcggactccagcgtgatcgtgcgcttcgttctgcatgcctccgccaccagaaaatgttccagcagcttccgccgctctggaagcggacgctccgtaagggacgggagccttatctccgccagcacgtggtcttccagcagggaaatcatatccagcgccttgtcgtcgcaggagagaaaaatcatcggcagttcccgcgcatcctccgcctccacaaaacagcggagcagcttgcgtctgacgttcaccgacaggaactgtaccttatgtaaaaacaggattcccgtggctgcctccgcgagcattcctccctgcacgccgtctccgaacagttctgcgatcgttgccgcatcgtccgctccgaaatccatgcagtcacacattacaaacggcgcctgttccgcaaccagtccctgctgtacggcagctttgtgcatcacttccgccatgtattttctgccgcttccctctcttccgatcagaaggacattcagtccgcggtgcggatacaaaagtgccgccctggcaagctgaacggcgtattttaaactgccgtcatatcccaccagttcccggaacgctccctcctcatccgcaaacgcttccgtcagcgaatataagaccggccggctgctgctcttttttaccctgccttcccggaggagttcgcccagtgcagtgctgacgttggtgcgctgcattccgagtgcctctgcgatctcattagtagagatcccgtgattggcattcacggagctgtggagttttacaaattcgtatatctgctctctgtttcccttcatatggttcctcataagaaatcgctgatctcttcgatactcttactatatgttttttctttctgactgtcaatttcacatagtgtataaattttgtatccttcatctatactcattttcatacaaaatgctttctttttcaactctctttttgtctgttttttccaataatccgcttcttttcttcctgtcgcttctttctccgcttatttagtgtatatgtttctgctgatcatatacacttagtgtataagttttttctttttttacatttttaaagattttgaaaaaaagaacccgtgagaacatctccgcaattcagatatgttctcacgggttcttatgataatttcaaggttatattttgatgtttcttgaaggaaaaatggcaccgtttctagtacagattgcagcgcccgcgctcctcgcgctccatatcacgcacatactgcgcctgatattccatcgtgatctcacgaagttccttgattccctcaatataaggcagatacatatcatacccgtccatggcatcatcgcatcctaactcactgtatcccagggaatcttttacgatctgctcccgctgttctcttgttgtatttttgatcagatattcttccatgtttttctccttattctaaaaagtcagacgcatttcataccacacagcgcctccgtgttccgatccggacacgccctcattccggtagccgaactgcctgtaaaacgaaagcagtctctccttacaggtcagcaccagtccctttttcccctgtgactttgtatccgcaatgacccggcgcatcagcgctgccgcatatccctttccctgctctgcggggtccgtcgccacaccaaagatcatctgccacgcaccatccttgctgtgcatatcggcatgttcatacatcgcgtcggtcagatgctcctcgtcggttgccatgccattaatcatggataccagtttttcatcctcgtagagcagccagaaataatcgggaaagcttgccagccgatcgcaaaatgccgctctccccgccgcttccgccgcaggaaagcactttgcttccagctctgtaaccgcctttaggtcctccattgccgcatgtcttatgatcatcttctcttcctccctgcgccgttctcttatcagaacacattataagcgccttcttcgcccagtgcaagtaaagccttttcactttacgtgaaatatccgcaaaaataaggctgtcgcatgtagcagatgttatccctttcagcgataagtgatattacaggaagcacatgatacagatttcggctggaactgcagatggaacattcgttgaaaaaaatgggtgtatttcttccagccggatgactgcatctgattccgtgtttcttccacgtttggacaatccgacgggtgcatgtccgacacacccgagacaatgggcggactttctggcagcactaactgtgctccctcatagacattattaaaccgcgcgaacagaactcgctgctatcagctattgaaattagggcagatagcagctcaaacatctgcttcgcgcggttatgttatattacgggagcacaggtaagtgctgcacaaaagtcctacaaattgtctctggggtgcggacatgcaccctaggattgctccaaacttggaaagacacggatcatcgcagatgcagtcaccggctggttagaaataccgcattttttgaacagaatgttccgtaggtattccaaccgaaatcgtagtggcatacttctcataatatcacttatcgctgaaagccaacgattcctctaatgcgacagccgcatttttgcagaattctatttcacgtaaacgggaaaagtgctttcacagccggatacagcttccggaattcctgatagcgcgcctcatacttctccaccagcaccggatccggctcaacggtgtcaacaacatgcaccagcttctcacatgccgcctgtacactctcatattccccgcagcccactgccgcaaggatcgctccgccatatcccggtccctcctcgctctctatgagatcaagcttaaggtttaaaacagccgcaaggatcttcttccacagcgggctctttgcaccgccgccgcagatcttggagcgttcgatccggatgcccaggctgcgcgccacctcgagggaatccctgaggccgaacgctacgccttctaacaccgcctgcgtcatatcttcccgtgtggtgtccatcgacattccaagaaacatggctctcgcatccgggtcgttgtgcggagagcgctcccccatcagataaggcaggaaaaatacccggttttctcccagatttttaatcttttcctgctcccgcgcatactccgtcgtctttaaaatctcatccatccaccacttgttgcaggatgccgccgagagcatacaccccatcagatgataaccgccatccgcgtgatcaaaggaatgcagggcattgtgtgcgtccacaccaaacttttcactggagataaagagcgtgccgctcgttccaagcgacaggttgcatctcccctcaccgaccgtcccggtgccgacggctgccgccgcattatcgcccgctcccgcaatgatctttacttcaggagaaagtcccagttcttccgcgatctctggctttaaggttcccaccacctcatagctctcataaagcttcggaagctgctctctttccacatggcagatctcaagcatctgctccgaccatgcccggtgctccacatcaaggagcagcataccggaggcgtccgaataatcggtgcagaacgttcccgagaggcggtatgcgagataatctttcggtagcatgatctttttcacccgtttccacagatctggctcatgcttttgcatccagagaatctttggcgccgtaaatccggcgaaggcaatattcgcggtatatcccgacagtgtttcctttccgatcacctgatttaagtaatcggtctcttctgccgtgcgaccgtcgttccagaggatcgtcggacgaatcacttcatcccgctcctccaatgtcaccagaccatgcatctgccccccgaaactgatccccgccacccg

SEQ ID NO: 11581 - DNA, 4308 bp, Unknown
  gut microbiota DNA sequence
gtatttcctattacataaaaaaaagagagcagccgctaccgcggtgctcccttgcacatgtcatctgatatctgaatctagaagttattatagcatgacactttttgttcagcaatttccttttttaacaaatattttaccggctgctcatatatttttgtcttttttgtaccttttgtatgacttcttccagcctttttgtacggattcagccggcgctttttgcctgccttacattgtagaccgtcgccgaaccgaccaccagcagggcgccgatgacagcagttgcaccgattgtctccccataaaagacagccaccagaatcggatttaagatgggctcgatcgtcgaggtcagcgacgccgtgaccggagagaccgcatccagtccccgcgacaggaacacataggacagaccaaactgcaccacgccgagcagcagcacgaagaaccagatatgcagtgacatctcgttctcctgcccgtaaaacgggattccgatcgccgcgctcagcgcacaggataccagaagcgacgattcaaagtccgctccgcggaatttcttctgcatcatcacaagcgcataggcaagacctgagagaatcgcgagcagattccccgccatggctccggcatccagcgacgtataaaagaagcagagaatcccggcaaagactcccgcacaggcaaacaccgcatcccgccccggctttttgtgaaagatcagccacatcaggagaatgacaaacaccggctctgtgaactgcagcacgatcgcattggcagccgtcgtgagcttggtcgccgccacaaaggcaaacgccatcaccgtattgcacaccgcaccgaagagcaccgtcttattccacacaaacttctggcggcgcagaagcatgtaacatcccacaaccagcgccgagaagatactgcgcgctccctggatcgtcaccgacgaccacggaatcgacttgattaaaacgcctccggtgctgaaacagactgccgataacagtacgcggaccgttccccgcagactttccgcattcatttttttatcactcatatccattcctcccatccgggtttctgtcgtattctccatccgcgcttctgccgtattctcccatctgtgctactgccacttcctatgagataaaaacatagaccagcacaagtactgccagaaacagtacgtttgcgatcgtaaaccacaggagataccgccccttggtcttattataattgtgcgcgtagatcttataagagatcaggctcgccatcgaagcgatgagcgttcccagtccgcccagattcacgccgatcgtaagatttttcagattgtgcgtaaaatctgccagaagcagggtcgcgggaacattgctgatgatctggctcgcaccgatgccgaccgccagttccctgcccgccacaagactttgcaggacagaccgtaccgcctcgatattccccatattgccgatgaagatgaagaaactgataaacgtaaacagcagacagtaatccacctgcaaaaacaccgcgcgatccgtaaaaatgagtacaatgagcaccacggcgagcatcagctcccacggaagcacccgcgctaccgaaagcaggcttagcacaaagagcgccagataaatcccgtttttcttcctgccggctgctccggacgtctgcaaaagtgcccccgtctccagcgagatccggcgcttgcccgcactgagcacgaacacgacaagcagcagaagcacacctgacacgagcgtatacggcgccatccatccgataaattcacccagcccggcaccggagatgctgtaaagatacagattctgcggattcccgaccggcgtcagcatgctccccagattcgctgcaagcgtctgcagcacaaacgttgtcacaatcagccgctcctggtggcatttctgcaggatcgtgcacgcaaacggcacaaacgtcagaagtgcgacgtcgtttgtgataaacatactggaaaaaaagcacaaaaaaacaagcaccagcatcagctgcgcggtatttttggtctttgccagaagccggctgccgatcgcatcgaacagtccgttgctctgaaatcctgccacaatcagcatcagcgacagcaaaatgccgagcacgcgccagtcaatgtagcccacgtactgcggacccgggtgcacccagaatgccgatgccacagcgaaggctgtggcgatcgtgagtaccgtttctttttttataaaatctgtgatcttctgcaacatgttgtccatcatcttttctgtttcattgtaaaaattcctttcctattttacttctcttttttgcacttgcataggatttttttctgaaaatgcggcatactaccacaagatagcctgttatcgctgtatgcgcacagccggtgcctgtcattttcccatgcacagctgcccgcgcaggaatggagatttacgtgaaaaatacattatccttacctgtcacaaatgaaaacggctcctatgagatccgcctggagagcatcggcgggctgggcgccaatctctgcggaaaaatgctcggggagctcggcgcactgtcgctttcgctcaattccttaagcttttccagctacggctccgaaaagcgcggttcaccggtcaaggcgtatgtccgctggtgcgcagacgaccgcccgctgcgcgtcaacagccccgtgacccggccacatctgctcggcatctttcacgaaggactgatcggcacctacccggtcttggacggcgtcaccgtagacaccaaaatcgtattaaatacccccttgtccgctgacgaggcggcagataagtaccacatttccatcggagaactctattgtctggatgcgctcgcacttgcgatggaaagtcattcccgcatcaacatggtcatgctcggtgctctggtgcgcgccagcggatttatcccgccggaagctgccgaaacgctctgccacgatacgatcgggaaaaaatatcccgcactcatcgaagccaatctcgcgggtctgcgcctgggatatgaaaatgtcaaaatggctcagggcgaccgcaacctcgcccctctgccggacgccccggcggaccggtatgcttggggctatgccaacgctccgatcggcggcgtcaatccgcggatcggaagcaccgtctccaacgatctgaccgcctcgcgcgaagggtacattcccctttttattcaggaaaaatgtatcaactgcggactgtgtgacacggcatgcccggatatggtcttccagtttgctcccggcacctaccgcggaaaaaactgcatggtcaaccgggggcttgactactatcactgcaagggctgcctgcgctgtgtggaagtctgccccaccggcgcactcgtgccggcactcgaaaaagattacccggaaaaaccgcattttcttccgaatcagcatctgctgcccgacgccatccgctatcagaccgtcggtgcgaattcctggatcacaagcgattcttttaccgacgaaaagcgggtcgacggaggcgtcgtataaatgcaggcagcacccgtgaatcgtaccggcgcacagcgtctgcagaatggagaatgatatggaaaaacaaaaaattatgtatgacagcggcaatgagcttgctgcatttgccgcaaagcagatcaactatcacgtcatggggtattatccgatcacgccctctacacagattgcggaaaatctggatgtcatgggcgcggaggggcttcacgacattgccctgatcgccgccgagggagaacacagcgccgccggcatctgctacggcgcctcagccgctggaggccgtgtatttaatgccaccagcgccaacgggcttttgtacgccttagaacagtttccggtgcagtccggcacacgcatgccgatggtcatgaatgttgcatgccgcacggtttccggccctttgtgcatcaaaggcgatcacagcgacgtcatgtatctgctcaacacaggctggatcattctttttgccgatgaaccgcagaaagtctatgattttaacctgctcggtctaaagcttgccgaggctgtccgtctcccggtcgcagtcgcgttcgacggcttttttacgagccatcagaagcgcaagtgccttgtatttgagaatgatgacaccgtcacccgctatatcggggaaaagctttcctgtgacaacccgaaggtctccgcatttgccggcaccggcacctgcggcgccgccggggagcttccctacgccagcgtcttagatctcgcgcatccggtttcca

SEQ ID NO: 11582 - DNA, 1625 bp, Unknown
  gut microbiota DNA sequence
tcggttcctcctaccataccgccatggaagccgtcgaccggctgcggcaggacggcatagcggcaggcgtgatcaccctctacgttctgcgcccgttccccgctaaggaacttcgggtgctctgccacaatgcttccacgattctggcagcagaccggcaggacagctacggcgccgggggcggcaacatgtcgcttgaattaaaggccgctctctcttccctgccgcacccgccgcgcattttaagccggatctacggtctcggcggcaaggactttttcgtggaggacgccctcgccctctttaaagaggcactctcgccggacgccccgacgttcgattactacggcgtcactgcgggcacggatgcatcggatgcggcagattccgcagggacatctttctccgggacagacgcggtgacggcggtttcacacccggcagcctctatcaacgaagatatgatttcaagtgcctccggcagggctgaccgcacaatagcggaccaggcttcgggcacttccggcaaggctgaccagtcgatggcagctccggcgatgcagccgcagtactttaagcctgtcacaaaggaagaatcctcgccgggtctcaccacctgcacctttgatcccgcagccgggaaaatgaaagtctccggcggctccgtaaaagatacgaccgccatgccgatgcgcgtcgcaccgggacacggtgcctgcccgggctgcggcattccgatcaatgtgaacctcctgttaaagggcatcgagggaaatgtcgtcatgctgtttcagaccggctgcggcatggtagtcacaaccggctaccccaaaaccgcgttccgcgttccatttctgcacaatctgtttcagaacggcgcggcgactctaagcggcgttgtggaggcgtttcaccagcgccagaaacgcggggaatacccggacggcgagattacctttgtgatggtgagcggtgacggcggcatggatatcggtatgggttcggcactcggcacagccctgcgcggtcataagctgatcattttcgagtacgataacggcggctacatgaacaccggctaccagctctcctactccacgccgctcggcgcaaagagttctacttcccatgtcggaaagacacaatacggcaagaacttcttccacaaggacacaccggagctgatggccgcaacccacattccctatgtcgccacggtcgcagaatcaaatccggccgattttatccggaaagctgcaaaagccgccgcctattccagagagtttggcactgcctatatcaaagcgctgtctgcctgtccgttaaactggaacgacaagccgaatctggagcggagcgtcattgccgccgccgtggactgctgctattttccgctctacgaaatcgaacgtggcatcacagcgctgaattatgatcctgcttcgagcaataagaaaatccctgtcgcggaatggctgggcatgatgggacgcaccaggcatctgctgaaggaggagtaccgctccgtgaccgaggagatccaaaaggagatcgaccggcgctacgaccggcttaaagcgcgcgccgagcatccgcttctgtagacgcgcagagagaatgaaccg

SEQ ID NO: 11583 - DNA, 1883 bp, Unknown
  gut microbiota DNA sequence
atccagacaatgcctgcaatcaactctgccttatctaataaaacaatttcaatatgctttttattatcttcgctttgtattctttcaatcagaccttcattttccaaatttttcagtgaagttgatacatgggattttgttgatttcctcacctttacaatctctgctgcggtattatgctgtggattgttatgtaagaacatccgtatatcatattccatctgtgttaacccgtaccggtcgcatacctcggcggataacagttcataatatcctgtaattgttttatgtttatcccagaaatacatctcaacccaccctgtaatcgttctatttagaacgattacagggtgggttttctgtcatgtcaatatttttctttaacgttccaatatattctccattattatatacaaatggtccggcttccccctcttctccgaagtattccgctcttaatgacatgatattgagcaattcatctacagtatgcacttttgtcgcctgatagggctgttcaaaggcgagcttttctacaaataaataatagtcactgtactttatcagtatgccggtatgacctacgaaaacaacctcagaatacgggtcatatatcacgatactaagaagagatatcctgtcactatttatttgaaatccatgatatttccagctgtcggaaaacacagtttccggagggctgccatctgttacacgcttttcgccatagagtgtagtgaacatgtccctattcttttttatgatttcatatctgtccacgttatctatcgcttccgtgtcaaacattaaatatgtgcctgcataattgccttctgttgactccgagcaaagcatcccatccagcaaaaggaacgctgtcatcctgcagtcagcgtctgaatcatcatgattctgttcccagccatccatacattttacgatatctgctttcatcttctcaggatctgaccaggcatcctccagccttgcattcttccccgcagaatccgcaaaatcggtcacccactcctgaaataaatctacatgggaagctcctgcagcgtccagttccttgcagatcccggtaatggaagccttcccgcccatataagttgcggcaggtatcttctgtttctgtacgtcttctgcacaggctcccaatatcgcagatgcgagtataataaccgctgataattcaagcgctgttctcgccttattgtgtcttttcaacagatattacctctccctcaaacggatctacctctgaaattgttccggtatatcttacagtcacagtatctccgttgctgacattctccagtccttccggcttttcctcaaaagtaaaactatatggtgtatcattctcatccgtaacgacaaacatgaaatcttttatctcatcaatcgttccggtcacttctttttcttctgttgttccatcctgtttcccctcgtcgctattgcttattgcagtattatcctgcttcatcccggactgtccacagccgccaaataatccagcacaacacatcacacaagccacaatcataattatttttttcttcatcttcaatctacctctttcttattattcgtactctgtgaatacttttcaaaagattaccttagtctttcattaatgtaaatagtataattccaaaattaaagaaatattcattttttgccgcctgtagccgagttttcaatatcacggaaagtgcattcataaataccgttttccccataagcctgccacccgcttaccactatccgggcgcgttcgggacttgcacccgttagagcgcgcccatggcgcgcaaacaaaaaaagaaccgatttctcgattccttttttcagcccctgctgatttctttacaaat

SEQ ID NO: 11584 - DNA, 59579 bp, Unknown
  gut microbiota DNA sequence
ttatcagagtaaagagcgatatgcttattgcggcagccccataaaatgctccgctgtacatgtgaagtgggatttggtagaataaaagatatgaaaatgatgcttgacaagaagaaaatagttaggataaactaattcggcggataaaaggagcggggagacaaatgaagctgtttcggggagcggtagatacgataaaaagagtgtaccggtatgagaagacaaccggcatggatgttggggcactgcagggggtcatgctgatctttgcggtggtgttgtttctgattgacattgagaatttccgtctgggaaaatatgtcatcggaattgtgacactggtcgtgggaattgtgagcgtgacggcggtgtttgtaatccggcggttccagaaggtggttctcgtgtgtcggattgcggtctttttgttcctgctgctggcggctgccattctgtacgcgggtgcaaatgacggtttttccctgctgtggtatctgctgctgcctgttatcactttggttccgcttggaatgccgtttggggcaccggtttgtatcggattcggcctgtggatcatggcgtttttctggacgccgcttacggatatattaaggtacgattatccgagggattatagggtgttctacccgattttttactggggattctgcctaatggttgtaacgatggatattttttacaagaattatcagatccggcagcaccagaatgaggaaaatctggagaacgaggtgcaggaagcagtcgccgggacgaagaatctgatgctgcactcggtgacggcgatcagccagttgattgatgccaaggatcgttatacgagagaacattctcagcgtgtggcggagtattccagactgatcgcggattatatgcggggaggctgcgcatcaggggaggaactggaactgatctaccgcagcggtctgcttcatgacatcggcaagatcgctgtgccggacgccgttttaaataagccggaacggctgacggatgaagagtacgaggtgatgaaaaaacatacggtctggggcagagagatcttatccggtctggagtttttgccgcaggcggatctgggagcaacctaccatcacgagcggtacgacggcagtggctatccttatggcatgcacggggaggaacttccggagatggtgcgcattatcagtgctgcggatgcgttggatgcgatgaactccaaccgctgctaccgaaagcactgtgacagggattacattatcggggaattccgcaagggagccgggaaacagtttgacgccggagtggcgcatgcggttgttgcactgatcgaggaaggcaggattacggtataagagatgaagaacgcagagacaaaagtaaagagaaatagagacaatttctggaatacggtcagtattccctatgaggatcgggaactggctctctggatgaaaattatattcggattcatctgggcaatcagtattttaaacggcattctttacggtgcgccggtgtcctatctgcttgcaatggggatgatggtggcattgcttgccggcaatattgcggtctgtcggaggcattaccgcagatggatcgatgtggtgacattcacgttgctcagcattccgattttttatgtgtattaccacgcgagcatcgggtacttcagtgtattgttcccgatgctgttttcctgcggaattgtatttatcctgggcatccgcaacagttttgccatcaatctgttctatcttgctgcggtgattttatgcttccggttcgacctgagtgcgtcagcggagagcatttacggggaaaatgtggctttgcgcttcccctacctgtatatctgttttgtgcttatagcatatatgctgatgtattcgatccagcgctactgggtggagaagcagagacggcaggaacggctggagcggcgcgtgcgcgaggaaaaggaaaagctgcggggaatgtccatgcgtgtgatgaatgcgatgtgccgcgcgctgggcgcgaagattcccggtgaggaggaacactgcaggcaggtggcggaatacgcaaaagagattgcagagcggctggatcttccggaggatatggtgtccggggcttatcaggcaggtcttctgcacgagattggaatgatcggcattccagacgaactgatccagagacggaacctgacggatgaggagtatggtgtgttccagacttatgtgaagatgggctatgatatgatcagcgaactgcaggtggcggatacgatcgcggagaccgtgtattatcatcgggagaactacgatggcagcggttatctggcgggaaagcgcggcagtgagataccggtgctcgcgcagatcctcgcggtggcggactatgcggaccgccatctgcgctggggcgagagtacggaaatggtgagaggcaagataaaggagcgggaaaatacaaggtttgaaccaaagtgcgccgggataatggaacagattttaaaggagagaagtgaggactagagaatggagaaaatgacggcgcaggagatagaacagaagcgtgcgggggagaaggagaccgtggactgcatgatcggcatctactgccgcggagtgcacgggacgaagcggggagaactctgcgaggcgtgccgccagctgcaggcgtacgccgatcttcgcacggaaaaatgcccgtttatggagacgaagacgttctgcagtgcctgtaaggtgcactgttattcgaaggagatgcaggagaaaatccgtgaagtgatgaagtatgcgggaccaaggatgttgtttgtgcatccgctgcttgccatccggcatgtgcatatcacacttcggaataagaaaaagcagaaagagatcagtacaagggaaaagggagagaaacatgtttcataaaagactgttaaaggaattttccgataaccggaaatacgtggcgggaatggttatcatgcagtgggcggcgcttcttgccaatgtggcgcttatgtatgtgctggcagcgtatgtcgggagaatatccggaattgtaaaagaggagagcctcacggcctccccgtccgacggagtgctgcttatcgtatttgcggcggcgctttttgtgcggatcgcggcgacgagtgcggcaaaccggatgtcctatcttgcgtccacgcaggtgaaacgcagactgcgcgaccggatctatgagaagatgatggagttcggggcggcttaccgggaggcggtggcgacctcggaggcggtgcagatcgcgacggagggagtggatcagcttgagatctacttcggaaaatatgtgccgcagtttttttacagcatgctggcgccgctgaccttgtttgtgattgttggcaccatgagtatcaaggtggcggcagtgctgctgctctgcgtaccgctcattccggtgtcgattgtggcggtacagaagtttgccaagaagctgctggcaaaatactggggaacctacacggaactcggcgattcctttctggaaaatctgcagggacttgtcacgttaaagatttatcaggcggacgggcgctatgcggagaagatggatgaggaggcggaaaagttccgcaaagtgaccatgcgtgtactcatcatgcagttgaattcgatcagcgtgatggatctggttgcctacggcggagcggcgctcggcatcatcttaagcgtgcttgaataccgggcgggagcggtcacatttgcagagtgcttttttatcattatgatctcggcggagtttttccttccgctgcgtctgctcggttccttcttccatattgcgatgaatggaaatgccgctgcggacaagattttccggtttttggacacgccggtaccagagcatggaactgtacagaaaacgcagggcaatgagatctgcttttcccatgtgaattttgcgtacacaccggatgccccggtgctgcgcgatgtggctttctccgtgccggagggacgttttgtcgcgctggtcggtgaatcgggttgtggaaaaagtacgatcgcgtcgcttgtgatgggggaaaaccgtccgaaggagggcggcagtgttacgatcggtggagtgccggtcacagagcttacggcggaggcactttatcggaaggtgacaagagtgcgccatgacagctatctctttgcgggaaccgtggaggacaaccttcggatgggaaaggcagatgccacgcaaaaagagatggaggatgcgcttttaagagtggacctgctaaagacgatccgggagaagggcggacttgccatgcagcttgaggagcgtgcggcaaacctttccggcgggcagaagcagcgtctggtgctggcgcgggcgctgctgcatgacagcgatatctatatttttgacgaggcgacatccaacattgacgtggagagtgagaaccggattatggaagtcgtccgcgggcttgcccgtgaaaagacggtgcttctgatctcacaccgccttgccaatgtcacagcggcggatgagatcttcgtgctgcaggcggggacggaaggaatcgcagagcgcggcacgcatcaggagctgatgcagcggcagggatattactgcaggctgtatgaggcgcagcaggaactggaatcctatgcgggcacacagcagaaggaggtgacggtgtaatgaagcagaacaaagacaatcaaaataaaaagcagagaagcggatttgccgtcatgtgcgggctgatcgggatgataaagccgctgcttggcatcatgtgtctggcgattctgatgggctgtgcgggcaatctgatggcgacgtttttaacaatcctcggaggctatgcactgcttaccgtgaccggtgtatacagtggaatgaagttttccgtgatctttacgctgctggtctgcttcgcggtggcgcgcggaatcctgcgttacgcagagcaggcgagcaatcattatatcgcgtttaagcttttagcgcgcatccggcatcaggtgtttgattctctgcgcagactggcaccggccaagctggacggcgcgaaaaagggcaacctgatctcgattatcaccagcgatatcgaacttctcgaggtgttttatgcacacacgatctcgccgatcgcaatcgcggtcatcacatcggtggttatgacgatcttcttaggaaggatacatcccgttttcggagtgctggcacttttcttctatgtgcttgtcggagccgtgattccggttgtcaacggacggatcggagctgccggcggcaaggaataccgggaggcattcggcgctttgaatacctgtgtgctggacaacctttacggccttgaggagacgctgcagtacggacagcaggaggcacgcatcgctaagatggcggagcagaccggacatctggagacggtcaacggcgcattaaagcggggggagaacttacagcgcgtgatcaccgacggtgtgattctctttgcgggtgtgcttgcggcgctcgtgggtggaacgcttgcagaaaacggcagcatcccgggaagcggggcggtgattgcggtgatcgcgctcgcaagctccttcggaccgacggcagcactctcggcgctgtcaaataatttaaaccacaccttggcgagcggaaaccgtgtgctggatatcctggaggaaaaaccgctcgtggaggaagtgaccggaaaagaggagacgtgcggtcagaatatacactgcgaccatgtgtcctttgcctacgcgaacacgcaggagagcggggaagaagacggacgcggcgtgctgcgggattttacggcggattttacggaaaagcggattcacggcattctcggaaagagcggctgcggaaaatcgaccctgttgaagcttctgatgcggttctacgagccggatgagggagtgattgcctacgacggaacaaagatcggagagatcaatacagcggtgctgcgcggcggtatctcctatgtgacgcaggagacgtttttgttccatgacacggtggcggagaaccttaaggtggcaaaagaggatgccacagaggaggagctggagcgggcggcgcgggcggcgtccatccatgatcttatcatgagtctgccggacggttatgagacgaagatcgcggagctggggagctccctgtcgggaggagagaggcagcgtctcggaattgcgcgcgcctttctgcacgatgcagacatcctgttcctcgatgaaccgactagcaacattgacagcttaaacgagggtatgattctgcgcagcctgaaagaggaatgtgcggacaaaacgattctgatggtgtcacaccggaagtccacgatgggcattgcggacgacgtgctggaaatgtaggcggatcaaagccgtacaagagacccgtttgaagataagagagacagaaatgtccggcagcgtctgctgccggacatttctttaaaaacataaaaaaagatggagatagggggactcgaacccctgacctacgcgttgcgaacgcgtcgctctcccagctgagctatatccccggattctgattcagacgatatcaaaaatctttcgcccgaacaatatgtattatgccacatttgtttttgaaatgcaacaggtaacgaaaccttttgcgggtaaagttattgacttttcctgtagcggaacatagaatatttataattgcagggaaccggcaaaagacagtgcatgtgaagtggctgcagggagtattcctgcggtcatttttgaattttaagagataaaaagggacacagatatgaatatcaggcaggcaaaaaatgagatcaaacataccgtggaggcatacttaaagaaggatgaggcgggggattatgagattccggagatccggcagagaccggtgcttctgatgggacctccgggcatcggcaagacacagatcatggagcagatcgccagagaactcggggtcgggctggtggcatacacgatcacgcaccacacaagacagagcgccgtcggactgccgttcatccgggaggaggaattcgcggggaagacctactctgtgacggagtacacgatgagtgagatcatcgccagtgtataccgcaggattcgtgacagcgggcagcaggagggaatcctgtttatcgatgagatcaactgtgtgtctgagacgcttgcgccgacgatgctgcagtttttacagtgcaagaccttcggcaaccagaagataccagagggatgggtgattgtggcggcgggcaatccgccggagtacaacaaatccgtgcgcgattttgatatggtaaccctcgaccgtgtgcgctatatgaccgtggaggcggattacagggtctggaaggagtatgcgagggcacagcacatcagcggagcgatcttaagctacctggaacttcgccccggcaacttttaccgtgtggaggcggatgtggacggcatgcagtttgtaacggcgcgaggatgggaggatctctccaatctgatggcggtctatgagaagctcggttttctggtggacgagcaggtgatccgggaatatatccatcacgccgatgtggcggaggatgtggcggcgtatctggatctctaccgcaaatatcaggatgactacggcattccgcagattctggacggctgcgtcagaccggagatctacgcgcgcatctatgcggcggcgtttgatgagcggctctcggtggtacacctgctgctggacggtctggcggcgtttttcggcagggcagcgtctgagcaggcattgacggatgcgtggtatgcctttttaaaagagtaccgcagccaggtggagacagccgcagatccggcggaatgttaccggatgcttgtcgcagagcgggagcaggagatgctgcggcagattgcaaatgacgcttacacccgcgaggaggcaaagcgggagaagcttttgatggaaaaattaaaagcagcgcagcaggaagtgacaaaagattcggcacagcgctgttttgaagcagcaaaagtgggatttgaccggcagcgggaggtactggtgcagaccgaggaagcggcgggcgcggcgttggagcacgcgtttgactttatggagcaggcgttcgagaacggtgaggagatggtggtgtttgtcacggagctcacgattacgtcggagtccgcaaggtttctctccgagcatacctgcgagcgctatctgacatacaacaaacagcttttaattggaacgagacgagcggagctgttgtcggagctgcgtcgggacaactgacgatttcgcaggaaagaatataaaaggaatataagaaggaataaaaagatgcagtcacagaatgaacttagaaatctgttacagagaattgatcataagagttatccggcttacaaggatacgagaggaagctacgatttcggcaattatgtgttgtcgatcgaccatgtgcagggagatccgtttgccgcaccgtcgaaggtgagcgtccatgtcaggggaggagcagcgaagttcccggcggatctctaccggatgaaatgccgcaggctggcagtgtgcgactatctgctgcgccagttcggacgggaacttgagcgcgtgtctttcaaggcaaaaggctccggaaagagcggacttctggcggtgagccgcccgggacaggaagtgttggagcgcaccgcatgccagatggatgaggcaaagggcgatctggtgcttcactttgaggtgggattccctgccaacgggagaaccgtcaatgcaagagaactggagaaaatcttttttacgtttcttccggaatgtgtatcacacagcctgttttataaggcgctggatgaaaaggcggtgtaccgtgcggcggatctcgcggaggatcagcagtatatcagggatcatttaaaggagcaggggctggtggcattcgtggcggatgcatccatcctgccgcgtgaatccggcgtgtccggcagaccgatgaaggacgccgtgaagtttacggcgccggaatccatgaaggtaagctttgtgctgccgcatgcgggaaagatacagggcatgggaataaagaaaggaatcacactcatcgtcggcggcggataccacggcaaatccacactgcttaaggcgctggaacttggcgtgtacaaccatatcgccggggacggcagggagtatgtcattaccgatgatacggcgatgaagatccgcgcggaggacggaagaagcatcaaaaaggtggatatttccatgttcatcaacgatcttccgaacggaaaggatacgagtgcctttcgcacggaggatgcgagtggaagcacctcccaggctgccaatgtggtggaggccatggaggcgggagcagagacgttcctcatcgatgaggatacgagtgcaaccaattttatgatccgcgacgagctgatgcagagggtggtaaaccgcgaggatgagccgatcacgccgtttatcgaccgtatcagggagctgtatgagcagtacggtatctccacgattctggtggcgggaagttccggctcctattttcatgtggcagactgcattgtccagatgaaccgttacaaaccgcaggagatcacctcatttgcgaaggaggaagcgggcagatttccgctgccggaggtgaaaccgccgaagcaggcggctccggggtttgagcgtgcggtgcggccggaccgtgcatttaaggaagatgcccgcatgaagctaaagacgatgggacgcgacggcatctccatcaaccgcgatacgatcgatgtgcgctatgttgagcagctggtggatacggaacaactcgcggcgctcgcctactttttaaagtatgccgagatccatgtattcaacggaaagcgcaccctaagagagagcgtttccctattgatgcagtatgtggaggagcacggacttgccgcggtgacggagagcagctatgtgccgtgcgggctggcaatgccgagggcacaggagatttttgcatgcatcaaccgttacagaagaatcagtttgtaggaaaaggaaccggagaacgtgagtgacaaagcgaatattgcagcagcagttctggcacatgtagatgccgggaagacaactttatcggaggcactgctctatgagagcgggatgatccgcagggcgggccgcgtggacaacaaggatgcgtttctggatacctttgcgcttgagaaggagagaggaatcaccattttttccaagcaggcggtattaaagctgccggaggagacggtcacgcttttagatacgccggggcatgtggatttttcggcggagatggagcggacgcttcaggtgttggattacgcgattcttgtcatcagcggggcggacggtgtgcaggcgcatacgaggacgctgtttgggcttctggcgaagtatgaggtgccggtgtttttgttcgtgaacaagatggaccagccgggaacggatcaggaggtgctgctcctggaattgaaaaaggaactgcatgagaactgcgtggatttttcggatcaggagagcgcggcttttgcggaaaatgtggcggtgtgcgatgagcaggtcttagagcagtatctggcaggggaagcggtcggaacggagcagatcagaaagctgatccgggaacgtaagctgtttccgtgctatttcggatctgcgctcaagatgcaggggatgaaggagtttctggcggactttatccggtatgccagtatcccggcctacggggagacattcggcgcgcgggtatttaagattgcacgggatgcgcagggaaaccgcctgacctacttaaaagtgaccggcggcagcttaaaagtcagacaggtcatcggggaggagaagatcaaccagatccgcatttattccggcgaaaaatatgagacggcagaggaagttggcgccggaggcgtctgtgcggtcacgggtctgcttcgcacatttccgggggagggacttggcgcagagaaagcgtccaggctgccggtgttagagccggtactgacttatcagatcatactgccggaagaggtaagcccggcagtcatgcttcccagactgcgggaacttcaggaggaggaaccgcagcttcacattgtgtgggatgagaccttaagagagatccaggtgcaggtgatgggggaagttcagatcgaggttttgagcgaactgatccgtcagcgctacggtgtgcaggtcgcatttggcgccggaaggattgtatacaaggagaccattgcaggtacggtggagggcgtgggacattttgaaccgctccgccattacgccgaggtgcatcttttgcttgaaccgggagagccgggaagcgggctcgtatttgagacggactgcagcgaagatgtgctcgaccgcaactggcagcggctggtgctcacccatctaagagagaaggaacacgtcggtgtgctgacaggatcggcgcttgcggatatgaagatcacactcgttgccggacgcgcgcacacaaagcacacggagggcggtgatttcaggcaggcaacctatcgtgcgctgcgtcagggactgatgcaggcagaaacggtgctgctggagccgtggtatgatttcagactctcgcttccggcaggagcggtcggacgcgccatgaatgatatcgaccgcatgaagggaacgattgcctacagtgcagacggctgcattgtgggaagtgcgcccgtgtccgccatgcagaattaccagcgtgaggtgacggcctacaccgcgggagaggggaagctttcggttgccttaaagggatatttcccctgtcacaacacggaggaagtggtggcacagatcgggtatgatgcccagagtgatctggagaatacggcggattccgtattctgtgcgcacggagcaggattcattgtgccgtgggatcaggtgttttcctatatgcacctgccgccggtgctcgggcaggataagagcggggaggaatggtatcccggacagtggctgccggatgcggcgaatttccacgcaaagacgggggaggaagaagcctggatcggcacggaagagattgacagaatccttgaccggacatacaatgctaataagaaagacaaagatgccggcgcaacgaacggctataaaaagaagcgcatcatagaaagcagtcccgcttctgcttccggaggcgggaagcagaaggatgccggcgtggaatatctgctggtggacggctataatgtgatttttgcgtggcaggaacttgcggaacttgccagagtgaatatggatagcgcgcgcgggcggcttttggatattctctgcaactatcagggaatccgcagatgtgagctgattgtggtcttcgatgcgtaccgcgtcgagggacatcagacggaagcgtgtgattatcacaatattcatgtggtgtacacgaaggaggcggagacggcggacgcgtatattgagcgtttcgcccatgaacacgcgtcgagataccgcgtgacggttgccacttccgacgggctggagcagattattatccgcggagccggatgcatcctgctctcggcgagagagtttgagcaggaagtaaaggagaagaaccggcagctgcaggcagagtacgacagcagaaaagaccatggaaaggtctatctgcgggatcagatgccaagccaggtgcttgacggatctttggaggaacagcagtaattttgttccggaatggagattggaatgagaagggaagaagaagtcagactgacacattcgggtatctttgcaaaagacggcagacgctgtgtgtctgtgcgttttgagcggggaagggatgtcgcggaagccatattgccggcatgccgcgtaacgaagaatgagggctttacggacgaagaagtccgcggactggagcagtatctggagagtaaaaatgatgagatttttgcaaaggcaaaggaaatcaatccgatcaggggaattctttaaatgccatctctgccttttgctcatagccgcgatgcttgtggcggcggcactgccaaacggagtgcgggagtccggacctttggacagtgtgaagcggatggggcagaccggtggacaggaattttgtccggaccgtaagcagaccggcaccatggtcgcggcaccgaacgaggagcgcccggaagtggaagccgcaggcagggaactgagtgaggcgcatgtcatagagacgctgaggcagaagagtgcctaccgctaccggaatgtccagcagcttcggctcctggtgtggcttctggaatgtggtctggcgggacttttgggcgcgctgtttcttttggcggggagagagcgcgggcagcagtgggaactgattccctcgggaagaaggattgtagcatacataaggagggccgacggaaaaaagaacggccttgtatcctccataaaatagcaattattattttatgagaggataaaaactatgaatattttaatatggattctgatgatcgttggtggagcagccggaatgttatcgactgcatatctggtgctggctatgccggtaatctttggatggaaagtataccgcaagcttaagtatcacatcggtctgtatgattagaaaaaatgggagttttggctcccggggcaaaagaggaagtcatccggcaggaacggatggctttttcttttgtgcatcaaactacaacggaaaaagtgtgcgaagaataaaaaggaggatgtatgggcatccttgaaagaaaaggcaggtgtgaaagatggagagcatacgcagattgcatgaggaaatattaaaaagagagtacaaagcggagaaacagaggaaagaagaaatgcgatatgatcagatggactgtctgcttttggcgggagaagaaaagacggagcgcacaattccggtctgtgagacggtctttccggaaaagttcgcggatttaaatgcggtgcgtgaagtgctgcttacaccggaaaaacaggtatatgcgctgattgcgccggcatttatgggacagtttggagagggggtctccccgggagcaatccgtgcggcattgaaacgcgcgggattttccgggatggtggaggtggcggtatttgccgacattttaaccttgaaggaagcgcttgaatttgaccgccatgtgaaccgggatacggattttttgcttacgagctgctgctgtccggtctgggtgtccatgatccgcaatatttacggggaactggtaccgtatatgccgggggcggtgtctccgatgatcgctgcgggcagggcggtgaaaaagatgcatccggatgccgtcaccgtgtttatcggtccgtgccttgccaagaaaaaggaggcgaaggagccggatatctgcgatgcgattgatgtggtgctgacctttcaggagacggcgatgctgtttgaggcaatggggattgcgccgcagcagatggaggaggatgcaagcgaacattcttcgggagcaggcagaatctatgcgcggaccggaggcgtcagcgaggcggtcgtgcggacggtagaacaacttcacccgggacggaaaattgcggtccgccccatgcaggcggatggcggaaaggcgtgtaagcagatgattgaggcaatccaggaggggaagacggaggctaatttttttgagggaatgggatgcgtcggaggctgtgtcggaggaccgcgggcgctgctgccgcgcgaagagggcagtgcctacgtggatcattacggaaaagaggcattgtatcagacacctctggagaacccttatgtaatcgaattgcttgaaaagctgggattttccaccgtggaggattttctggaaaaaagtgatcttctcacgcgccatttttaaatgcagtaagtattgttcaggggcatgcatttaaaatgcgttgccgggggggacggttcgtgctacaataggcggcagagaatcatgcagagacaaaggagagaaagatgctgccacaggaatttttggaacggatggagaacatgctgggggaggagtatcctgcatttttaaaaagctatgatatagcgcgctaccaggcgctgcgcttgaatccgcagaagggggacgacgcgtcatttttaaaccgcatggtattctcgctggagcgtgtaccgtgggcagagcatggctactattacacggcgcaggatacgccgggaaaacatccgtatcacgaagccggcgtatattatatccaggagccgagcgccatggctccggcagcgtatctgacgcggcagatggcagacggtgcgggcgagcggattcttgatttgtgcgcggcaccgggaggaaaaagcacgcagattgcggcggcgatggcaggcaggggaatcctcatcagcaatgagatccatccggcgagggcaaagattctctcggagaatatcgagcgcatgggaattgccaatgcggtggtgacgaatgagacgccgcagcgcctcgcagaacatttcagtgagtattttaccagaatcatggtggacgcaccgtgttccggcgaggggatgttccggaagaacgaggaggcgtgtgagcagtggagcacacagaatgtagaactgtgtgccgacagacaggatgagatcttagactgcgcggcatccatgcttgcgggcggcgggagactggtctattcgacctgcacatttgcaccggcggaagacgagggaagtatcgggcgattcctggagagacatccggaattctacgtggaggaggtgccgcttgcggagggaatgtcgcacggactgggagaactttccgcgacgatccgtctgtggccgcataagcttcgcggggaaggacattatgtggcggtgctgcgcaaggagggaacgcttgcggacggcggatcgggtctgttaaagaatgggtatgagaacggaattacggcaggagattctaagagcgctgcggcgggcatcccggaatatctggcatttgccggggagactttcgccggggacgcattggagaagtatgcaggacgggagtgccgctatctgaaattcggcgagcagctctaccggatcccggagggcatgccgtcggtaaaaggtcttaaggtgctgcgcccgggactgcatctgggaacggcgaagaaaggcagatttgagccttcacacgcacttgcgctcacacttcatgcggcggatgttttacatacgatggatcttccttcggacgggcgggagatccgtggatacctaaacggggagacgttcccggcgcagggagaaaagggctggtatttaatcacggtggacggatacagtaccggctggggaaagctcgcgggcggaatcatgaagaatcattacccgaagggactgcgaaaacggcttccctgatagaattgtctttgtggagaaaaagagaggacttgacaagagagaaaacgctttctataattgaaaaaggatttgcaagggtgctgtcataggacggtaccttttttgcgtcataggatgaaaatccgttgaaaggacaggtgaatgtatgaaaataacaacaagaaaagtagcaattgtcggctgtggactggtgggcagcactacggcattttccctggtaacccagggagtatgtgacgaggtgatgctgatagatatcaacgaggaacgcgcgtatggagagatgctggacatgcgggacagcattgaatatctgaaccgcaatgtgaaagtgaaaacgggaacctatgcagagtgcggagatatggatatcattgtgatcactgccggagcgccgccaaagcagggacagacgagactggatacgctggagatgtcggcaaaaatcgcaaaatccattgttgaaccgattatgaaaagtggatttgacggaatttttattgcgatctccaatccggtggacattattgcacattatatctataagctgtccggtttgccgaaaaatcaggtgatcggtaccggaaccgcaatagactcggcccgtttgcagaatatgattgcacagacagtcaatgtggatccgcgaagtgttcacgcgtattccatgggggaacatggagattcccagatggtgccgtggtctacggttacgatcgcaggaaaaccgttttatgacgtgattgcggacaataaagagctggtgggggatgtggatctggatgaactggtctaccgcaccacacaggaagggtgggagatttttaaccgcaagggaacgacttattatggaatcgcaacggcatgcgtgggagtgatcaaggcgattttaaatgatgagaacaggatcattccggtatcaacattgctggaaggagagtacggggagcggaatgtctatgcgggggtgccaaccgtgttaaaccgcagcggggcatatgacgtgcttgaaattcatatgacaccgggtgaactcgcgcgctttaaagaatccaccagagtgatccgcgaatatacggatcgcattatgaaattgaatttgtaaaggaaagaagaaaggaattgcaatctccctgtaatgcagtacaataagagcaggaaagggagcgcagtgtggaacgaagatacatagagagccggctctggacctgtctgacaagtgcgtttttagaacaggtcaggagccggtatcattttgaggaaaaagataaggcgcttttgaagggtgtggcatccgatctggcgggctgcctgaaatggaaggaagcggcgtatctgatgtttgaggatgggacggatacggtacgccgggcgactgcggttgtgacgcttggaagcgatgtggacctgctgcaggaacgctaccagaacaccgggcgcatgctggaaagctatatgcttgagagtatcggcggagaacttctgatgttaggctatggcatgctggagacatggatacgggagaataccgggtatcaggtggcggcgtatcattttttcggtgatgacgaagcacatccgctgtctgcgatgccggagatcttagcgcgggcaaaacagcacaaggtcgtctgtacggcagggtattgcctgaaaccgaagaaaagcgtggtgtttgagatggagcttgcgccggcggaggcgtgcggggagacggcacatggcggcagaatctgcgcacattgcagcaggagggacacatgcccgaaccgtaggtagaactgcactttcagggggaaaaatgaaaaattgcagtggaaagtttttcaaatcctgttataataaagcatagtttgtttttttgaaataaaggagtatgcagaatgggagacgcgaaatccatcaaagagcgcggaatactggagcaggtcatcaagtcggaactcgattttattacctatgtggatgtacataccggaacatttcatgtgatcgtgaccaatgacgatacggatgtgactccgccgccggagggagattatacacaggtaaatgcgcagatgataccgctgtatgttcatcccaaggaccgggaggcatgcgcggctgcgttagaactgccgcatattctctcggaactggaacagagggatgatctggttgtttcgtaccgcctgctgtgcggggaggtataccgcagaaaagaactgcatatttcttatcagcaggatgaccgtgacacggtggttttggtgcgccgggacgtgacggagagctatgaggaagaacagcggcagcaggagagactgatgtcggcgctgtttgacgcaagacatgccaatcaggagaagaatgagtttttggagcgcatgagtcacgagatccggacgccgatgaattccatcataggtcttacgtatctgaccagggaatatgtgaacaatgagaagcaggtgctcgagaatctggacaagatcagccagtcagcccgttttatgctgtcttttgtggatgatattttaaatctttcccagatcgagagcggcaacgtcgcattgaacagccagaaggtggtcttagatgcctttttggaggagacggtggaagaggcgatgcggcaggcggcggagcgtcgcgttcactttgcggtggacagacgcggaagctttgatgctacctattgctttgacgcggagaagctggagcgggcgctttccaatattctggagaatgccgtaaaatacacgatgccggacggaagggttgactttattgtggagcataccggcgatgacggggaggatgccggcttccggtttgagatccgggatacgggagtcggaatggacgaagcgtttattccgcatatgtttgagccgtttgagcaggaggatgagggaatcacgacgctaaacggcggtaccggtcttggccttcccattgcgcgcaacattattgaatttatgggcgggcacattgacgcatacagcgaaaagggcaagggctcgacgttcattgtgaatgtgaacttaaagcgtgtcagaaattccggagaaaagctgcggggacagggcgatatacaggcgcccgactacgattttaccggcaaaagagcgctgctggtcgaggacaatgaggtcaacattgagatcacgcgcaatatcctgctgcacaagaatctgcaggtggatgtggcggtcaacggagaggagggcgtgacgcatttcctttcccatgagcccggatattacgacgtcatcctgatggatatccggatgccggtcatgaacggactgacggcgaccagaaagatccgggaatccggacgtgaggatggcaaaacggttccgatcgtggcgatgacagccaatgtgtttgaggaggacgtgcgaaagtctctcgatgccgggatggatgcacacttaagcaagccgattgagattacacagatgtatgccgtcctcgacagtatgatttaccgttgagaagaaaaaggggttggtgcttcaagcaccagcccctttttgtgtcgaattttgtagaaggggaaggacaggggcgctggatgttaaaaaacggtacggattttgctgagaaataaaagatggtatgttatattttaaaagatatgttaccgatacgataaaagaatggagccgaatcaatgcaaaagaacagagtgatgctggtagcggatgatatcgacgtaaacagagcgtcgtttcgcgcaatgtttgaagaggaatatgaggtgctggaagccggggacggaaatgagacactaaaaattttagaagagcggaaagtggatattgtcatactggatatgtgtatgcccgtaaagagcgggaagcaggtattaaagcagatgaaggcagatccgaagcttctcgatattccggtcatcgtgaagacggtcatcggcgaggagagagaacttgaaatgttagagatgggggcggacgattttatattttctccctgcgagccggaggtggtaaaaaagcgggtgtccaatatcatgacacgctatgagacactggcggagcggcttgagagccagcggcatttaagcacggtcagagaacatctgctgtttcaggtggcgcggacggtgcgcacggacgtcgcggtaatcgaggagtgttacagagaaatgacaggtcagagaacggaaaataagtctgtgggactggaggatatgtacaggcatctggagcacatccgggaactgacggacagtgttttggacgggcagattgtaggtgtgggcgagagtgtctgcgacacctttcagatttcggatgtggttgcggaactgacctcagagtgcaggacaatctgtacggaaatggggattgaggtgacggtgcaggagggtgagattttctgcgaatatctggtgggcgatgtcaggaggctcaagcagatctgggcaagactgctaaagaaagcgtatatcaacgcgcggccgggatgccggatttttacaggctatcgggaagtaagaacgggggaggatgagcttgaactggaacttgccgtgcagggcagcattgacggaggagaagactatccgctgatcaagagcctcgtagaacttttgcacggaacgatgtgtgtggaagtacgggaggatgcgcagattctctgcagggtgttcctgcctttcagaatcggaaaagcgatcggacagcccaaaagttttgcggggttaaagacgcttcttctggacgacaatgaactgtcgagagattatcatgcagcggttcttgcgcgtctcgggcttccggttgacgtggtgcaaaacggggcggacgccgtggcgtatttaaggagagccgcgtctaagggcaccgcctatgatctgtgttttgtgaactggtatatgcagggcggtgagccgtttatccggtcggtgcgggaaaattttccgaagggaagccttacgatctgctgttcgaccaatgagaaggaactggtggagtgtcagatgcttgccgcaggagtggattgtgtggtggagcgcccgatttaccaggagggaatgtaccggtttttgacggaactgtgcagacaggagagtggaaaaaacggaaccggatcggagaaaatataattttttatacggcagcgaaacttttttggtgtccggacggtctaatagttaaaaggaggtgtgagatcgtatgtttttctccgggaaaaaccataaggaacaaaagatagaacagcttttgctggaaaattacaacaaatactatcgtcttgcctacagttacgtacatcatgaggcggatgccgcggatatcgtacagaacggagcgtacaaggcgatcaaaaacagcgatgcgctaaagcaggaggaatatgcgcagacatggatttaccgcattatgttaaacgagatcttcggatatgtaaaaaagaaccgggaagtttccctggatgagatgccggcggaagagggaagagaagaccgctatgagaacattgatctaagaagggcattggacgccatggaagaacgggataaagcggtcattgaactgcgctattttgaggacatgaagctggaggatattgcgcgcgtgctgggggagaaccagaatacggtaaagagccggctgtaccgcggattaaagaagctacggctggaacttacggatacatggcagtgggaatagaggaaaggatggtgccgcatatggaaaataagaaacaggattgtaaaaagatcgaggaattaaagcgacagtatgccggatcggaaatgtccggcgagcaggtggagcagatgaaaaaacggatcgaggaagcaaagatggaaaaacgaaacgagagcagaaaaatgcataccgtgagaaatattgtggcagcggctgctgcagtggcggcagtcttcgtggtgctgccgaacacatcggggagcgtggcgtatgccatggggaatctaccggtggtcggaaaactcgtggaggctgtgacgttccgggattatcaatacgacaacggaggtcatgcggcggacattaagacgccggagctgacggtaaaggagagcgatacggaacagatgacggacactgaggtccaggtgcaggagaacttaaaaaaaacaacggcagagatcaatgcggagattgaaaagattacggatcagatcgtatcggagttcgaggagagcaagaaggaagaagagggctatcaggaggtcgtggtcaagcacgaagttatcagcacgaccgacgattactttacgttaaagctgatgtgctatcaggcggcaggcagcggcgcggagtgggactattattatacgattgacttaaagacgggggagcgtctgacactttcggatttattccagagtggcgcggattatatcaccccgatcagcgagaatatcaaggagcagatgcagcagcagatggcggaggatgacggtaagatgtactgggtggataatgccgaggttccggaatggaattttgacaaaattacggatgagacttcattttatctggattcggacggccatcttgtgatatgctttaacgagggtgatgtggcaccgatgtatatgggatgcgtacagttcgtcattccggatgaggtggttgcagatatccgaaagtaacggaagcagattccggtgtcggaggatgagagacaatgaagcatgcaaaagcggtgcgcagaattatttttacggttttaatcgtggcagccgtgattgtgggatttaatacctatacggcagattattatcatgcgaaggactatgaacttcagacaacagaggtatcggagacggatgcctacatcgcttacggagatccgcagagtgagacgggactgatcttttatccgggagccaaggtggaagagacggcgtacgcaccggttatggatgggcttgcgcagcagggaatcttttgcgtgacggtaaagatgccggcgcaccttgccattttaaagccgaatgcggcggatgaggtgcggcaggagtttggagaggtaaagcactggtatctggcgggacattctctgggcggagccatggcgggcagctatgcggcaaagcatgagtcagagctcgcgggactgatttttctggcggcgtacccgaccagggaacttcagacgcttccggtgctctcgctctacgggagcgaggacggcgttttgaatatggaaaaatatcaggaagcaatcggtcttgcggcggactgccgcgagtatgtcttagagggcggcaaccatgccgggttcggcaattacggatcgcagaagggagacggcgaggccgggattacggacagggagcagtggcaggaaacgatcgattacatcatggacatgatccggcagcaacagggggaaaagtagcggaacccggagaataatgaaacggaatctgagcggaaaacgaaggaaagcggtttacagtaccgccgcctttgtggtatgatagtaccagtgcaaactcaggataaaggagcgattggatcatgcaggacaatttgagagaggaattgattaagcagtttccggcggaagttgtggaactggtggaaccgtccggtaagaagttttatgcctgtccgacctgcaagcgcgtggtgacattgaacgagagcaagtgtgccggctgcagtcaggtattgagctgggatcacatccggcaggaagagatggtgaagggtgtgaagacggcaaccttaaaatttgaggttggcggagattttaataaaggcgactgcagaaagtgtccgctttcttacattgcaaaagagaataatgagaacgtttatgaatgtccgttaaaaatgcgtgcgaactgtaagctggagatttcgtaacaagatttgtaacaagagaggacaagagcggcccgcttcggcgtgccgctcattgctttttgagggaggtaagatggcacggatgcattggtggataatggcagttggagccgtatttttcctgtggtttttcattccggcatttgtcgtggttaatatcggtaacattacgggaatggcggtgtcagcccttgtgctgctgtacggtattttttaccggcaggtacaggatgtggcagggagactttggcagacgcgcggtggcagagcgggattgtccgccctgggcatggtgctcctttttattctgcttatcgtgacagtggagacggcggggatgataagaagcgcggcaaaccgtgcgccggagaatacgacggcggtggtcttaggatgcagcgtcaagggggagcggccgagccgggtgttgagcgaacggctttgcgcggcgtatgagtatctgaaccggaatccaaaagctgtgtgcgtattatctggcggacagggagatggagaggagatcagcgaggcagagtgcatgtaccgttacctgaccgggcgggggatcgacggggcgagactgcttctggaggaccggtccacgacgacggcggaaaatctgcaatattccatggaattgttacaacagcacggaatcgacgggcccgtcacgattataaccagtgaattccatgagtaccgggcgaatcagacggcaaagagacttggcattacaagctacagcacaccgagccggacattttttctctaccttccgaccttttatgtgcgggaattatatggtatattgtattataaaatatcgaaataaaggatgacgagatggcagtaaaatattatgcggtagcggttggtaagaaaccgggaatatacacaaaatgggacgagtgtaaggcgatggtacacgggttccccggagcggtttacaagagttttaagacgctggaagaagcggagacgtttctggaaagcgcaccggcgcgtgggggagaagctcatgcaaaaggagcggcgcagcagaaggcaacgcaaggagcagcacagcagaaatcaggaacagccggagacggcaaggcagagacgagaggtgcggaatctgccggagagacagaggatctgccggagaattacgcgttcgtggatggctcttttcacgccggtaccggcgtgtacggttatggaggttttttgattcatgccggcggaaaagaagtgctgcagggtgcggggaaggagccggagatggcgtcgatgcgcaatgtggcaggcgaggttttagggagcatggcagccatcgaaaaggcgctcgaacttggcttaaaggatcttacgatctattacgattatatgggaatcgagatgtgggcaaaaggactctggaagcgcaataaaaagggtacggtggcctactacgagtatgtgcgctcggtggaggataagatccggctttcttttgtgaaggtaaagggacactcgggcgtcatgggcaatgaggaggcagaccgcctggcgaaggaggctgtcgggataacgggctgacggcgcgcaaagagagaaggcattcagggggatcggacggaatggataagagattaaaatattatgatctgatggagcagctccatggcaagatcatgtcgggggagatacgcccgggagagaagcttccttcggagaatgaactgtcggcggaatacggggtcagccggcagacggtgcgcaaggcactgcagattttgcagaatgagggatacatatatgcggaacatggccgcggaaccttctgctcggagatgttacggcacacgacgccgtccaaaaatatcgcggtcgtgacaacttatctttcggattatatttttccgcgcatcgtgcagggaattgaccaggtgctgacggagaacggttacagtattctgctgaaaaatacgcgcaactcaagaagccttgaggcaaagtgtctcgaggagcttctgcagaaggatatcgacgggctcatcatcgagccgagcaagagccagattttctgccggcatgtgaatctgtatgagatgctcgacagctatcatatcccctatgtatttatacagggagtacatgcccagcttctggaccggccgcagattcttctggacgactgcaggggagcctatcttgcgaccagatacctgattgaactgggacaccggcgcattgtgggcgtcttcaaatccgacgacacgcagggacagcagcgccacaaggggtatgtgcaggcactgcaggaagcgggaattgcgtatgatccggataaggtgatctggttctacacggaggaccgcaagacccatccgtttgagcggatcaggcagatggcgaaagatcgcggcaatcatccgtttgaggcggtggtggcgtacaacgatcaggttgccatcgaggtgatccgcgcgctgaatgaggaggggctctccgtgccccaggatgtctcggtgacggggtatgacaattcctatctggcgcagacatgccgcgtgccgctgacgacgatctcccatccgcaggaggaactgggagcggcagccgccgaactgctgcttcggattatccgggagggaaattccaatatcgaaggaaaatgcgtcctgatggagccggaactggtgatccgggaatcctgcagaagagaagatacggacatgacacaggacgaataaaaacaacttgtaagtacgaaagtacaagtcatacacttggaagcaggatgtatgacaacaaaaagccgctgcatctgcagcggctttttgtgtactctgtgcacattttgattagggggaagagaaggagagacgcatgaaataccggatgaaacatgccccgatggggtggaacagctatgactattatgacaccacagtgacggagcgggaggtcagggcaaacgcggattatatggcggcgcacttaaaaccgtacggctgggaatatattgtggtggacatccagtggtatgcaaagaacaccggaagtcagagggagaagtaccagtatattccgtttggggaggtctcgatggatgagtacgggcggctgctcccctgtacggaccgcttcccgtcggcgaaggacggtgtgggctttcgggcgctggcggattatgtgcatgggttggggttaaagtttggaatccatatcatgcggggaattccgcgggaagcggcacaccggcatctgccgattttgggaagcaatgcactggcgagcgatatagcggatccgtcgtcgatctgtaagtggaatccggacatgtacggcatccgtatgggagagccgggcgcgcaggaatattacgattccatcgtggcactgtacgcacagtggggcgtggattttatcaaatgcgatgatatctgcaataccaatctgtacgtggaacatccgtattcggcggcgcacgagattgagatgctgcagcatgcgattgaaaagtgcggcagggacatcgtgctctccttgtcgccgggaccggcgctgatcgagaaagcatggcattatgaaacctatgccaacatgtggcgcatcacggatgatttctgggatacgtgggagctgctttacgatatgttccggcgctgcgaactgtggcagaaccacgtgggctgcggatcgttcccggactgtgacatgctgccggtcggctggctcggaaaaggattctggcaggagcggcagacgaattttacaagggatgagcagaagacgatgatgacgctctggtgtatgttcggctcgcctttgatgatcggcggtgaactgacgaagctggatgactggacgcagttccttttaacgagacgggagctgctgcagatgctcgacgcagactatgtgggcagacaggtggcgcgcgatcaaaagcatgcggtctggagctgtgtcaatgagaaaaaggacgaacggtatcttgccctgtttaactttatggagcagccggcgcggtgtgaggttgcgctgccggagacggaagcgtttgcagacatgtgcggacagacgggaaccattcgggcgcgggaactctgggatggaacagagcttattgtgcagaatgacagcctttcttctgaaattccggcgcacggtgtgcatgttttccggatagataaaaaatagagaaccacacaatgtaaaaataaataaaaaacaacttgttattacgagcatacaagttttatgcttaagataacatcaataagatgagtgcagggaaatcatgggtgcatgagagatgcggcatggtttcggaaaggggtttgttacacatgggaaatgcaaaggagaggattgagagtgggaaggcggtgctcggtatcgagttcggctcaaccagaatcaaggcagtgctggtggacgagacacatcagccgatcgcatccggtgcgcacgactgggagaatcagctggttgacggaatctggacgtacagcctggatatgatctgggacggtcttagggactgctaccgcaagatgacagaggatgtacagaacaaatacggcgttgccgtcacaaagcttggtgccatcggattttccggaatgatgcacggctatatgccgttcgatgagaagggggagcttctggttccgttccgcacctggagaaataccatcacgggcgaggctgccgcagcactgacgaaggagttctcgttcaatattccgcagcgctggagcatcgcacatctgtatcaggcgatcttaaacggggaagagcatgtggataaaatcgcatattttaccacacttgcgggatacattcactggaaactcacaggggagaaggtactgggagtcggcgaggcatccggtatgttcccgatcgatgcgaagacaagagattacaaccggaagatgctggcgcagtttgatgcgcttcctgcggtagggaaatatacatggaagttagaggagatcctgccgaaggtgctcgtggccggggagaatgccgggaccctgactaaggagggcgcaaagcttctggatccgagcggcaggctggaagccgggatcccgctctgcccgccggagggtgatgccggtaccggtatggcggcaacgaattcggtggctgtgcgcaccggaaatgtgtctgccggaacgtccgtgttcgcaatggtggttttagaggaagacttaaaggcggtacatgaggaactggatatggtgaccacaccgtccggcgataccgtggcgatggtgcactgcaacaactgtacctcggatctgaacgcctgggtcggcctgttccgggagttcgcggagaacttcggaatcaatgtcgatatgaacgaacttttcggaaaactttacaacaaggcgctggagggcgacaaggactgcggcggacttctggcatacaactatttttcgggagagccggtgaccggagcaaacgaaggacggccgctgtttgtgcgcaagccggacgcacattttaatctcgccaatttcatgcggacacatctgtatgcagcgcttgcaaccttaaagatcggtctggatattttgctgaaggaagaaaaagtaaaagtggatcgcatctacggacatggcggactctttaagaccaaaggcgtcggacagggaattttagccgctgcgatggatgcaccggtggcagtgatggagacggccggcgagggtggtccgtggggcatggcgctgctggcatcctacatgctgcagaaggcggacggcgagagcctggagcagtacctctccgaaaaagtcttcggcggggagtccggaagcgtgatggagccggatccggcggatgttgcgggatttgacgcttacatcaaggcgtacaaagcggcgcttgcaacagagaaagaggcagcccggacgatgccgttataagacaggcacgaaggcggcagattctgccacaccttacagtgggattcacacagcagttactgctgaaacataaatatatttcatggagggaacattatgttagcaacaaaaaattacaagttctggttctgcaccggatcacaggatctttacggagacgagtgcctcgcacatgtggcagagcattccaaaatcatcgtggcaaagttaaacgagtccggcgtgcttccgtatgaagtggtatggaagccgacactgatcaccaatgaactgatccgtaagaccttcaacgaggcaaatgtagatgaggagtgcgcaggcgtcatcacatggatgcacacattttccccggcaaagtcctggattctcggattacaggagtacagaaagccgctgcttcatttacatacccagttcaatgaggagattccttacgacaccatcgacatggatttcatgaacgagaaccagtcggcacacggagaccgtgagtacggtcatatcgtgacacgtatgggaatcgagcgcaaggtagtcgtgggacactggagcgacgtcaatgtgcaggagcgcattgcatcctggatgtgcacagcagtcggcgtgatcgagagcagccatatccgcgtgatgcgtgtggcagacaacatgagaaacgtagctgttaccgagggggataaggtcgaagcacagctgaagttcggctgggaagtggatacctatccggtcaacgagattgcggaggcagttgcagccgtatccgagtccgataccaacgctttggtagatgagtattatgacaaatatgacattttattagagggacgtgatccgcaggagtttagacgccatgtagccgtacaggcacagatcgagatcggtttcgagcgtttcctggacgagaagaattatcaggcaatcgtaacacacttcggtgatctcggtgccttaaagcagcttccgggacttgcaatccagcgcctcgaggaaaaaggctacggctttggcgcagagggtgactggaaagtggcagcgatggtgcgcctgatgaagattatgacagcaggcaagaaggaggcaaagggtacttccatgctggaggattacacctacaacttcgtcaagggcaaagagggaatcctcgaggcgcatatgcttgagatctgcccgtccatcgcagacggcccgatttcaatcaagtgccagccgctttccatgggtgacagagaagacccggcaagactggtatttacctccaaggagggaagcggtatcgcaacatccttaatcgatctcggcaaccgtttccgtctcatcatcaacgatgtggactgcaagaagacagagaagccgatgccgaagcttccggtggcaacgaattactggacaccgcagccggatctctacaccggtgcggaggcatggatcctggcaggcggcgcacaccacaccgcatttacctacgacctcaccgcagagcagatgggcgactgggcgaatgccatgggcattgaggcagtttatattgacaaggatacaaagatccgcgagttcaagaaggatctgatgcttggcaacctgttctaccgctaagaaaaacgataagaagcatgtgggggatgttctaaacggcatcccccggtaaatgagaatggtaccggggcagacccggatacacatacagggtgcgcgcacaagcgcagaaagggagaggaatatgaagttttttattgacacagcaaacgtagaggacatccgcaaagcaaatgatatgggagtgatctgcggcgttaccacaaacccgtctctgatcgccaaagagggcagagatttcaacgaggtcatcaaggagatcacaacgatcgttgacggtccgatcagcggcgaggtaaaagcaaccactgtggatgcggaaggcatgattaaagagggacgccagatcgcagcgatccacccgaacatggtagtcaagatcccgatgaccgtagagggattaaaggcagtcaaagtgctgtccgcagagggaatcaagacgaacgtgacacttattttcaccgcaaaccaggcacttcttgcagcgcgtgcaggcgcaacctatgtatctccgttcctcggcagactcgacgacatcagcacggcaggcatcgacctgatccaggatatcgtgcagatctttgacaactacggactcgagaccgagatcatcgctgcatcgatccgcaacccgatccatgtgacagactgtgcattagcaggcgcacatatcgcaacggttccgtacaaagtcattgagcagatgaccaaacatccgcttaccgatgcgggaattgagaaattccaggcggactacagagctgtatttggtgactgagttttgcagtattgaatgaataagaatgcatgaagggggaactatggataaactggcacttcagaagatggctgttgaagtccgcaagggaattgtatcgtccgtgcacagcgcgaaggcgggacatccgggcggatcactctcagcagcagacatctttacttatttatattttgaagagatgaatattgatccgaaggatccgaagaaggaggatcgtgaccgttttgtgctgtccaagggacacacggcgccggggctttactcggcactggcaaaccgcggttattttccagtggaggatcttttgaccctgcgccataccggatcgtatttacagggacatccggatatgaagcacattccgggcgtggatatgtcttccggttctctgggacagggactttccgcagcgtgcggcatggctctggcagggaagatgaaacagcaggattaccgtgtgtatgcactttgcggcgacggcgagatcgaggagggacagatctgggaggctgccatgttcgcaggcttccgcaagctggataatctctgcgtgatcgtggacaacaacaatctgcagatcgatggaccgatcgacgaggtctgctcgccgtacccgatcgacaagaagttcgagagctttcatttccacgtaatcaacattgacggcaatgatttcgatgagattaagaaggcatttgacgaggcgagaactacgaagggaatgccgaccgcgatcattgcgcataccgtaaaaggaaaaggtgtctcctatatggagaacagcgtcggctggcacggaaaagcgccgaacgatgaggaatacgcagtggcgatggaggatcttagaaaggcaggtgaagcattgtgtcagaagtaaagattgcaacgagagagagctacggcaatgctttggtcgagcttggaggagagcatgagaatctggttgtcctggatgcggatctcgcagcggcaaccaagaccggaatgttcaagaaggcattcccggaacgccacattgactgcggtatcgcagaggcgaatatgaccggcgtggcagccggaatgtccacgtgtggatttgtaccgtttgtgagcaccttcgctatgtttgcggcgggacgttcttacgagcaggtgcgcaattccatcggatatccgcatctgaatgtgaagatcggtgcgacgcatgccggaatttccgtcggggaagacggtgcgacgcatcagtgcaatgaggatattgccctgatgcgtgcaattccgggaatggttgtcatcaacccgtcggacgacatcgaggcgcgcgcggcagtgaaggctgcctacgagtacgtggggccggtgtatctgcgctttggcagactggcggttccgatcatcaacgacggcgcggattataagtttgagattggcaagggcgtgacgctccgggagggaagcgactgctccatcattgcgaccggactttgtgtctcggaagcactggcagcagcggatgcgctggcagagcagggcattcatgcggaagtcatcaacattcacaccatcaagccgctcgacgaggagcttgtggtgaagacagcaaaaaagacagggcgcgtattcacggtggaggagcattccatcatcggaggactcggcgctgctgtggcggagacgctcggtgaaaaatgcccgacaaagattaccagaatcggtgtcaacgatgtctttggcgaatccggtccggcaaaagaacttcttcacaaatacgaactggatgcagagggaatcgcaaaccgcatcctgcgtgagatgaagtagaacggcgcagcacaggaggaaactaagagatgttagaagaattaaaaaaagaggtctatgaagccaacatggaacttccgcgcagagggctcattacctacacctggggcaatgtcagcggaatcgaccgcgagagcggctatttcgtcatcaagccgagcggtgtggattatgatgccttaagcccggacgatatggtagtcatggatcttgacggaaataagatcgagggcagatataagccgtcctccgacacggcgacccatatcgaactctacaaaaagtacgaggagatcggtggtattgtacatacccattccccggaggctgtcgcgtgggcgcaggcgggcagagacattccgctttacggcacaacgcatgcagactatttcttcggaccgattccgtgcgccagaaatctgacgccggaggagatcgacgaggcatatgagaagaacaccggacttgtgattattgagacctttgagacaagaggcatcaagccgatgtacacaccggcggttctctgtgcgaatcacggaccgtttacctggggtaaggatgccgcagaggcagtccacaatgcggtcgtgctggaggaagtggcgaagatggcgcgcaacaccgagcttatcaatccgaaggtgaagccggcgccggattgtatcaaggaaaagcatttctaccgcaagcatggggcaaatgcctactacggacagaattagtacgtcagaagaaacggtctgccgtttcgcaataaatatgcttagaaatgaggatcagtatgcaaaaacgaagctttggccaaacaaaggaaggcagggaggtcacggagtacacgcttgtcaatgcgcagggaatgacgctttctgtcattgatctcggggcaacgatcgtatcgatcacaatgaagggctcagacggaaacgtatatgacgttgtgctgggatacgatacacccgttgattatcagaacaatacctgctatttcggagctgtgatcgggcgcaatgcgaaccggatcgatcatgcacgcatccatctggatggaaaagactattcgctggaagcaaatgacaacgagaacaatctgcacagcggatcgcacggttttcacgcagtgatctgggatgtggtgcaggagagcgcacagagtattacgttttcctatgtaagccgcgacggggaacaggatttcccaggcaatatgacggcgaaggtcacgtacacgctggacgataacggggaggtcgcgatcgcctatgaggcagtctgcgaccagacgacggtggcgaactttacgaaccatgcctactttaatctggacggacatgattccggcgtgatggaagggcagaagcttgaacttcacgcatcttactatacgccagtcattgattccaaggcgattccgaccggagaactcgcaaaagtagccgggacgccgtttgatttccgggagatgaaggagatcggacgggacatcgaagcggacgatacgcagcttcgttatgcgggcggttatgaccacaattatgcgctggacaaggcggacggcaccatgcagcttgctgcgcgcgccagaggtgcaaagtccggcatctgcatggatgtgtatacggactgtgtggggatccagctctataccggcaactttatcacgccgcagaccggcaagggcggcgtgcagtacggcaagcgccatgcattctgtctggagacgcagtatttcccgaatgcggtgaatgagaagaacttcaaatcaccggtattaaaagcgggcgatacgtactgctcaaagacaaagtattgtttcgggctggaaaaataagaacaacgaatcaggaatgagagaaagtggattttatcacagaaaacggtggtaagatccactttttttgttttgcagggaaaacagcgtccatacttgacaaaaaggaaatcctgtctataataattactgttggtaattacctttaataactaaatggagcgacgagctgggaggataaatcatgacgaacgaaaaaatcaagcggatgtttgatgcctgctatcaggcgaagcggatcagagaaatgcttccgcctctgccgccgggcgtgatgccgtcttatattcaatatctggatgtgatccggaagctggaagggcagggcaccggggtaaaggtatcggacatcagcgatgcgctcaatcttccgcgccccggtgtgacccgaaccgtaaaagagatggaaaaaaagggatatatctgtaagatttcttccccggatgacggccgtgtgacctatatatccgccactgaggagggagaggagctctcgaaaaagtacgacgagtattattttaacgacctgcgggcggatctgtctgatattacagaggaagaagcggatggcatgattcggacgattgagaagttttataagattatgtgtgagaggagagaacattttgacaagtgataaagcagattttacacagggaagtatattaaaaaagctggttgcgttcatgctgcccgtgctgggagccttgatcttacaggcggcgtacggggcggtggatcttctggttgtgggaagattcggctccacagccgggctgtccgcggtgtctaccggaagccaggtgttaaacctggtcaccttcgtggtgattcagctggcgatgggtgtgaccgtcctgattgcgcgctacctgggagaaaaacgcccggagcagatcggcgcggtggtcggaggcgccgcgatcgtgttcgcactgatcgccgtcggactgtttgtcgtcatggtatgttttgcggaaccgatctctgtccttatgcaggcaccggcggaagcggtggatctgacggcatcctatgtgcgcatttgcggcggcggtattttctttattgtggcttataatgtgctgtcggcagttttcagaggactgggtgacagcaggtcgccgttactcttcgtactgatcgcgtgtattgtgaatgtggcgggggatctgatcttcgtggcaggatttcgcatggatgccacgggagcagcgattgcgaccgttctggcacaggcgctcagcgtggtatttgcagtgctccttctgctgaaaaaggatcttccgtttgccattgtaaaaagtgatttccgatggaatccgcagtgcaggaacttccttcggatcggactgccgctggctttgcaggagttcctcacgcagatttcatttctggcgctctgcgcgtttgtaaaccgtctggggctagaagcgtcctccggttatggtgtcgcctgcaagatcgttagttttgccatgctggtaccgagtgcgctgatgcagtctatggcgtcgttcgtctcccagaatataggagcagggaagaaaaagcgggcaaagaagtccatgcttaccggaatcggcgtgggtgttacaatcggctgcatggtatttgcactgatcctgttaaagggagatctgctggcgggtattttttcgacagatccggcggtcatccggaacgcgtatgattatctgaaaggattttcaatggagacgattgtgacagcggtccttttcagcatggtcggctatttcaatggaaacaacaagacactctgggttatgacgcaggggctgatccagacgttattgatacgtctcccgatggcttacgtgatgagtatccagcccaatgcgagcctcacaaagatcggtctggcggcgccggtgtccaccacggtgggaatcgtactgaatattggattttttgtatatcacagaagggcagcagagcggcgatgagagaagaacttcttaacgaactgatggtcatttcagaggaagaaaaaaagtacagagcgggacagggaatggttgagcggcagctgtatgcgagagagtcgatcggggagattgaccgggaactgctgttaaagcggggacggctcatcaccgtgcgtccgcacagccgctttgtggatttcccggagcaccggcacaactatgtggagatcatgtatgtcgtgcaggggagcatcacgcacatcatcggggggaaggaactgacacttcacaagggggatgtgctgatgttgaaccagcaggtgcgtcatgccatccgcagggcagagtatgaggatatcggcatcaattttatcgcgctgccggagttttttgaggtgccgctttccatgctgcatgagaaaaatgtgcttgcggaatttatcgccggcgctttcggacagaagaatccggtgtcgcactacctgctgttccgcttaaaggaacagccgcaggtggaaaatctcatggaaaatatgatcgaatccatgctgcatgaacattccgatgaggatgtcatgaaccagtatacgatggggctggtatttttatatctgttgaatcaccttgagaacttaagccacaattcctcgatggactaccgggaggcgatcgtgcaggcggtgctcggatatatcaaaagtgactgcaaaaatgcgaatctgacgaagatcgcaaaagatacccatcagtcggtctcggtgttaagcaagctgatccggcagaaaaccggatatacattcaaggagcttttgcagcagcggagatttgagacggcggcacatctgctcatggagacggatctggcggtggaggagatcgcacttgatgtcgggtatgagaatctgagttattttttccggcagtttaagagccggtatggcgtgacaccgcgtgcataccgcatgatgaattcacgtgacgccgggaacctttatgaaaaataatagagaatatttgagaatggaaaataaggacagttttttagtcgaatcagagcctaaaaaacggtccttatttttgttatgctgacagcagtgatgagaaggaaagagaaaggagcaggtggatggagatgacgtattatctggcggtggatatcggagcgtcgagcggacgacatatgctgtcccatctggaagacgggaagctggtattggaagaaatctatcgcttcccgaacggaatgacggagaagaacgggcacaaggtatgggatgtcgagcggctgtttgcggagattttaaacggcatgaagcagtgcgccagactggggaaaatcccgcacagcatggggattgacacctgggcggtggactatgtccttttggatgggcagggaagacgtatcggagatgcggcagcctaccgcgacggcaggacacagggcatggatgaaaaagtgtatgctcatatcacggaggaagaactctaccacagaacaggaatccaaaaacagatctttaacacgatctatcagctggctgcggtaagggagcagcatccaaaatggctggagcaggcggactgtctgctgatgatgccggattattttcattttcttctgaccgggaaaaaggtgcaggagtacaccaatgcgacgacgacccagctggttagtccggtgacaaaggactgggatgagcagctgatccggcagctgggctatccgagacggttgtttcaggagatccggatgccggggtatgaactggggggcctgcggggggagatccagaaagaagtgggattttcctgcaaggtgatcctgccgcccacacacgataccgcctcggcggtggcggcggtgccaacgcaggaggaagagacgctctatatcagctccggcacatggtcgctcatgggaaccgaacggatgacggcggattgcagcagtgtggcgagagcgcacaacatgacaaacgagggcggttacgactgccggttccgctatctgaaaaatatcatgggactctggatgatccagtctgtccgaaaggagagtgcgccggaacttgggtttggagagatctgtgcgcgcgccgcaaaggagacgatcgcgtcgcgtatcgacgtcaacgatgcgcgatttctggcaccggagaacatgacggaggaagtaaggagggcatgtcgggaagcgggggagcaggttccgcagaccatcggggaactggcggcggtcatctaccacagtcttgcgcagtgctatgccgggacggcagaggagatcgaggcgttgacgggaaaacagtacccagagattcacattgtgggaggcggcgcgaatgcgcagtatttaaaccggcttaccgcagaatacaccggaaagacggtcgaggcgggaccggcggaggcgacggcgctcggcaaccttgccgcgcagatgattgcggcgggagaatttgaagacctcagtgcggcgagagcatgcattgcggattcgtttacaatggagaagtttgaaggagagaagggagaaacgagatgacaggttatgaagcagcaaaggcaaagtatgaggcacttggcgtggacacagaccgcgcgatcgagcggttgaaaaaggttccggtatcgctgcactgctggcagctggacgatgtgatcggatttgacaatgacggcggactcacaggtggaatccagacgaccggaaactatccggggcgcgccagaacgccgcagcagctgatggaggacatggaggaggcaatgaagctgatgccgggaacggcaaaattaaatattcatgcatcctatgcgatttttgaaccgggagaatttgcggaccgcgacgccttagagccgaagcatttcgcaaagtgggtggaatttgcgaagaagcatcatatgggaattgatttcaacccgacatttttctcccacgaaaaagtaaaagacggacttaccttatcaagccccgatgaggagaccagaaagttctggatcaaccacggaaaggcatgcatccgcatctcggaatattttgcaaaggagaccggtgtgccgtgcgtcatgaatatctggacgggagacggattcaaggatgttccggcagaccgtatgggaccgcgtctgcgctacaaggattcgatcgagcagattttatctgagccgtatgacaggaagcttgtcaagccgtgcgtggaatccaaggtattcggtatcggcgtggagtcctacaccgtgggttcggcagaatttacgttgagtttcgccgcacagcatgaaggctgcatgccgctcatggacaacggacattatcatccgacggagtatgtgtcggacaagattcctgccatgctctgtttttacccggagtttgcacttcacattaccagaggcgtgcgctgggattcggatcatgtgctgctcctggatgacgagacgaaagagatggcaaaagagatcgtaagaaatgacgcgcttgaccgtgtatacatggcgttagattactttgacgcgagcatcaaccgtgtcctggcgcttgcgaccggcttcaggagctggcagaaagccctgttaacggcactgtgcacgccgaatgagatgttaaaggaactgcaggatacgaatcagctgggaaaacttatggttatgcacgaggcggtaaaaatgcttccgatcggcgagatctgggaggaatactgccgcagggaaggcgtgtgcgacgaccttcatttctacgacgaaatcgagcgttacgagcgtgaggtactgacccaaagaggataagcagatagaagctgaatcagagagaagagaggaagagaatcatgaaatttttggatgcagaatttgtacagggatttatccgcatggcaaacgatggatgggagcagggctggcatgagagaaacggcggaaatttatcttaccgcgtgaaaccggaggaagtggaagcggtgcgggggaattttcaggaaaaggagtggcagccgatcggcaccacggtgcccaatctggcaggagagtatttccttgtgaccggaagcggaaaatatttccgcaacgtcatcttaaagccggaagattcgatctgcatgattgagctggacgaaaaaggcgagaactaccggatcgtgtggggactggtgaacggcggaagaccgacctcggagctgccgagccatctgatgaacctggaggtaaagaaactgcagaatccgaagtaccgcgtggtctatcacgcacataccaccaatatcattgcgctgacgttcgtgcttccactggaggatcgcgtattcacgagagaactctgggagatggcaacggaatgtccggtggtattcccggcaggtgtcggcgtggtgccgtggatggttccgggcggcagggagatcgcggttgcaaccagcgagctgatgaaaaaatatgatcttgcgatctgggcgcatcacggcatgttcgccgcaggagaggactttgacttaacgttcggtctgatgcataccgcagaaaaatccgcggagattctggtgaagacgctctccatgcgtccggataagctccagacgatacagccggacgaattcagacatctggcggaggattttcatgtgacactgccggacgaattcttatatgaaaaataaaaaatcaggctgtcttaagtgaagacaggatggcatgtggcataagaaaacccccgggcgcaatggaaaggcacgaaaccttggattgtcaaccgggggtcttcttatggaattcttctgtctgattcatagaacctttctctaggcagtggcatcgaacgaatgaacatcatcctcctctgtcaccgtcattgcctgatgcagcagtgaggcgaacgaagacgagggctgttgtttggaacgttgctgctttctgctctctggtgcaagccggtcgatccggtttacggggtgaacgggtaacacgaaaacactatcatagtagattgcgacaatcatcctccttgacaaataaatcacaactgataggggttaatgagttccttctctactatatatatcggcagacatcagaaataaattaagagaaaatagagagaatattatttggaagaagcgtgcacctgtgttaaaatattgctgtgaacagggggcacgttttttatgtcattacagtttgtgttcggcaattccggaagcggaaagtccgattatttatatcagtccatactggaagaagcggagagggagccggagaagaattttcttttgcttgttccggaacaatttacgatgcagacgcagcgcgaacttgtgtggcgccagcccaatcatgccatcatgaacgtggatgtgctcagttttgtgcgtctggcgtaccgtgtgttcgacgatctcggaatgcaggatctggtcattttagaggagacgggcaagaatctggtgctgcgcaaggtggcggagcttaagaaaaaagaactctcggtgctcggtggcaatctcaacaaaatgggatacatcggtgagatcaagtccctgatctcggagatggcgcagtacaatatcacgccggaggatcttggcgcttttctaggcgagcaggatgtcggggataccctgcgctgtaagatgcaggatattcttacgatgtatgagggattccgggagtatattgacgggaaatacatcacggcggaggagattctgacgctcttgtgtgaggtggcggaggaatccgaactcatcagggacagtgtgattgtctttgacgagtttacgggattcaccccgatccagaaccggctgcttcgggtgatgctgccgcttgccgaccgcgtcatcgtgtcgctctccatggatatccgggaggatttttaccacagcagaggcgtgcacgagcttttttccatgagcaaggagaccgtgcagacactgcttaagattgcggcggatgcgggatgcgaggtgctctctccggtgatcatggagccgggagagcacaggcgctatgaagatgcgccggagctgtttttcatggaacagaatctgttccgcccgatgtaccagaagtggcggaagccggtttctgacatcagcatcaccagcttaaaggacccgcgccaggagctttcctttgtcgcaagggagattgtgtgcctggtccggacaaagggatatcgctaccgggattttgcggttgtgaccggagatgtgccgcagtatgccaactatgttccggagacctttgcgcagtacgggattccgttttttatcgaccagacgagaaacattctgtttcatccgtttatcgagtttatccgcgcggcgcttgaggtcgtggagtttgatttctcctaccagagtgtgttccgctttcttcggagcggtctggcgggacggcttctgacggagagcgggacggagcagacggcagatgaggacggcgcaggagccaaagccagaggcggggtgaatgatgaggacggcgccaaagccaaagccaaagccaaagccggagcagatgaggacggcgttggagcctgggcggatgatgagaatgtgattgaccgtctggagaattatgtgcttgcaaaaggaatccgcggcagaaagcgctggagtgagaagtggacatctgtgatgaagcgggatgcccgctatccggaggcggcgcaggaggagatggctcttttgaaccgggcgcgggagcggatcgttctggcgtttgagccgctgtgcgaacttttttccgggaaaaaatacacggttgcggagcagacctacggactgtatgagtttatcaccgcgctggacattgaagcgcagcttagggagaagcagttcctcttagagcaggcggaggagacagagtacaacggcgtgcgcaggaaccagaccagagcgcaggagtatggtcagatttataagatcgtgatggatctttttgacaaggtcacatcgctgctcggggaggagcagatgtcgatccgggagtacacagacatcctggacgcaggattttctgcggcaaaggtcggtatgattccgccgggaaatgaccgtgtgacagttggagatattgagcgcaccagattaaatcatatccgaattttgttctttgtgggagtcaatgacggtattgtgccgaaagccggcagcaccggaagcatcatctcacagttcgagcgcgagaagatggcggagcatcatctgatgttagcgccgggggcgcgggaaaaagtctttatccagaagttttacctgtatctgaacttaaccaagccgtcggacggattgtatgtcacctactcgagggtcagtccggagggaaaggcgctgcgccggtcttatctgatcggaacactctgcaatatgttcccggaactaaagatccgtgagccggaggaggagacggaggcgtccgcgattttaacgccggagagcgggatcgattatctgctggagggactctggacagaacaaaagtcacacacctgggaggcgcttgcaaagtggtatctctcggatgagacttatcatgcgaaggcgctgcgcctgcttgcggcatctttttaccgttacagcggagagccaatcggaaaagaggttgcgcgcgccttatacggcacggaactggagaacagtgtcacaaggctggagcagtttgcggagtgtgcgtttgcgcattacatgacctacggactgggactgtcgcagcgggaactgcaggagtttgccggcgtggatatgggaaatatctatcatgacgcactgtggcattttgcggagcgcatccgcaggtcttcgtatacctggtacgatctgcccgaacagacgcgtgagacgtggattgaggagagcatgaatgacgcgattgcgggctgcgcgaatgtgggcgcattcgacgaggcgaagaaccgctatctgctgtcgcgcatgaaagacacgatccggcgcacggtgtgggccctcacgatccaggtgcagaaggggcgttttacgccgagtgattttgaggtgtcgttttcgcaggccgatcatctggaggcaatccgttttcagctgaccgaggaggaaaagatgcgtctgcggggcaggattgaccgcgtggatacctgtgagacggacgataaggtgtatgtaaagatcattgattacaaatcgggcaacaccacattttccctgctgaacctgtatcacgggctgcagctgcagctggtggtttatatgaatgcggcgctggaactggaggcaaaaaagcatccgggaaaacaggcggtgcctgcgggaatgttttactatcacattgaggatcccatggtcgacggcagcggtacggagtcggaggaggagatccggcaggccgtgctggaggaattaaagccgaacgggctggtcaatgacgatcccgagatatacggagcgatggacacagaactttccgggagttcggcggtgattccggtggcgcttaaggcggacggttcgctaaaagcgacgtctaagacggcgagcacggaagagtttgggacaatgtcggactacgtgaaggagaccgtgacgaaggcgggcagaagaatcctgggcggagatgtggcggctgcgccgtatgaactcgacgggagaagcggctgcgactactgcccgtaccatatggtgtgcggatttgacgcgcggataccgggcttttcttaccggaagctggaaaagccggacggtgccgaggcgatccttgcgaaaatgagagagacgcagaacgaggagaagagacagtagatgggtgtttcatggaccagagaacaacaacaggtaatcgatttaagaaagcgcaatattctggtatcggcagctgccggttcgggtaagacagcggttttagtcgagcgcattatcaagatgatcacggagggagaacatccggtggacatcgaccggcttttagtggtgacgtttacgaatgcggctgcggcggaaatgcgggagcgcatcggggcggcgatcgagaaagcgctggaggagcatccggattcggagcatctgcagcgccagctgacgttaatccacaatgcacagatcacgaccatcgacagcttttgtctgtatgtgatccgcaatcatttccacgagattgacctggagccggattttcggatcggggacgagggagagttaaagctgttaaaagaagacgtgctgcgcggcgtgctggagagcaattacgaacagatgtcaccggagtttgcggcatttgcaaaagggtatgtgtcggggaagagcgatgcgaaggtggcggagatgatcctctcgctctacgagttctccatgagctatccgtggccgatggagtggcttacttccggcatccgtggctatgagatcccggatgtgcaaaagatggcggaggcgccgtggatgcagccgctcgtgctgcatctgcggtcggtgctggcggatctggtaaaaaagcttcgcatcgcgcatgtgcttacgctggaggaagacggaccggatgtctatgagaaggtgattgcgtcggatctcgcaaagtttgaggagctggcagcgtgtgaaaattttctggagctgtacgaaaagcttaccgccgtcacttatgacaggctgccgtcgagccgcggcttttcgggagatgcagggaagctttcgcgtgtgaaggaactccgcgaccaggtgaaggatacggtaaaaaagatcaacaggcagtatttctttgcatcgccggaagtcatgtgcgggcaggtgcgccgggcagagccgatggcgaaggaactggtgcgtcttgccatcgcattctccgaggcgtttgcagcggaaaagcgccgcaagaatctggtggattttcacgatctggagcatttcgcactggagattctcgtggatgcaaagacaaagcaggcgcgcgctgcggcggaggagttccgcgacatgtacgaggagatcatgatcgacgagtaccaggacagcaatcatgtgcaggagacgcttcttagggcgatctcaagagaggagcgcggagcgtacaacctgttcatggtgggggacgtcaagcagagtatctaccgcttccgtctggcgagaccggagctttttatggaaaaatacgacacctacacgctggaggaaagcagtacgcagcgcatcgatctgcacaggaatttccggagccggtcagaggtgcttgatctgacgaacgatgtgtgttaccggatcatggcgcgcgatctcggcaatgtggcatacgatgaggatgcggcgctctacgcgggcgcagattattgtgcgccggatgaggcagggatgtttgcaccggagattcttgtggcggacagtgccgaagaactcttagagggcagcgggtacgaagaccggaagctgtatgaggcgaagcttgtggcagagcgcatccggaagctgatgacagagcagaaggtgacggacaaggcgacgggggaactgcgcgccgtgcgttacagcgatattgtgattctgctccgcagcctaagcgggtatgccgattcgtttgccgccgtgttgaacgaggcgggaataccggcgcatacggtgtcagcaaccggctatttctcggcggtggaggtgcagacggtgcttgcgatgcttcggattcttgacaatccgagacaggatattccgcttgcggcagtgcttaagtctccgatcgccgggcttacggacgaggagctgggacggcttagggcgcacgaccgcagcgtgcctttctgtgagtgtgtgctcgcacgctgcagggaacttgcgcagagtgaagaacctttggcggaaggttatgagaaaaaactgtgggagttctggaagctgtatgagaggctgcgggcgcttgtgccggacaccccgattcacgagctgatcgagatcgtgttgaaggaaagcggctacggaaattatgcggcggcgatgccggcaggagccagacgcagggcgaatctgcgcatgctggtggagaaggcgatcgcctatgagaatacgagctacaagggattgtttcattttgtgcgctacatcgatgaactccagaaatacgatgtcgattttggcgaggcggacatggtcggggagaatgaggacgtcgtgcgcattatgagtatccacaagagcaagggactggaatttccggtggtctttgtgtgcggtctgggaagaaattttaacaagcaggataccagaagccgcatggtgctgcacccggaactgggaatcggaattgactggatcgacggcgagcgcaggatcaagacgccgaccatattaaagcgcgccatcgcaaagcagatcgaactggagaatctgggcgaggagctccgcgtgctctatgtggcgctcacacgcgcgaaggagaagctgatcttaacggggtgcagaaaagatgcagaaaatgatctggcggcgctaagggaagcggcacaggaggaacttttcccggaaacggagcatgttcctctgccgtatctgctccgggagagcgcggcaggctatttcgactggctgcttccggcggtgttttcctatcacggacgctatcaggtgcgcgttgtgccggcggaggaactgctcgacgcagagagccgtcacatggaggaggagacggagaatctggaacagtgtctgtcacgcattgcagcggcggatgcggcagacgtggcggaatttgacgggaagttttcattcacctatccgtacgagcgcgatctggagcgcaaaaacaaatattccgtgtcggaattaaagcatcgggcgatgcgggaaaagcttctggaggaggagacggatgttgtcccggcgtttttagagacggagggaaaatcctatgttccgccgtttgtccaaaaaaaaatggagcaggaagaaaccggcggacagaaccagggtgcactgcgcggaactgcggttcacagggtgatggagtgctaccagttttcggcggcggcaggagtcacggaacagattgaggcgatgcttgccggaggacagatcacggaggagatgaagcgcctggtaaaaccggctctcatcgagacgtttctcacatcggcggcgggagagcggatgaagcgtgcggagactgccggaacgctgtaccgggagaaaccgtttgtgatgggatttacgggcgaggagctcgcggcattcggattcggagacggagagaaatgtgcggatgacaaagagctgacgctgatccagggaattattgatgtgttctggattgaggaggacggcattgtggtgctggactataagacggaccgtgtgaaaaccggcaaggaactggcggaccgttatgcttcgcagttaaagctctacggcgaggcgctggagcggatctacaaccacggaagtgagaggacgctccgcgtgaaggagcggcttctctactcattccggctgggcgcagtgataccggtgtaagtgtaaacgggacacggaaaaggacgattgatttcagagataagaacatcagaaaggaagaaaatgagatgggacagatcatactggcatccgcctcaccgcggagaaaggaactgttagagcagatcgggatttcgtttgaaatctgcccggcaaaaggtgaggagcggatcacgaagagcgtaccgcacgaagtcgtggaggaactggcgtcacagaaggccgtcgaggtggcatccatggtgagaacctacgaggagacgcatcaggaactggtgacaccttcggatctcatggtgattggcgccgacacgattgtctcctgcgggggacagatattagggaagcccaaagacgagcatgatgcctgccgtatgcttaagcttctctccggtggaacacaccaggtatacaccggagtgtcgatcgtgcttttggatgcgtccggaaaggctggtcaggtgacgtttcatgagaaaaccgatgtcacgatgcgcgcgatgagcgaggaggagatccggcgctatgttgccaccggcgagccgatggacaaggcgggcgcatatggaattcagggaaaatgtgcgatttttgttgacaaaattgatggcgactataataatgttgtagggcttccggtagcagccatttactgggaattaaagaagcttggaattgatatctatttatggtaaaataaaacgttggcggaggaaaagatatgtacgatgaaatgtgcctggatacatttttggcgcagcaggagaagctgtttcgggaacctgtggcagaaagcagggaagaggcggaggaatttctttcggactgttttgcaacggtctgtaagaatctgaaagaagtgcgggcgtactttaaggaagagggcgcggatattgccggaatgagcagcgaggagctggcggagcaggcagaagtgttcgcactgccggacggaagatacctgatcgtggaagcttaagccgtctgctttgaagaacgcaggcagatacataacagaatggtagaatatatagaaagaatgagggaatgcaatgaagaattatgatgtgattattataggagccggtccttccggaattttttgcgcgtatgagctgattcatgcgaaaaaggatctgaaagtgttaatgattgagaagggaagacggattgagaaccgtgaatgtccgaagcgtaagaccaaggtatgcgtgggatgcaagccgtgttccatcacgaccggattcgccggtgcgggagctttctccgatggcaaactgtccttatcgccggatgtcggcggcaacctgccggagattttaggctacgataagaccgtggagctgttaaaggaatcggatgatatttatctgaaattcggtgcggattccaaggtgtacggtgtggataaagagaaggaaatccgcgagatccgtagaaaagcgatcatggcgaacttaaagctgatcgaatgcccgatccgtcatctcggcacggaggaaggctacaagatctattccagactgcaggagcacctgttagaggaaggggtcgagatggagtttggcaccatggtcaaggacatcatcatcgaggacaaccaggttaagggtatcattaccgacaaggatgagacatacacggcagcagaggtcatctccgccgtgggacgtgagggtgcagactggttctcccatatctgcaatcagcatgatattgagacgaaggtcggcactgtggacatcggtgtgcgtgtcgaggtgcgtgatgaggtgatggaatttttaaatgagaacctctacgaggcgaagttagtgtaccatacaccgacgtttgacgataaggtgcgtaccttctgcactaatccgtccggtgaggttgcaaccgaatactacgacaacggactggcggtggtcaacggacacgcctacaagtccagggatttaaagaccaacaataccaactttgccattctggtatcgaagaatttcacgaagccttttaagacgccgatcgaatacggcaagcagatcgcacagctctctaatatgctctgtgacggcaggattctggtgcagacattcggagactttaagcgtggcagaagaacgacggaggagcgcctgtgccgtaacaacctcatcccgaccttaaaggatgcggtaccaggagatctctcattggtattcccgcaccggatcatggtggatatcgaggagatgctgatggctctcgacaaggtaacgccgggtattgcaagtgatgagacattgctctacggtgtggaggtcaagttctactccaataaggtagtggtaaactctgacttcgagacgagtgtcaagggactccgtgcgatcggagacggcgcgtccgtgacgagaggactgcagcaggcatccgcgaacggaatttctgtggcgagaagtatcttgaaaaatatcatgtagatgttgagataaagggtgtttcacgatgagaaaaagatgggcgatgggaatgacagcgtgcgtatgcgcgctgtcaatggctcttacgggatgccagattggcaataaagatattgtggtctcgggaacgctaagcagcaggcaggtgtttacactggacaagtctgcatgcagcttaaaggaggcaaaggtatatctggcaaattatcagaatatctatggaacagcatatacgattgacctctggcagcatgactttggagacgcatccctgcttgactatgtgaaggacatcacgctggaggaacttacccgtgtatacacgatggatctgctggcacagtcgcaggaagtgacgctctcggaggatgagactgcgaaggtggcggaagcagcgaaggaatattatgcatccctctcggaggatgagaccgcctatatggatgtcgtcgaggcggatattgcggagtattatacgcactatgcgctggcgcagaagctgtatcattcgctgacgaacggtgtcaacgaggaggtcagcgacgatgaggcgcgcgtgatggaaatcatgcagatttatgtcacggacgaagaccgggcgcacgaggtggagcagaagctggcgcagggggatgattttgcctccgtcgccaacaattataacgaattgtcggcaattcaggtgacggtatcgagggatgatctgcccgacgaggtggaggaggtggcatttcagctggacgacaatgccgtctccggaatgatcgctgccggaaatggatactattttatcaagtgcctgaataaatataatgaagagctgacggaagcgaataagtccaacattgtggaaaaacgtgaaaaagaagcatttgacgatgtctacaatgaatttgtagcatcgttatcctcgaggctgaacacggatctgtgggatggaattgagcttaccacggatggcagtattcagacgaacagcttttttgcggtatttgagaagtattgcggtgagatctgagatacagtatgaaatgaggtagattctatgacgaaagatatgacaagcggttcaccgatgaagctcattttaggattttcggtgccgctgttgtttggatttttgtttcagcagttttacaatctggtggataccctgattgtcggaagatttctgggcgtggatgcacttgcggcagtgggatcgaccggttcgctgaactttctgattattggattctgcatgggagtgtgcaacggttttgccattcctctggcgcaccggtttggagccggcgattataaggcaatgcgtgcgtttatgatgaatgccgtctatctggcggtgatctttgcggcggtcatgacagtgtttacggtggcattctgccggccgatcttacagctgatgcagacgccggagaatattattgatgatgcctacacctacattgtcattatttttgcgggaattccggcaacctatctgtacaatctggtgtccggcgtgataaggtcgatgggcgacagcaagacgcctctgattttcctggcgctggcagcatttgtgaatatcggactggatttgcttttaatcattgtatttccgatgggagttgccggagcggcgcttgcaaccgtgatctcgcaggcattttccggtatcgcgtgcgtcatctacagcaagagaaggtttgagatcctgcacaccgatgaggaagagcggaaagtgaataagggctacatgaaaaccctctgcggcatgggtgtgccgatgggattacagtattcgatcactgcgatcggcagcgtaatcctacagagcgcagtcaacacgctcggatcgaatgccgtggcatccatgacggcgggaagcaagatcggtatgttcttctgctgcccgtatgatgcgctcggttccacaatggcaacctacggcggacagaacgtgggagcgaagaagttagaccgcttgagcggcggattaaaagcggcgggaattctgggaatcggatattcgatcctggcgttcgtggtgctgtggctttgcggcaatcagcttgccatgtttttcgtggagagtgcacaggcggaggtcattgcaaatgtaaggctgtttctggtatgcaacagtgccttctacattccgttggctttcgtgaatattgtacgctttttgattcagggtatgggatacagcaagtttgcaattctggcaggcgtctttgagatggcggcgcgtactttggtcggatttgtgtttgttccgatgttcggctatccggcagcgtgctttgcaagcccggtcgcatggatttttgctgactgtttcctgttcccggcatatttccatgtgttgaagaagacgaagaaaatgttgagcgagcctgtccgcacgagcgtggcatagcaagcaggcatggtaccggctgagtgtggcatggcatcggctgatgcatagcagttatgagaagaatggagtatttatggcagagattttaaaggcaattatatttggtatcgtggagggaattacggagtggctgccgatcagcagcaccggacacatgattctattaaacgagtttctgacactggatgtgagcgcagagttttgggatatgtttctggtagtgatccagctgggagcgattttggcggtcgtggtgctgttctggaatctgatctggccgtttgcgcgcagttcctcggaagcagtcgttgctgcgggtcagaatgagaagagcggttctcttgcaaagagagaatactgggtgttaggtcccgtcacggtgcgcatgccggtcattatcaactggtgcaagatcgtggtgtcctgcctgccggcaatcgtatttgttgtgctggggctggatgagacctgcgacagactgttttacaatccggtgtgtgtggcggtggcactgattgtgttcggtgttgcctttattctggtggagaatcacaatgcagcaaagcaggcgcccgtggagcagatgcgggacattacgtttcagatggcgattctgatcggtttgttccagctgctcgcggctgcgttcccgggaacgtcgcgctccggtgcaacgattatcggtgcgctcttaatcggtgtgtcaaggaaggctgcgagtgagtttacgttcattctggcgattccggtgatgctcggtgcaagcctgctaaaattgatggacttcggacttcatctgaccgggacggagtgggcggttctgctttccggtatggtcagcgcgtttctggtgtcggttgtcgtcatcaagttcctgctcggatatatcagaaagcatgactttaaagtgtttggctggtaccgcattgggctcggcgtggtggtgcttttgtacttttttctgctgaaatagaggtgacggatgagtattttaaatgtagaacacttgacgcatggattcggtgaccgtgcgattctggacgatgtgtccttccgcctgttaaagggggagcatatcggtcttgtcggagcgaacggcgagggaaagtcgacgtttctgaatatcgttacgggaaagctgatgccggacgagggaaaagtggagtgggcgaaaaatgtgcgggtcggttacctcgaccagcactcgacactcaccgcggaaatgacgattgagagtgtcttaaagtcagcattttcgtggctgtttgcgttggaagagaagatgaatcggatctgtgatgcgctcggcgaggcagacgagtcgcagatggatgccatgatggaagaactcggcgtgatacaggacaccctgacgatgcatgatttttacacgatcgacgcaaaggtggaggaggttgccagagcgctcggactcttagaactcgggctgcaccatgatgtgaccgatttaagcggtgggcagcgcatgaaggtgctgctggcaaagcttcttctggagaagccggacattcttctgctggacgagccgacgaactatctggacgcggagcatatcgcgtggctgacacgctatctgcaggagtacgagaatgcgtttatcctgatctcgcacgacattccgtttttgaacgatgttgtcaatatcatctaccacatggagaaccagcacctcgaccgctatgtcggcaactacgacaagtttgaggaagtctacgcggtaaaaaaggcacagcttgaggcggcataccgcaaacagcagcaggagatcagtgaattaaaagatttcgtggcgcgcaataaggcgcgcgtatccacccgcaacatggcgatgtcgcggcagaaaaagctggacaagatggacgtcatcgagcttgcggcggagcgcccgaagccggagttttccttcccggtgggacgcacgcccggcagatatatttttgagacgaaggatctggtgatcggctatgaggagccgctctcgaagccgctttcgatcgcactggaacgcggacataaggtggcgctgatcggtgcaaacggaatcggcaagacaacacttttaaagagtctactaggtctgattcccgcgcttggcggcggtgtcgagcagggcgagaacctcatggtcggctactttgagcaggagatcaagggggagaacaagcgcacctgcattgaggagatctgggaggagttcccggcattttcccagtatgaggtgcgtgcggcgcttgcaagatgcggtctgaccacaaagcatatcgagagccaggtgagagtcttaagcggtggcgagcaggcgaaggtgcggctgtgtaaactgatgaaccgagagaccaacgttctgcttttagacgagccgaccaaccatctggatgtggacgcgaaggaagaattaaagcgtgcgctgaaggagtaccgcggaacggttttgttaatctgccatgagccggagttttaccaggatatcgtgggagaggtctgggactgctcgaagtggacgacgaagattctctgataagagaccggcagaatgacatgagggggaacgaaatgaagcccgattattatgatgagtttcaatgcatcgcggatgcgtgcagtctgacatgctgtcaggaatggaagattgcggtggaccgtaagacggctgccgcatggaaaaaaacagaaacgccggaaggggtccgtccgaaaagacggaccttatctgattatacaaaaaaatgcggggatggacgaatcattacgcttgatgaaaaaatgcgctgtccgtttctggatgagagaaagctctgccggctggttttaacctacggggatgcggttttgtcggagacctgtacgctgtttccgcgcgagaaacatgaggtggcggcggggatcacggaatattctctgatgccctgctgtccggcggtcgtggatctgctttggggacgggagtgcatccgattttcggatgaggcagacagtgcctcctacggcgcatatgaagcggtgtatggggtgagaaaacgtttcctcacaatcatgtcagaccgtgcgtaccggccggcacagagtctttgcatgctgttttacatggcgcttgatctgtgcgacgcgggaacttcatggaaggcggaagtctctaagtacggggatgcgccttttagaaaagaacttgccgatgcggtggagcatgccggggtggattgccgggcggcatttgtggagcgcaatgagctgtttctggatctggcggaaaactaccggaaggaagggctgtaccgtgcttttttaacaccggcggcagaggaagcggaacagatcgcggaagattacgggaagatccgtaaggaagatctcgatgcatttgcgcaggcattttctccatatgaggcactgatgcggtgctatctgcagtcagagattttttcggagtgtctgggggagccggacgacgtcgagtatgtgacggtaaagctgcagtggattgcattagagtatgcagccatccggcatgcggcttttctgtgctggcacagggaaggcgcactttcctatgagaccatgcgcagctgtatggtaattctgtcgcgcatgctgggatatgaagacgaggatatctgggaatacctggagaacagttttgaacggctgatctgggactggggatattttgccctcgttgtctcgtaaaatgagatgatgctccttcagataggagacagatgctgcaagatcctcatagctgcgcacttcaattaacagtgtgaaaattgtgtgaaagagaagaaatttccagatagaaaaagcaggacggggcgcgaaattcacccgcatagagtgaatttcgcgccccgtcctgctgtctgtgagaagacgaattgatttatttggcaagaagcatcatgatcttgttgctgcgctccacgaacttgctcatggcatcgacggacaacggctggttggacagcattgccaggtcatagagctgctcgcagaacatcggaacgttctcggaatccttgtgctcgaaaatgtatttgaccagtgcatggttcgcgtttaaggttaaggtctggtctgcggcgaacatattcgggtccataccgccca

SEQ ID NO: 11585 - DNA, 3139 bp, Unknown
  gut microbiota DNA sequence
ggaagcaagattctcattctttaacttctccaccttgacggtcagcttgtcgttgccaagtgcctttttaaacaggtcggtcagtgtgtcggtctcttcctttaaatcagcggcatcgtctgcatcctttaaggagtctgtgacatccgcatcgattcgcatgaatttataatgctcgttgcgctgctctaactgggagatgaaggaggtatcgatgttgtggtctaagatcacagcgtccattccctgctccttgaagagcttgatgtactgtccctgttgtaccttgtcggtcacgtagtagatgaccttgcgctcgtccttttcctcttcggaatcgtcctttgcatcagcatcctctgtgacggaattgccgtccttgtcaacaacatcggaagcagcatcggcgtcttcctttttctcctcttcttttacgagaagctccggaagggtaaggtacttgtcatccagattcttaaagaggatatagtcgttcatcttgtcgcagaacttggtgtcttttaagcagccgtatttgatgaacggactgatgtcatcccagtatttctcgtaggattccttgtctgtcttgcacatgccgatcagcttgtcagccactttcttcgtgatgtattcctcaatcttcttgacgaatccgtcattctgcagagcggagcgggagacattgagcggaagatccggacaatcgatcacaccctttaagagcatcagaaattccggaatgacttccttgatattgtcggcgataaatacctggttgttgtataatttgatggttccctcgatggaatcgtactctgtattgatcttcgggaagtaaaggataccctttaagttgaacggataatccatattcaagtgaatccagaacagcggctccttgtaatctaagaataccttgcggtagaacgccttgtattcctcgtcggtgcagtcgttcgggttcttaagccacagcgggttagtgtcgttgagcggaaccgggcgttttaaaatctttaacttatccttggcaggggagatctcgacagtctccttctcaccgttctcgttctctttttcctcggtctttgcctcctcgtgaatctcctccacgaccgtatcggtatcgcgcttgtcagcagcgtcgatggtctcgtattccggctcggcatttgccttgctaaggtagatctcggtcggcatgaaagagcagtatttctcgatcacttcgcgtgcacggtactcgtttgcaaattcgagacagtcctcgttcagatgaagcgtgatctgtgtaccgatcgttgtcttggtgccgtcggtcagttcgtaatcggtaccgccgtcgcaggtccagtgtaccggtgtggcgccttccttataagataaggtatcgatctcaacctcgtccgctaccatgaaagcggagtagaagcccagtccgaaatgtccgatgatctgatcgtccgtggacttgtccttgtacttctgaatgaaatcggtcgcaccggaaaatgcgatctggcagatgtattcctcgacttcgtctgccgtcataccaagaccgttatcggtaaatgtcagggtcttagcctcagggtctacggtgacgctgatctttgccttgaaatcagctgggagcgtgtactcgcccatcatgtctaacttttttaatttggtaatggcatcacagccgttgctgatcaactcacgatagaaaatgtcgtggtcggaatacagccatttcttgataatcggaaacaggttatcgctgtcaattgaaagacttccatgtttgtttgccataataaaacactcctttatctaaaaataaaatatgtacggtagaacggaagacgacagtaacatcgtcattcccttttaaataagagtttatatccgtcattccaaaaagtcaatacaaaatcagcactcttttcacatgagtgctaacaacattcccggaaggctgaaaaacagggaaacagcggaattattaaaagtttataaagtgaggggatggtttcttgaaaaaaaatattttttgcatgcgagatttgaaaaacgcctcatatatgagtatactgttggtagaaagcgatggatgagaagtgaggttgcgtctatgatactgttgagagcaaatacggaattgcaccagacatttgaacgcctgattgaggcgatgaaagttccggtcaaatggaacggcatatttgtagtgattgacaattacatgattttacagggggaggtgcgttccctgtttttccattttgacacgcgcaatgtggcgacgaacatcatcgacataccggtaaaagaggacgagatcggtgaggtcggcacgaacatgcgggtgcagaatgccatcaacctgattttatatgcattcggaaaatgggggacgatcaagggcgtccgcgtagacaaaagttttgaacagttaaatacgctgtttacggacattatgaaggagatgcaggtcgaaccggagtacacgccgtcctatctgcgtttctaccggagcggaatgcggatcacctatgaggatgttatccagacggcgcaggaagaggagcaggcacagccggaggatgaggaaacgaacgagggcggactctggcacaaggtcgtctggaaacgcgctcaggcggagttcgcccgggcggacatcacggtgagcgagcggagaaagagccggatcgggaataatttttacctcgtggggtatctctgcccggcatgctgcggcaagctgcatatggcggtctatccggctggaaaggaatttaagatcgagacggaggagggcggcgtgctgctggcgagagccgcgacctgcaatgcctgcaggcggttttacacgccgcgtcccggcagattgttctcggagggcgatatttacacgctggattttgcgacggacgacgcggcgtatgacgattatctggagcttttggggagaaatgccgaccgggtgtccaactatcacacgaatgtctatgccgacggaagacgaccggatatggaggaggacggggaggaatccctggaggatctctgcaacgcactgccggaattgtcggatcttgaggtgaaaaagctgtccgcgcggatggaggagggcttttatccg

SEQ ID NO: 11586 - DNA, 9479 bp, Unknown
  gut microbiota DNA sequence
cagccgggagagagagcggcacgacgagggacgctctttgccgcagcgggaacaggcagcggaagaaccggataagcagtctggaacgcggacaccgaaagagacggcgaagcagtcagcggggcggaaggagacagacagcgtagggagtggacgaccggcagaccgcggacgcggtatggctgcagagacggaaacgcgcagagcagaccacagagcggcggaggcagaaatgcatggagcagaccgcagagcggcggaggcaggaagcagcctgcgtccggacgcggatggagcgggcaggcccgccgctaaggagcggacaggcggaaaagacatccatgcggcaacgcagacgccggagggaggaatgaccgtggacggcgtcattgtcacaccggaagaacggaaaggcgtgcaggagcactatgaggcgcgtctggcggtcatggaccgctattccgaccggcagctgcaggagttaaagcggcagctggaaggagagcgcaagctgacggaggacgagaagaagccatatataaagaagatacaggaccggatttatgaggggcgtgtccgggaacttcaggaaaaagcggatgcctgtgaggggaagaactacacgctgaccaaacgggtattggaggaagtggaagctgcggatcttccggaagaacagaagcatccgctgcgggagaagctgcagcagctcaaacagagccaggcggagcgcgaagtggcggcgatggtggcaaagatgccggcgaatctcgaccggaagcagtaccggctctatgtcgaccggctgcacgattacgacggagtggatctgacaccatacgaacagaagattgtggcggggagagaggcagcggagaagcaggaactttccaacatgatccggcgcgcgagaaaagtgagcagggaggactacgtggatcttgcagagcggcttagggagggagattttcttccggggcttgtggcaccctatctggagaaggtcaacgaccggatcagggagctggatgcggatgccatcgcagcaatctgtccggcaccgatgcagatgaattttgaggagggcatagaggcataccagaagatcaaggagggagattttctcccggagcttaagacggatgcgcttaagacgctcgaaaagcggctctccaaaatcaaggcggacgagtgtgagcttctggtgggaaagctgaaaaaagaactggaggagaacggtgtcggggagaatccgagacatcatttttatccggcgaggaaagtgctgcttgggcaggcgacgccggaggagacggatgtgatcgaatatgccatggcgtcctatgcggccggcagaggtctgtttgagtacccgattctggtggtggatgtggcgcgcgatgcgtctggaaaagaggggatgattttaacgccggagcatctttactacagcacggcatttacctcctacggaatcccggtcgcctcgattgcgtctgtcacggcgtctacgggactgctcaataagggactttacgtgcaccagaagaacggaaccaaattaaagatcccttatgcggttggcacgaaggagctgccggactatgccggggaactcgatgattttattcattatctgcaggagaagccggagtccagaaagcttacctatctggcgagcgagaagcacgatacaatctgctgcttccgctgcggctaccagtataagggcggcggcgtctgcccgaagtgcggctatcagaataacggctgattctgtcatgggacagggcggtttccgatatacatagataacaagagaacagacaggatcttgttatgcagcagaattgtaaaaagggcctgtgccttgcgtttttattttccgcgatgtttttaaccgggtgggagatcgccgggatgcggagcagacagacaaaagagacggcggcggtcgcgtacgaggcgggcaactgggggctcggctttggcgcggagggaacccagcccaccggcaatgcaacctctgcggagttggcgcagtacgatgcacactatgtcggggatccgtccgggaaggtgctctatctgaccttcgactgcggatacgagaacgggaatacagagccgattctcgatgcattaaaaaagcaccaggcgcctgccactttctttgtggtgggacattttctggagagcgcgccggagattgccaagcggatggtggcggagggacatacggtggggaaccatacctatcatcatcctgatatgtcgtcgatcgcggatcttaccgcgttccagaaagagatggacgacaacgccgcgcttttttccgaggtgaccgggcagaagatggcgaactattacagaccgccgcagggaaaatacagcacgaagaatctcgagatggcaaaacagctcggctatcacacttttttctggagtcttgcctatgtggactggaatgtcgatgcacagccgacgaaggaggaggcgtttgaaaagctgctgggaagaattcatccgggggcgattgtgctgctgcacagcacctcgaagacgaacggggagattctggatgaactgctgaccaaatgggaggaaatgggatacacgtttcatcccctgtcggagctctgcgaaaaataaaagcgaaaagaattgtttcgttggaaaaacaacagaaaaatctccggagatttcatacaatgcgtaggtaatcaatcaggaaatcaaaggagagatcaatatggaacataaaatgttttgttttcagtgtgagcagacagcgggatgcagcggctgcaccgggaatgcaggcgtctgtggaaaaagcagtgcgacggcagcgctgcaggatgaactgaccggcgcgttgatcgggcttgcaaaggcgtgcggcaacaatccacacaccgaggacaccacacatattttaatagaaggattattcacaacgatcacgaatgtcaactttaatgatgagacactgcgtgagatgatcgcaaaggttcatgcggagaaggaacgcgtggttccgaactgtgccacctgcgcatcgccgtgcggcaatacctcggattacgacatgaaggagatctgggaggcggatgaggatatccgttccctgaagtctttgattttatttggcatccggggcatggctgcctacgcttatcatgcggcggtgctcggctatgaggatgagacggtcaatgcatttttctataaggcgctttcgttcctgggctttgatctggagatgggagacctgcttccggtggttctggaagtcggcgaggtgaatttaaagtgtatggagcttttagaccgcgccaacacagagacattcggcaatccgaagccgacaaaggtgccgcttaccgtggagaagggaccgtttatcatcatcaccggtcacgatctctacgatttaaaactgcttttggagcagacgaaggataagggaatcaatgtctatacgcacggtgagatgcttccggcacatgcgtatccgctgttaaagcagtatccgcatttaaagggaaactttggaacggcatggcagaatcagcagaaggagttcgacggggttccggcgccgattctgtatacaacgaactgcttgatgccggtgaaggagagctaccgtgaccgtgtattcacaacagaggtggtttcttatccgcagatggtgcatatcggtgcggacaaggactttacgccggtgatcgagaaagcgttagagctcggcggttacaaggaagatacggagttcaccggcatcaacggcggcaaagaggtgatgaccggatttgcacacggcacggtgctctccgttgcggatcaggtggtggatgcggtaaagagcggcgcaatccgtcatttcttcctggtgggcggctgtgacggtgccagaccgggacgcaattactataccgaatttgtaaaacagaccccgaaggacagtgtgatcttaacgcttgcatgcggaaaataccgctttaacgatctggatctcggggagatcagtggtctgccgcgcctgatggatatgggacagtgcaatgatgcgtacagcgcgatcaaggttgcggtggcgcttgccgaggcgtttggctgctcggtcaatgaactgccgttatccatggtattgtcctggtatgagcagaaggcggtctgtatccttttgacgctgctgcatctgggcatccagaacatcaagctgggaccgacacttccggcgtttatctccccgaatgtgttagcatatctggtggagcattaccatattgcaccgatcacgacaccagaggcagacttaaaggagattctcggagcgtaagggaacgggaaaatttcattctaatcgaagaaggcaggtacaaaaaagcagtttgtacttgtcttttttgttacggtatctaaaaaacacggacgggcgctagacgcctagcacccgcatggtattttccttgatcttttccgtcactttcgcatagcagatgagctcttcctcgctcaatccggcaaagcgcgccgcatcaaaatcgttttgtgcggtggcgagctccgggaggagcgcggtcgctgccggaagcagatccacgtgcaggtattttctggtactgatgacgcggatataatctttggcggaaagcttttgcaaggtgcgcgagagcgagcttttggataatccggcaaaatcggcaagttccgtgcggctgcaaaatgtatgcatctggcttaaggacagcaggagggacagctcgccaagcgtcagatcattgcgcagggcgatcgcctccagacagcggtccaaaagcttgcggctccggtagaactccgataggataccctctccggagatcgcggaaggacagaccgggatgcgctctgtgccgagcttttttgcacccggcagaagcgtcggcggcacagtgccgtcactggcggcatccaggaaaaagcggtagacggacagccgctttttttcgtatgctttttcgtcgtagacattcttataaaattcattgtaatattcaaagaccatgaatttcatcttgacggtctttgtgatgcttaatccctgacttgcaagggaaccttttgtcttgacataatagtagaccggcgcctgcagggcgtagaagacgttggcatgtaaaatatattccagattaaacaaaaagtcctcacaccagttcaccgagacatccatgcgcagatgatatttttccacaagatcacgccggtacagcttgttccagagaacgccataataaaaatcagcgggattctccatcatatgcgcagcaaactcttcgcgtgtgaggacaccgtcatcctcaatatcgcccttgtgcgagacacgctctccgacgacgcggtagaaatcggcgatcaccagatcgcagtcatgttctgtggcggcgcgcacgaacagctttgtcgcatccggtgtgatccagtcatcgctgtcgagaaactgcaggtaagtgccgcgagcctggctgatggcgagattacggctgtccgatacgccggtattttctttgtggatgactgtaatgcgggcatctgcggcggcgtaagcatcgcagatgtcaccggagccgtctgtgcttccgtcgtcgactaagaacagttcgtagtcggtatattcctgatgcagaatgctgtcaatgcagcgctgcagataattttttgcattgtagacaggtacgataatgcttactgtagggttcatgaaaagagacctcccgaaaagatactccttttatcttacctttgattttttaaatttgcaatggcaagatggacatatctgaccgatatataaagtaaagagagcagacctgccgaaacggatttcggcaggcggaaacggcgaaaggggagatttgtatgagtttgataccggattatgcaaatgcagtgggaagtgccatgtcctataaccgtaaggcggcagacacaaaaggaaaagaaaagacggatggaaacgcatcgtcagagaagactgtgaaagccaataaggcggacaagacagacaggacaggaaaaaccggaacggtgactggaagaacgatcggcaatccgaaactcagcgaaaaagcggcaaagtattatgaagaactgaaaagaaaatattccaatatggactttattctggtcagcgaggatcagaaggagaaggcaaggacgcaggcgggaagctatgccaatgcatcgaagatggtagttctcatcgacgaggacaagattgagcgcatggcggaggatgaaaattaccgcagacagtacgaggcgatcattgcgaatgcgggaagcggcattgcacagatgaaaagttcgctggaggcttccggcacaaaagtaaaaggctacggcatgcaggtgaatgatggcggcaccgccacctattttgccgtgctgcagaagtcttccgacgcgcagaaggagcggattgagaaaaagcgcgagaaggcggcggaagaaaagaaggcggaggcgaaacgggcgcagaaagaagcgcaggagaagcggatcagggacggaaaaaatcaaagagatgaacatgcaacagagcgtgtgaataagacagatgaggcgtctgagtcagactgggaaaatacggtgacgatcacggcgtcaagtatcggggagctgttaaaaaagatcagcgattaccagcagaatgagcggatgaatacggtgcagacgacagaggaacgcttggtcggtggacacatcgattataaaggctgaccggatgccgggagaatgaaaacaaagagaaagagatacgacaatgaaagacggacagaagcaatatcggattcttaggattgacgagcctgattttggctgtgaaggacgtgatgacggggaagcggcgtatgatgagatcacgctggtaaacgaacagggagaaacctgcctggtgcgcatggaggagcagcaggtgtggagcatgggactggatgagggaatgcttgcctgggtcggaaaagacggacagatccggggacgctgtaagaggatggacatcagccgctggtcggaaaaatatcaggtgcgcgcactgacagagcaggatgtgggagccatttatgaactctcccggaagaacaatctgtattatgaatattgtcccccgtatgtgacaagagacagtatcctgtcagatcttgtggcacttccgcccggaaaactccccgatgataagtattacgtgggatttttccggggagagacactgcttgcacagatggatctcattgccgattacccggagcgggcgatggcgtatatcggactttttatgatggaggcttctgttcagcaggcggggatcggcaccagaattgtggaggatctgtgtcgtcatctggcagaggaaggaatccgcaccgtgcgactctgctgggtgaagggcaacccgcaggcagagcatttctggagaaaaaatcagttcgcgccgatcagagaaacacagagcatgtcgggacaaacggtggttctggcagaacggaggttgaaataaacgtctttatgtgataaaatgtagttgcgtaaccggttgcgcaactacattttttgcaggagaagaagtgatgaaaacgtgtgggaacaggaattacagaaaatggctggcacttatggtcagcggcggtcttgccgtaacggcgcttgcaggctgcggcgggagcgatggaggaacagagcagagcgcgcagatagaggtctcggaggggattaagacggcggcagaagataataaggtgacgacgtttgcactgccggatggatcggaggagtcggagatctatgtggagccgatcgccgatctgccggatgattttatccggggaatggatgcgtccgcggtactttcactggagaacagcggcgtgacgtattacaattatgaaggaaaagagcaggatgtctttgagacgctggcacagtccggcgtaaattatatccgcctccgcgtgtggaatgatccgtatgacgcggatggaaacgggtacggcggcggcaacaatgacgttgcgacggcggtcgcccttggaaaacgggcgacggcgtacggcatgaaggtgtgcgtggatttccattactcggatttctgggcggacccgaagagacagcatgcaccgaaagcctgggagggcatgagcgcgttggaaaagagcgaggcactctatgattttacgaaggaaagccttgccgagcttttagacgcgggtgtcgatgtcggaatggtgcaggtcggcaacgagatcaacaacggcatggcaggcgaggaggatgtcgatacggtcatggatctgattgcatcgggaagccgtgcggtgcgtgagattgcaaaggattacggaaaagacatcaaggttgccgttcattataccaatattgaggattacgaggaagtggataccatggctgccaatctgcagaatgccggcgtggattacgatctgttcggtctgtcctattatccttactgggatggaacgatggaaaatatgcaggcagttgcggaaaatattgagaacacctacggaaaagatgtctatatcgcagaaacatcctactgctatacgacagaggacggcgacggctttgcaaacagttttgccggcacggaggatctggtggacggatatgcggcgacggtgcagagccaggcgacgatgatccgcgacatctgtgcagcggcggacgaggcgggagcgctcggtgtcttttactgggaaggcacctggattccggtcggagatgccgatgcggataacacagccctctgggaaaaatacggaagcggctgggcgagcagctattcggcggactatgatccggaggatgccggtctgtattatggaggctgttcctgggacaatcaggcgatgtttgattttacgggacatccgcttgcctcattaaatgcattcaaatatttgaaatatggtgcgacggcgccgcttgccgtagattttattccggaggttgcggtaacctgcgatgtgggcggtgaggtgacgctgccggatacggttgaggtggtatacaatgaccgcgcggcaaacacacaggaggacgtgacctgggatgcagagcagcttgctgcgatcgatacgagcaaagcgggaagctacgaggtggcgggaacgcttgcggacggtacggcaatgacggcacaggttgaagtggagatggtgaattacgtcttaaatccgagctttgaggatgaggacacttcgatgtggaaggtttcctacgagggagagaataatccgaccgatttccagaacaaggcggatgatgcctacaccggagatatcgcgttccatttctggtcgggagattcggatatgtatttttccatcgagcaggaatttacggatcttgcgcctggaacctatcagctctcggcgtacgcgcagggcggagatatgtcagcggac

SEQ ID NO: 11587 - DNA, 6327 bp, Unknown
  gut microbiota DNA sequence
gcaacttaacatattgttttgtttttatttaaatatttttattttcgtccttaatagttgacacttttctataacaattttataataagaaactaataaagaacaccttaactagttccgtttttacaggaggatactcaggaaatgattcatattacttccttagacgatggtctggagacatttaaggctctcgggtctgacacacgtatccagattcttaatattttacttgaaaaagagcagatgagcatgaaccagctcgcgacagagctaaacatcagcaacggcgctctcaccggtcacatcaagaagctcgaggagtgcggtctgatcaatatttccaatgaatctgccggacacggcaatcagaaaatgtgttccgtgacgcaggaccgcatcattgtggacatcaagaaaccgattgattataagaatgtattcgagactaagatcaaggtcggacagttttccagacatcaggtgtggccgacctgcggcatcgccaccagcgaatccgtgatcggcgagctcgacgatatccggtacttcaatcatccggatcgttttaccgccaacattctctggttcaccaaggggtatgtcgaatataccataccgaatctgatcccgtccaaccaacggatcacgcagctttccatctcggcagagctgagttcggaggctcccggcatcgacaacaactggccgtcggatatcagtttttacatcaacgacaccaaaatcggcatgtggacgtcccctggcgacttcggcgatgtgcacggtatgttcaccccgcagtggtggccgcagaactggaatcagtacggtctgttaaagctgttagtcatcaatgattacggcacctacatcgacggtcttaagatctccgatgtcagcacgctctcgcttcacctggactacagcagcgacatccgcctgcgtctcgcggtcgagaatgactccgagcatgtcggcggtatcacgctctacggaaaatctttcggaaactacgatcaggacatccgtgtcgccatcaattatgcgccgcttgtcgctgcgcagccgtagcggagagatttcttccggacagttgtatagatagacattagctctgaaacggttgtgggtgcagctgcgggaggtattctttaaagtaaaatgcgagtatttcttccgtgccgcgtccggcatcaaattccgtgtctttgccactctttgacaatccacaggtgtgtccgacaacccgcagacaatgaacggactttttagtggcgctaatgccacttcttcacagacaatataaaaccgcgcgaaccgaaactcgttggcatctgctattgaaaataaggcagatgccaattcaaacatcggcttcgcgcggttatgttttgttcatcagtggcaataagcgccacacaaaagtcctaaaattgtctgctggcttgcggacacatcctgcggagtgttcaaagcttggaaagacacagatcatcaaggatgccggacgcggcactaccacttcttcttcgggcaccgtgacacggctgccactgcgcgcagctccacatagcagccgcacgccatgcaggttccggcattcagcttctcacaatcctgacagaccgcaagtctgctctcgtagacttcctctgtaacccggtccgccgctttgatcgcagcgcggtatttttcaatcatttccatactgtcccccgcctcgatcatatcccgaagcagacagcgcgtacacactctcgtctccatatctcatgcccacatttctgaatttttaccggcaatcctactcgtcgaacccgaacaccggtcggccgtcctgccatctgatcttcataagcattgcatgacggttcggattgtacagcgggttgcccacaatctccgtctccgttctcgcatggtagaccataatgtcatctcccgcctcatccttcgtgaaggaattatgtcccgggccgtagattcccgctttttcactggatgtaagtaccggatagcgctcttttttccaggagagcggatctaacagatctgcgtctgcatccgccgtcatcatacccatgcagtaatgcacgccggtatcgctggcggaatacgtcataaatactttgccgtccttctgaatgaccgccggtccctcatttacccagaagccgtggcgctcccagtcgtaatccggcgttgtcagaagaacctgcacggaatccagcgtgtagccgttcttcattctggcgatgtaaagattggatatctgcctgccgactcccactttttccgcccagatgtaataccagcttccttttacctcgaagacagtcgcatccagggaaaacgcctcgaaggaaaattcatctccatccgcgcgggtcatcttgcctttttccacccacggatcatgtaccgggtcatctccctggcattccagcacatacgggcggatcgcccagatgtcgtccttatcgccgccggcatagtagagataccattttccaaagagataatgcagttccggcgcccagatatggatgctctgcggtccgctctcgtgcttgtgccacacctcatgttcttcggcatccgccagatccgcaagatgcgcggcacggcgtagaacaatcctgtcgtattccggcaccgatgcggtaaaatagtaggttccgtccgtgtgacagtacacataaggatctgctctctgcagaatccacggctcattatatttcaactgtttctccatctttttctccttataaagatccggctgagcccttgccggacgctttgctttttattctgttttattccgcgatatattttacgccccagacactctggtttccgcccacggcagaaaatgtcatcacatcggtgcctgcctcgtctttcatctggcagaacacgccgctgtagtcctccccgtcaatcgtaatgtgcatatagtatgttccgtcaacagcttcccaggttccctctgcctctcttccgacgactgtaccgtcagcattcaggtacagaatcaccgggttggcaatgtcattgctgatattggttccctggttgatcacaaaatatcttccgaccactgcatccgtctcataaccggtatcgctcaccgtctctccctgtgtctgatacggcagttcgcacggccatccgtcttcgttcatcagcatctgatgcacgcgcggcgaatgattttccgtgccgttgttaaaacgggtatggtagaccagatactgtctgccgtcctcatcgatgaacgcagagttatgtccggtcgccatgtacgcacgctctaaagacggaagcttataattgccggtcagcttcagaccgtaaagctgatgatccacatccgcggtcgggtatttcccgttcatgtccacataatcgccgtccacggtcttggaacggaacacgcgcacctgataaccgccgctgctcgtgagcgtaccataggaaacatacagataatagtatccggtcgtctcgtcatagagaatgtacggcgcttcgatggatttatgtccaccgccgagcagctttttcccgtaatacgcatccacattatgttcttcgtctgcctccggatgaatcacctgaccggtcgcgggatccagctccagcaggaaaataccgccgctccaggaaccatagaccatccacatgcggtcatccgcgtcataaaataccgtcgggtcgatcgcattcggatattcctcgaagttataactgttgtttctcacataattttttaacgcatattcctcgtcgacataatccagcacatcggttcctgcgattgtgtccttgtcaaaaccggaatagatgagcgctccctgccactcgtaaggtccctcgatcgtctcggatgtcccgtagcacaggttcgatgcattccaggtggatgttgtgcaatagtacatgtaatacagtccggtcgtcttgttatagattacatccggtgcccagacatgtgttttcttatcatctgtctgaatcaggctgttcttgctgccggcgtaggcaaacgcctcgtctgccacaccatagatctgaccgtagaccggattcgtcttgttgtatccgtccgcaatggactcccagtgcagcagatcatcactttttgctgccgacatatgagaaccgaagatataataagttccatcttcctcatagattgacggatcatgtaccgccaccccggaggaaacgtccccggtctgaatcccgtcgtagctcaccgtaaaattataatcggtattctccggcgtctcagactccgtcacattctctgccgcctctgtcgttccgcaggcagcaagtccggcggtcattgccgccacaagcagaacagaaatggttctccttccatttcgcataaaaaaaacctcccatgatcttcattgcccagctttagctacaatatatcagataacaggaggtaatacaatatttatttttagttttgttaaagtattttacattttatcaaagtttaattcaaataaaaggttgccgccttcttatcgcttccgtcggtgagcaccagtttgccgtcctgcagcgtcagatattgtcccggcatgagcacgctctcaaaggaaactcccttcttggcggacaatccctccatcgtgtggaatgtctgcgcctgcgccgtctcctccgcggcatccacatcctgtgccagcacaacggtgccgtctgtctgtgctgtcaggtacagtcccgacttgttctcggactggatggacacgtaatattcgttggatgcatccgcctttccgtcacagagcacccatttctcatccgtcgacagatctccgagtccggttccgaccttgacatttttcatcggataatccacatccgccgatgaattgacgaatccctcgtgcgagagcagcgccccgtcgcccgccgcggactgtaacgtcactgcggtaccggcaagtcccgccgtcgtctcctcgaagtaatcgatgctgccgtcgtcattgaaatgcagctccgtgatgcatgcgcttctgcggtaaccgttgcctcccggcagcgagccgttgtgatagacaaaatacgtcttgcctttaaaatcaaagaccgccatatggttcgtgttcgaggtcgaagtcgggtacattatgacattgccgaatgtccagtcaccgctggttaaatccggcgctgtcgcatatgccatgcactctctccacccgtacgcgtaaaacagataataatctccgtagtagttgccctgttcatccgatctgcggtacagccacggcgcctcggtgtaattctcaatgccgcccttctgatacatgatgtccgcatcctcaaacgaagtaccgctggtaatctccccgtctccgttcatatccttgactgaaatcatatcctcattgagctcgcacatgaaaaacatgccgttgccccacgccagataccggtgctcctcaccgttttcatccgtctccacccacgccgtcggatcaatgtcattgaaggtggaaagctgcggcttcgtcacagaacctcgcacaagcggttctccgatatcgacaaacgtgcccgtcggactgtccgccaccgccacaccgatcgactgcttgccggatttatcccagctgcagtagtacagataatacttgtcgttgtatttcatgacctggcttgcccaagccgatacatcatctttcgcccagtccacggtatccatcgtcatgacggttccctcagacttccagttcaccagatccgtggaggaataacacagatattccggtatctcataaacggaattcgccacctgttcgtccgtcgacgcgtcgtgtcccgtgtacagatacacggtatctccgtccaccagcaccgatggatctccgccataaatccgctctccgccgtcatccgtttttacaatcggattgctgctctccgtcctggcaagcgccacctcttttacctcgccgcagccagtcagacctgccgccataaccagcgctgccgccactattccataaccatacatccccgggattttccgtgcactctgccgcttccagctcccccgccatcttttcgtcgtcctgtctgtaaacatttccttctccttttaccgatctcagacgttctctgcaccgagccccgttttcacctgcagattaccatttacctgtaacgcttccatcgtacgacttgtatggtcatgtacacaagttgtattttatggagctgccgctttcagagtaccatcccttttagcggtaagtaatattatgagaagcacaccgttacgatttc

SEQ ID NO: 11588 - DNA, 10657 bp, Unknown
  gut microbiota DNA sequence
gatcgagaccatccttatgggaatgctttacggggcgcaggtacagacgatgatgccgaagctgcacagtacgaacttcccggggatggagctgatccgtccgctgtatctggtgcgcgaggaggacatcatccactggatgaattacaatgacctgcactttattcagtgtgcctgccgtttcacggaaagctgtgcttcctgcggcggtacggagaagggttccaagcgcgcggagatcaaggatctgatccgggagcttcgcaagaagaatccttacattgagaagaatatcttccgcagtgtggagaacgtcaacctgaacactgtgatcggttataaaaaagatggtgtccgccatcattttctggatgaatatgacaaagcataatctttgattttgtgtcatttttatccccccgaggggcttgtgcggcccctctttttcatgctatcctttgtgcactgggcagaaatgccggcaattttaacaagggagaataaataatgaaaaagaggtggatggcgctgcttggggcagcggcagtgacgatgaatctgtttgccggatgcggcagcacaggtgcggagcagacaggcaataacgcagatggtacggcgacagaggcagtacagggaaaagacagcgccggagacgggaatgcggcgcagagcgtggcaggaaccgcggatacggtcatcgtggcgatgagtccttcgtcggagccggcggcgggatttaacccgtgcatcaactggggctgcggggaacactgccatgagccgctgatccagtcgacgctgatccggacgaacgtggatatggagttcgagaacgatctggcgacggattacagtgtgagtgaggacggactgacctggacgtttcacatccgggacgatgtgaagttcacggacggggaaccgctgacggcgtctgatgcggcatttacgtttaacacggcgcttgccacgccgaattcggaggcggacttaagtatgctcgattctgtggaggcaccggatgataccacggtgattttccacatgagcaagccgtacaatgcgtttttgtatacactggcggtgttcggtatcgtgccggagcactgctacgatgaagcagcctacggggagaacccggtcggttccggcagatatatcctgacacagtgggacaaagggcagcaggtcgttttggaggcgaatccggactactacggggatgaagtgcagatgaaaaaagtcattgtcctgttcatggaggaagacgcggcgcttgcggcggtaaaagcgggacaggtggatatcgcctacacgtctgcggtgtacagcgacgagcaggtggacggctatcagcttctggtctgtaagtcggtggattccaggggaatctcgcttccgtcgattccggcgggcagcgaggttgtcgacggggataccgtgtatgcggcgggaaacgatgtgacatgcgatgtggcactccgccgggcgatgaactacgcgcttgaccgtcagaccatgatcgatcatgtgttaaacggctacggcgaggtcgcttacagcgtatcggacaacatgccgtggtcgagcgagtccatgattattccgtatgatgtggaaaaggcagagcagattcttgcggacggtggatggagtgatacggacggcgacggcattgtggaaaaagacggacagaaagcggaatttaccgtgtattattccgcgtccgattccgtgcggcaggcgctcacggcagagctctccaaccagatgaaagcggtaggaataaacgtattatacgaaggtctgggaagctgggacgagttgtatacaaagatgtactccgacccaattacctggggctggggttccaactcgccggtggaggattatcagctgtattataccggcggttcctgcaattttacgggatattccaatgagaagacggacgaacttctggatgcggcacttgctgcgacagatatgaatgagtcctacagtctctggcagcaggcacaggaagatgtcggaccggatgccgaggcactctgggtatggtttgccaacgtggatcatctctactttgcgcgggatggcttggcagtggcggagcagaagctgcatccgcatggtcacggctggtcgttagtcaacaatgtcgaccagtggacctgggaatagatgagggaagaatgaatatcaggcattacataagcttttttataaaaaatgtaataaaaatgctgacactgctgatcggtgtcagcattgccgcgtttatgctggtgtcgttgtcaccgattgatccggtacaggcgaacgtcggagcgacagcttacatgcgcatgacgccggagaagcgggcgcagatggagtcctactgggggaaggatgtcccgcccgcagagcgctatctgaactgggcgaaggattttgtgcggggggatatgggcacttcgctgaaatataaccgcccggtcgcggaggtcgttgcggagaagttcggcaattcgtttgcgctgatgtgcgtggcgtgggtattgtccggaatcctggggcttgtgctcggcattgtggcggggtattttaagaaccgtctgccggaccggctgatccgcgggtatgcgctgcttctggcaagcacgccggcattctggatcggtctgctgctcttgatggtctttgccgtgtggctcggctggctgccgttcggcatgaatctgccggcaggcatgacagcggcggaggcgggcatcggcgtgcgcatccggcatctgatccttccggcgctgacgctcggtctgacgggcgtggcaaacatcacgctgcacacccgggagaaaatgattgcgatcatggagagcgactatgtgctgttttcgcgtgcgcggggggagagcagcggctatatcgtaaaaagacatgccctgcgcaatctggtgctgcctgccatcactctgcagtttggttccatcagtgagatttttggcggatcggtgctcgtggagcaggtattttcctatccgggactcggacaggcggcgattgatgccgggctggggagcgatgtgtcgctgcttttggcgatcacggtcatcagcacattgttcgtattcctcggaaatcttgcggcaaatgtactttacggtgtgattgatccgcagataaggaggggcagaagtcatggataaaaccggtcatatgacgattgctgcccacacggcgggcagacgcaacgggcgccagtggatgcggcgctttcttctggcggcagtgctgcttttagcagccgttgcagtggctggaatctgtctggaggagcgggcggtggtcacggatttttcgcgcaaaaatctgccgccgtgccttaagtatctgtttgggacggactggatggggcgtgatatgctgtcgcgcacgctggcggggctctccacgagcatccgcatcggtgtgctggcgtcggcggtcagcgcagtgcttgcgcttttccttggaactgccgcggcggtcggcggaaaatgggcggacggcatcatcagctggtgcattgatctgatgatgggagttccgcatattgtgctgttgctattgatttcctacgcgcttggaaagggcgaaaagggtgtggtcgtcggtgtggcgctgacacactggccgaacctcgcgcgcgtgatccgcggggagatcctgcaggtgcgggaggcggcgtacgttggcattgcaaaacagctcgggaaaagtccgtggtacattgccagatggcacatttttccgcagattcttccgcagttccttgtgggactggtgttattgttcccgcacgcgatcctgcacgaggcgagcatcacgtttctgggttttggactgccgccggagaagccggcggttggcgtgatcctctcggagagcatgtcgtatctgagcaccggaaaatggtggctggcgctcttcccgggactggcgctggtcggcgtggtggttcttttcgaccggatcggtagcggcttaaaggcgctgcttgacccgtcgagcgcgcagctgtagaagattttgagtggagaaaaacgatggaagagaaaaaagaattactgcgcatcgagcatctgacggtatctttcgcgcagtatgagaagcgcagcgcaaagcagggggaacttccggtgatccgtgatctgaatgtgacggtgcgtgagggtgagatcgtcgcggtcgtcgggagcagcggatcgggaaaaagccttctggcgcatgccataatgggaattctccccgccaatgcggctgcaagcggcagtattttttaccggggaagcgcctgcggcgaggcggaattaaaggcgctgcgcggcagggagatcgcgctggtgccgcagagtgtcaattatcttgatcctctgatgaaggtcggcagacagatcattggggaaacgaagaagcggcagaagcttttttgcggagcagaccagggaaagcggcagaagcttttttgcggagcagaccgggaaaagcggcaggaggaagcgcggatgcgggaactccttgcaaggtatgggcttgcggacgaagttgcggatctctatccgtttgaactatccggcggcatggcgcgccgtgtgcttttactgacggcactgatgtggcagccgcgcctgatcattgcggacgagccgacgccgggcatggatcttgcgctggcaaaacaggcgatgcaggatttccggacatttgcggacgatggaaacggtgtgcttctgattacacatgatctggaactggcgcttgaagtggcggaccggatcgttgtgttttatgccgggacgaccgtggaggaagcgaaggtgacagattttgcggacgagacgctgttgcggcacccatatacgagagcgctgtatgaggcgctgccggggcgcgggtttgcggcactgcccggaacacagccttacgtcaaagatctgccggcaggatgtccgtttgcaccgcgctgcgccgaccgtcgggaggcgtgtgacggggagattccggtcgcttgtgtacgcggcggcagggtacgctgcatattgtatacagagaattcataaagaactatcagagggagaggaggaaacgtccggtgagactgaaagcggaacatatcagctataaatatccggggggcagcagagaggtgctgtcggatgtgagtctggaactggggagtaccgaccggctggggatcgccgcgccgagcggctttggtaagacgacgctctgtcagattctggcgggctgccgcacgccggtgactggacgtgtctgtgtggatgatatgccgcttccggggagcggttactgcccggtgcagatgatctggcagcatccggagcaggcggtcaatccgcgcgtgcggatgcaggcggttctgcaggagggagattcgatcagcgaacgtgtgatagaggggctcgggattgagcgggactggtgtaaccggtatccgggcgaactatccggaggagaactgcagcgattctgcatagcgagggctctgggggagagaacacggttcctgattgcagacgagatcagcaccatgttagatcccatcacccagagccagatctggaacttcctgctggcggaagtgaaagaacgaaaaatagggtttctggtcgtaagccatgacgaaaagctgatggagcaggtctgtgaccgcatcatgcggctgtgatgcctgcaaataaaaagaaaaatcagaatatcatcttcgcacggtttttcaataagcgcgcgccattcacaatgagaagaattccggctgcaatgccgcctgtcagtacgcagatgccgacggcaaggcttgcagcgccggtcgatcccatcgttttgtaaatcttttcttccataaaaacaacctccttaatacaaaacaatccatttatggttagtattttaccatcatttggtggaatatacaagaaaacggtcacggcagccagccatcgtcccccgccagcacaagctctctggaaaaatgggcagcctgtgcaccgtctaaggtatccacaaagtctgcacgctgcgcaaacgggcggcagccgtctgcacagtcacagtcagcgtcctgtggataactgtgatactcggcaaaaagaacggtgccgtgagcgcgctccttaccccagtcatgaaatccggcaggatgaatgtgggcgcctatcgcgcagtccatgaggacaacccgtgcgtaatcccgccagggacggccgatataggccgcgtgctgaggacaaccctccgcggcaaagcggcagtcgtggaaaacatagccgtattcctgccctttgggggtggaagcggcggtggcatatccgggtcctaaggatgcgatcgtacagccttcaaagtaagcggtcgcactgccgaaaataaagtcgatatcgccgcagatatagcagttgtgataatattgtctgccgttgatgcgcggcgcggactcggttggtccgcggaagccgccgggctcgtattcctccgggggaagcggaccggtaaaaagcgtatcctgatgcccgagaatccggcaggattccgcgacaaaacggtcacattcggcatagagtgcaattgcctgcccgtgcgttttggagtcgccggcagtattctcgatggttaagttgcgcagcgtgacgtctgcggcatgcacgaaaaaggtgtaggagcggaaggttccgcgcttgatgccgtccggcatgatctcgtagccgtaatcgccgaaggagatcacggtgtcggacggggatgctcctgcgccctcgatcgtgacgttcgggcgcatgagggataatttttcgtggtagattccgggcatgacgcggatggtcacgggaaccgtggggtcttctggtatggcggcgaacgccgctttcagtgaataaaagccgccagagacatctgcccctggcgcaacggtcattgtatacataagtggcttccttcttggaaaaatagaattaacgggcgagaatatcgatgatctctgcgacatacatggtgtgcatatcgccgtccttgtaccatttttccttgatctcagggagaagaaaagagtcttccgtgatgcgggtggcagacattttctcgcagagaaggacaaagttgccctcatccacgtaagggatgttgtggcgcgtggcgagggtaagacctgccgcggcgaacttgtcttcgtctcttccggaatgggaaccgcagtaatttaacgcgtcacggtactgcccggacaggaaggtaatggagaaaaattcgttcgcgtcgatgaattctttggtgtagcgcgaatcgcgaacaaaaatgaaagcaacatttttaccccagaggacaccgacaccgccccagcttacggtcatggtgttggctttttccctgctgccggctgtgacgagcgcccactctttgccgattttggtaaatggattaaattctacaagatcaaatggtaacggttggaatgtgtgcataagattacttcctttctgtcggtatcatttctgtagatatgataccattttgacgggaaaataacaagaaagccggcggcaaaacgggatacttttcacaccggaaggggcgcagatgagcgccagagcagttgaaaaaatagacggagtgcgtataatagtaatatagtacgcaaaaggaagaaggaggagcggcgatggcaggattaggccacagacaggatcggggagtcatgctcccgccactggatgagattgacggttttatggtgcgcccgggattttacaattcggaaggtgcagtgccgacggcgaggggagtgagctttacgattcattcggtcggtgcgacgggatgtacgcttctgctgtttaggccgcaggaaaaagagccatacgccagactgaagtatccggaggcatatcacattggcaacacgttcgcaatgctggtattcggcttgaagattgatgaatttgaatatgcgtttcagctggacggaccgtatgatgtgtccatggggctgttgtttgataagaacaatgtgctgctggatccgtttgcgaaggcggtgacagggcagcggaactggggcgagcgtccggagagtgacgagggttttgtgtatcacgcccgtgtggtggagaataattttgactggggaaaaatgacgttcccggagattccggcggaggatctgattatatacgagacgcatgtaagaggatttaccaaggatgcttcttccggggtgacggcaggcggcacgttcgagggactgcgccagaagattccgtacctgaaggatctgggcgtcaacgcgatcgagcttctcccgatttttgagttcgatgagatggagagcgcccgcgtggtggacggcgtgcagttgtacaattactgggggtacaatacggtgagcttttttgcgccgaacaccagctactcgtccgtggtagagcacaatcacgagggagacgagttaaagctgctgatcagtgaactcaaggcaaacggcatggaagtcattctggatgtcgtgtttaaccatactgccgagggaaatgagaatggaccgtgtttttcgtttaagggcattgataataatatttattatatgctgacgccggatggacattactacaatttcagcggatgtggcaatgccatgaactgcaaccacccgatcatgcgcaagtttatcattgactgcctgcgctactgggtgatggagtaccgcgtggacggtttccggttcgatctggcttcgattctgacgcgtgaccagaacggggcgccgatgccggacccgccgattttacaggggatcgcctgcgacccgatcctggggcatgtgaagctgatcgccgaggcgtgggatgcggcaggactttaccaggtgggaaccttcccggcgtttcgcaggtggtcagagtggaacggcagatacagagatgatatgcgccgctttttaaagggcgacgggggcatggcgggaaccgcgatcaaccgcatcatcggttcgacagatctgtacgatccggtgcacagaggtgagagcgcatcggtgaatttcctgacctgccatgacggttttacgctctatgatctgtactcgtacaatacgaagcacaatgagaaaaacggctggaacaatacggacggcgacaacaacggaaacagctggaactgcggcgccgagggagagacggacgatccgcagatcgagggactgcgccggcgcatggtgaaaaatgcgtttgcgacgctgctctgcagccgcggaccggcgatgttctacggcggcgacgagttctgcaacacgcagtttggcaacaacaatgcctactgtcaggacaacatcatatcctggctggactggacgaggctggaaaaataccgggagattcatgattttgtgcggtatatgatcggtttccggaagcgctatgccattctgcgcaagaagacgaagccggtggcatgcaatctgccggagatcagcattcacaacggttatccgtggaacggcggtacggattccaacagccggctcatcggcatcatgtatgcgggaagagatgagcacgacacgcgggacgatattgtgttctattgtatgaatgcttactgggagacattagtgatgcagcttccggaactgccgaacgggctccagtggaaagtgtgtgtcaacacgtccgtggagtacgaggatggcagggatatggagtcctacacagagttttattataagaagacattgaaggttccgccgcgcacggcgatcgtactggtggcagagtaagcgggtgaagcgggcagaaatccttggggaatgcccgctgcctgcgctgcggctcctagaggtagccgccgtcgagggtgatgatctgcccggtcaggtagtcgtttccggtggtaatctgcacggcaagcgatgccacttcctccggcgcgccgaagcgcccggcggggatctcctcggcgagctgggcgcgctcttctgcggaaaagcaggcattcatctcggtgtcgatcacgccgcaggcaatcgcgttgacctggatgctgctcggtgcgagctccttggcgagggcgcgggtaaaggaattgatgccgcctttgcaggcggagtatgcgacctcgcaggaggcgccgacatttccccagatcgaggagatgtttaagattttcccggatttctggtggatcatgtgtggcagggcaagcttgctcgcggaaaagacggaggtcagattgacgccgatgatacggttccactcatcgatggtcatatcttccagcagaccgatatgtgagatgccggcattgtttacgagaatgtcaacgccgccgaagcgggcttcgctttgggaaaaaagctgttccatataggcatagtctgacacgtcaccgatgctggtgagtacgtccacatggcaggtttcccttaattcgtctgccagcgccagcagctccttctcggagcgggaacagttgatgatcagacggcagccctctctggcaaaggcgcaggcgatcgcccgcccgatgccgcgtgaggcgccggtaatgagtacggttttatacatgatgaaagacctttcttctatattgtgaatgtgttagtatgcagtgttcacgc

SEQ ID NO: 11589 - DNA, 6487 bp, Unknown
  gut microbiota DNA sequence
ctctacacgtatccatagacgccccggacggagacctcccccgccgatacgagtcttctgctctcccaggtatccacgatcagctcgccccgcggcgtgatgcccatcgcttttccctcaaacggttccttcggatcaagcaccttcacgatctggttccggttgaccagatgcgcatcgtactccttcacaagaccgctcagatcttcggtctccatgaaaattgcataataatgttcaaactgttcccatacttcctcaatcagagccgcgcggttaaaatgttctccggtctccatgtagagagaagttgccactggggcaatctcctccgggaacgattcgttgtgaacgttgatgccaataccgatcacaatgtgattgacataatccatctgtgcgctcatctccgtcagaatgccgcagacttttttcccgttcatgacaatgtcgttcggccatttgatgcccgccggtctgcctgtcgtcttcacgatcgccgcagacaccgcaagcgccgccaccagcgtcaacatcggcgcattcacgggcgacaactccggctttaacatcagcgtcataaaaatgccggctccctgcggggactcaaagcttcttcctcttctgcctctgcctgcatcctgctgtccggcgaccacgagcgttccggtagggtaatcttcctccgccagctgcttcgccctggtattggtggagtcgatgaccggatagtaaaaaatctcctgtccgacccacgcggtcttgcggatactttttaattcttcctcgctcagtgtgtccggcaccgacaacagcttatatcccttgttcggcaccgcctctatctcatacccggcttccttgagctggttgatgcccttccagaccgccgtccgggatactccgaacttttcacacagatcctgtcctgacacataatcgtcggcatctcttaaaacggaaagtagttctgctttcatgatgttccctcttattctcccagtgtagcaagcatgactgccttaatcgtgtgcatacggttctctgcctcatcaaatacaaccgactgctcactctcaaatacttcgtcggtcacctcaagctcgctgtaaccgaatttctcatagacttccttgccgatcttggtctttaagtcatggaatgccggcaggcagtgcatgaagatcgccgtcggcttggcatttgccatggctgccttgttgacctgatacggcatcagatcctgtaggcgctctgcccagacttcgtccggctcgcccatcgatacccagacatccgtgtaaataacgtccgcgtccttcgtgccctctgccacatcttcggtcagcgtgatcgatgctccggtctcggctgctacttttttgcagtaatcaaccagctcctcgttcgggaaatatttcctggaagtacatgcgacaaaatccataccgagctttgcgcaggtcaccatcagggaattgcccatattgtagcgggcgtcacccatgtatacaaacttcacaccctttaagtgtcccaggtgttcccggattgtcagcatatctgcaagcatctgcgtcggatggaactcgttcgtcagaccgttccacaccggaactcccgcatattttgccagctcctccacaatgttctgtccatatccgcggtactcgataccgtcaaacatgcgtcccagcacgcgtgcggtatccggaatgctctcctttttgccgatctgcgaaccggatggatcaaggtaagtcacatgcattccgagatcatgtgctgccacctcaaaagaacaccgtgtacgggtgcttgtcttctcgaaaatcagcgctatattttttccgatcagactatcatgcagaattccctgcttcttcttgctcttaagatccgctgccagatcaatcaggtagagaatctcttccggtgtgtaatccatcagttttaagaaattgcgtccttttaagttcatgattgcgttcctccttgtcgctttgtgcttcctgttgcagaataaacaggctgccactttcgtgacagcccctattttcaatctgatctatccgatgttctatttgttctccagagctatttctgtcacagattttgccagccctgcgattccctgaatctcagacggaatgatgatcttcgtcgccttgccgtctgccgcctttgcaaatgcctcaaggctctttaactggatgacaccctgatccggagccgcatccttgatcatgcggagaccgtctgcgtttgcctgctgaatcttaaggattgcctcagcctgaccttctgcctcgcggatagtggcctccttcttcgcctctgcgcggaggatcgctgcctgcttctctgcctctgcatcgagaattgcggattctttcttaccttctgccacgaggacggtagacttcttctcaccctctgcacgaaggatcgcttctcttcgctcacgctctgccttcatctgcttctccatcgcatcctggatcgctgcaggcggaatgatattcttaagctctacacggtttaccttgatgccccaaggatcagttgccacatcaagtgttgctctcatctgcgtgttgatcgtctctctggatgtcagtgtctcatccagctcgagatcaccgatgatgttacgcagtgtcgttgcggtcaggttctcgatcgccatcagcgggttctccacaccgtatgcatacagcttcggatctgtgatctggaaataaacgaccgtatcaatctgcatcgtaacattatcctttgtgattaccggctgcggcgggaaatcaactacctgctcttttaaggtaaccttcttcgccacacggtcaataaacggtatcagcagatgaagacctaccggccatgtcgcaagatatccgcccagacgctccacaatgtacgcatgcgcctgcggcacgatcttgatacaggacaccacaactgccaatatcagaataaccaaaatcaaaaaagctactaataatcctcccattatctaacctccaattattttctgtccggatctctaacactattttccccgttaaatatcatattactatatttgatttgaaaatacaagaaaagccgtaggaaatgtctcatcatttcccacggctctgccatgattcctgtttaataaaatacgtggttcccgattaccacacccgcgtgtccggaagaagctctgctaaagcatgtcgcaccgcccgtattgtcagcaccgttgagtgcttcctgtgctgcctgaatgcagctggacttcggaccgtttgcagcaatgcttgcaacggctcctcttcctgccggtgggaactgtcctgcctgatatattacaccgtaaatgctgcccgcatatctgccggatctcacacggttcatgacaaccgcaccgactgcaagctgtccttcgtagcactcgtttcctgcctcgcactgaatcagtgcggcaagcagtgtcacatcatccaccgaagcggacactgcagaattctgaacggtacccgcgctggacacctgtgcggactttgccgcttctgccgcagccttcgcagctgctgcctgctcctcctcaatcgtgacagcctcaccgagtgcaagctccgtcgtcacatactctgcgctcacataaccggtggttcccttgtaatcaatcgcaacccatccgtctacggtctctgcatctgcatccagcgggaaagtcattcccgtcgataccgctgccagcacggacgcgtccgggtctgcgctgcttctgatgcgaagtccgctcgtctggatctctacctctgtatcaaatgtatcgttcgcataggtatatgcttccgatcccgtcacgcagtaggaatttttcacatatccgtctacgtttccggattccacatgtgtccaggtatcgcctgtctcggcgatctccgccacatctcccttgtataatttgccgacaatcgctgcattttcgtctccggattccctgatatacaggaaatcgtcgacatctgccatcaggcggttctgccactcctgctcttccgcagacatctgatctgcgtccgtgctctgtgctgcctccgactgcgcatcagcgtctgtctgctctgcatctgctgcctgctcgccatctgcctggctctgtgttgcctctgtctcgctctgtgctgcatctgcctgctgtgtctctgttgcttcggcctgctgcagctgtgcatctaatgtctccgcagcttctgtatccgaaaccgcttcctccgctgtagcaaccagaagtcttcctgtctggttcacaccggctgtcgctgcttcaatatcaccaaatgcctctgcttctaactgatctaaccgggcaacaactcctgctgttccccctgtagcgaagtccgtctctgcctgtaccgctgcgttccttacctgtactccgtcaagatcagcagcctgtgcgattgtgctcatcatcaccagggatccggcaaccacgattccctcaatcgctcttttcttcaaactcatagaaccctccatcggtgtaatcacatgtttattgaaatagtattacacctttgtgctgttttattcatattttgttacaattgttacggatttgttacagcaggaattataacaaaggtactgttttttgtcaagttttcggggctttccacagctttatgccgttgtttttctatagaaagaggcagccggaagccccgttttacaagacttccggccgttttttgtgcattttgccagtttttcgtttttatgaagattttcttaagaaaatacctcttcaataacctcatcgatcagcatgtccgccgggtattttttcgctccttcggctgccgcctcacactgcgaaacaccttccgccggaaaagcgctcccaaactctgcgctctccattctgtcggtgccggtctgcttcttctgtatatatctctggattctgtttatcttatgtaatgtgacaatcagaagcagcacggtgagcagactgcacactgcaatccccatctgcaactgttccggtgaaatatgttccagccagagcatgtccattacctctctttccgatcagactttttcctgcccgatttcttctatattataaggaatctgcacggatttgaaaagaggctttccccgtgatctcgccgcaatttgcgacaatctttttacatcccatgccggcatcatccgcaccctttttccattgccgccacaaagcccgatctccaagtcttttcttgacttttatgcataagggtattataaataagggaagcagaccattaggaaagggattcttactatgaagaaaattgttatgaccggagggggaactgcagggcatgtaacgccgaacattgctttatttccagctctgcagaaggaaggttatgaaatatcctacatcggttcctatgagggaatcgaaaaacggctgatcgaggagcagggggtaccgtattacggcatctcgtccggaaagctcagacgttattttgatccgaaaaatttttcggatccgttcaaagttttaaaaggctatcatcagtccgtccgtcttttgaaaaaattaaagccggatgttgttttctcaaagggaggctttgtctccgtgccagttgtgcttgcagcaagccgctgccatattcctgcgatcatccatgaatcggatctcacgccgggacttgccaaccgcattgcaattccaaaagccacaaaagtatgctgcaatttcccggagacactggcacatgttcccgaggacaaagccgtgcttaccggcacgcccatccgcgcggaattactgtccggagatgccgaccgtgcttttgcactctgtaattttacagattccgcaaagccaacacttctggtcgtcggcggaagcagcggctcccgtgccatcaataccgccatccgggatctgcttccggaactgattaaaaattataatgtcattcacctgtgcggcaagggaaatgtggacacttccctgaacgccatcgccggttatgcccagtttgagtatgccaatgaggaacttgccgatctgttcgcgctctcctccctggtcatctcccgcgccggagccaatgcgatctgcgagcttctcgcactgcgcaagccgaatattctgattccgctcccggcagcagccagccgcggtgatcagatcttaaacgccaactctttccgttcccagggattcagttatgttcttgaggaggaggagctgaccaacaccactctgttggaagccatcgaccatgtcttccacaaaaaggacgcttatatcgatgccatggagcacagcaaggtcacaaactccatcgagacgatcatgggactgatccgcgaggcatcttcgcacaaatagcggttcctgcatagaaagaacccgccgcaatgagcatattgtgctttgcgttgataagtaatattataagaaacacactcg

SEQ ID NO: 11590 - DNA, 2659 bp, Unknown
  gut microbiota DNA sequence
atatccagattataccttattttttcctgtttttcacttctgaatttcgatccccggacggatggtatcctccccgaaattgattttatgtaaaccttgacttctcctgccggcaaagttataatgttagtgttgactaacttattatcttacctgatttcaaaaacggagggcggttgcagcggcaaccggaaatatatgattattgaaacagctctatatcaggatgtactggaacattccagtatcttccgtcaattaccaaaagataaatatcccaatgtcctgcgctgcttaaatgcgcgcgtggtcgattatccgcaggatgcatccatcgccgcactcggggattcctccggctgctccggcattctcctcaccggcatgctcgaagaatatctggtcgatgagaacgggaaccagatcatcatcaatcacctgcgaagcggcgacgtcttcggcgccgagtctgtgtgcgccggacaggtggcgagccatgtctacattcacaccgtggaaaaaagcaagatcctgatgctcgattttgccgcgcttttgtctgaaaaaacattttcctgctcctgccgtatgcaggtgaccaccaatcttatgcaggaatttgcgcgccaggtgatgttttttaacagcaaaatacggattctcagtcagaaaaagctgcgggacaagttaaagatctatctgcagacgttagagatcgcaccggacggaacggtctgccttccttacagccgcagagaactctcggaatatctctacgcggaccggagcgctctctcccgcgaactttgcaaaatgcgcgacgaggggattctgaatttttcgggttccaggctgcagattcttgatccgaattttctggcaatataatctttttttgaggcggttgcaatagcaaccgctttttctttccttttccagtattctatgtcttattggttagttttaactaaccaataattacatactgataccgttcagagggaggaaatatgataaaaaagacaaaacttaccgctgcattattgacagctgccatggtactgcagcttgcagcctgcggaagcaatgcggcttccggaacagagaatacttcagataacggagccacagcagccaccgagactgctgccgcttccgaatcggcggagagcgtagacactgaaactgctgccaccgaggacaccggcacccacactgtggttgaccatgccggcaacactgtggaagttccgaatcacattacccgcgtggtgattgaccagattccgattctctccacctacatgtcctatttcggcgaggaagctccttatatcgtaggctactgcggttctttcaaggataccatctcaaagacggttctcaaaaatatcgcaccggagctgatggaatccgcggataccgtctatgcacagagtgatctgaatatcgaggaaatcatgaagttagaaccggatgtcatcttatacaatgccggcaatacggcacacgcagagatcttacaggagagcggcattccgtgtatcggatttgcaaccgtcggtcacgagacagaagctgatccgttaaaccgctacaaacagtggctggatcttctggaggatgtcttcggtgaggaaggcaagaccgatgctttcactgctgccggcgacgagattgttgcggatgtggaggcaaggattgcagccgttccggaggatgagcgcccgagcgcactgattctgtggaaatacatcgacggcgtaccgcaggtatccggcaacggaacctttggtacctactggatgaaacacttaggtgtcacggacgttgccgcggaggcaaccggctttacacaggtgagcatggaacagatctacgactggaatccggatattctgtttgtcgacggtccgggactcatcggtcttacctcggaggacgtgctggagaacagggtagagggaaccgatttctcctccatcaaagctgttcaggacggacgtgtctatgacacaacgctcggcatgtggaactggtttacaccgaacccggacgctccgctggtattcgcatggcttgcatgcaacacttacccggaagttttcgcagactatcctctggaggatatcatccgtgaatattaccatgactggtatggctacgatgttaccgatgaggaaatggaggaaatgcttcagtactgatgaatgataattttttgatcaaacgggggcattttacaccgcttgccattctcttcatgatactgctgccgcttgtcaccgcactgatctgtatctgcctcggcagaatgaatgtgccggtcggcgacgtgatcgctgttttccgcgatgttctcacgggaaatgagggacatgcgcagaattattccattgtgatcaatctgcggctgccgcgtattctgatggcaattattgtaggagcaggacttacctgcgcgggaaacacgttccaatcgctgttttccaatccactggcaacaccggacattctcggtgttaccagcggcacctgcgtgggagcgatccttgcgatcatcctttcctgcggtattctagagacacagatcattgcacttgcgttcggacttgcctccgtattttttacgttaaagatcgcaggaaaaaatgagaac

SEQ ID NO: 11591 - DNA, 9731 bp, Unknown
  gut microbiota DNA sequence
ctcgccttgcactcgagtgtctcgtaattgtaggtatctacaagcacctgaccgccgatttttacagtgtagtaattggcgcctgtcggctcgtccggatggtttgtatccgtgatcggcacctcggaaacctcagtcggcacaatctcggacagctcatcaatcaacagcgcacgctggtcgcgcagctcgtttgcgtagccgccctgaatctcaatgacgttgatctgcttgttcaataccgctatcttctccgcgatcgcgttgatattctggaccgtggatttgatctcatcgttcgtccctttctggatatcagtcagtccctccgacacgctgttgaagtaggttgccagattctgtgcgcttccgataaactgctgacgggtgttgacatccgatgcattattcttcaatgtatccagtgaattgaacatcgtgttcaggatcgtcgtaaagcctttggatgagctgtcatcgataaaatagttctcgatctgctgtaagtagttcaattttgtctcatacagtccgaccgatgactgattgtaccagtattttgtatcgtaatactgatttcggatctgcttgacggacacggttgtaacaccggttcccacagctccgtactgctggtgcaccaaaagcgcatccgatgccacacggttcgactgctgtctggaatagccggttgtctgcacgtttgcaatattgttagccgttgtattcagtgcgacctgataggcacttaagcctgatgatgcaatatttaaaccaaaaaatgtagatggcatgtaacaccctctctttctttacgcgctcaattatccaagctgggtcagcagatgttcgatcatctcattgaccacattgatgaaacggctggctgcattgtaagcattctgatacttgatcatgtaggtcagctcctcatcggaagatacgccgatgacctgctgtctctgattgtccacagaagccaccgttcccgtgaggctggtcgccgtggaattgtagacatttccgtaggttgccatctcaccgatcatatctttgtagtaatccttaaagctgcacgccttggtgtcgttcgggttcagcgtaagccgctcctcatcccacacaccggccagcttcgctgccagcgcatagtcgacatcaccgttctggcacagatgcggcagcaacgtctcgtcgatcacaagcgcctcgttgacgctcaagctctgcagtgtgtactgcttcgtggtatcgttcggatcctcttcattgtaaatgtagatctccttggtctccgtcaccgggttgccgttggcgtccactttcgggttgccgttctcatctaccggctgataggtgtaagtcgcctttgtgtaccgctctgttccgattctggaaaacagttcctgcggcggaagctgcttgtcggaaccggttgcacagttgtctgcatccagaattttggtgttcgcatttaacgttacggtcgagccgtccgccagcgtcacatccagcgttgtcgccgtgccgttcgtaagattcttgatcgtgtcttccgcagtcacattcggacaaagcacatcgtttaacgcggtcacaatgccgtggatcatctgatccagctgtgcctctgcccgcagcatgacggacattccggtcgtatcgttgtaggtatcctgatccagtccctcaatgtctgtatagttggcgatatggtcgccgcgcgccagtaccagcgctttcagctcacccatatcgttcttgttctctgtggagatatcccggctgccaaaatcaaatacgttgacgtattttcccttattcacatccgagaggtaaccccagtacggcgtgataaaaccggtcagcttgtctgttttcttctcgatatggtagcagcggctctcatcgataaactccgtgccctcaatgctgactttcacgatgccgtcggctgtctcgttgtaggaaatatccacgagagaggacagctcatccagtgcctggtctctcgcatcgcgcagggtcatggctgtctcgatgccgcccgcctctactttcatgatctgaaggttgagatcctgaatggtatcgccgagcttgttgacctgatcgatattgtcgctgatctgcgtattgatgttgtactgatagctctgtaatcccgaataaaccgcattggcgcggctcacgaacagctgcgccttctggacaaccagattctggctcacgctgtcatccggcgtcttgtacaattcctgaaaagaggtccagaaatcttccagtgcatcctggaaagcctgtccctccatctcctgaaaataagtctcgacttcgttggtcgcctcataagttgccgcatagaatgcctgccgtcccgactccgtgcggtaagagcgatccagaaaaacatctctggaatgaatcacatccccgatgtaaacgccgagtccggactgctgcttgctgactgccgtcgtctcattaaaggttacatagttgcggtcggtaaacagcacctgctgacgtacatatcccgtggtatctacgtttgcaaggttgtttgccgttgtatttaatgcgttctggctgctctgcaagccggacacgccgataaacaatgttccaaaaccatttgccatggtatcttcctccgtgctgctctatctactgcttcgcgtcaaatccgctgccgccaagcaggtctcctgtattataggcgtttttattgtaattagcggtctccggcgcctgccgcatgctctttagcagcgtaaggtcaaattccaccatctccatcgcctgctttaaaagggcctcgttctgatggttcaatgtctgcatcttcgttcccacttctaaaagtctgtcccggcgctccgcaagcatctgctgctctctgggctggttctccagataaccgatcatacggttgatcgtcatctgctccggctttttcccgagaaccgtcgccatgtcattcagcacctgcgtgcgcttgttcgacaggtttaacagggtgctcgccgcctcctgctccttctccgtcacctcgccaagcttcgcaatgtccgctttgataatcgcctggctcttcacatccgcgagatcaatcagcgtcagatattccgtttcttctttttccagaactcccagaagttcttccattaaactagccacaatctgccctcatttctcttatcctacagcataaaggaacgatatttctccagaagcttctctgcaaaagcctcgttgctcacatcgtaagtgccggatttcacctttgcggagagcgccgccaccttgtcctctctgatgtcagaagtctcggctactgcctgctttgcgatctgataatcatatcctatggaagagatctcaacctgatcccggctcttctcagtctttgctgctgcggatgccccggctgctctgtttgtcttataaatctgtgccacgctgttatacgcttctactcgcataatggcatctcctttctattctgtaacgcaaaaataacttttctagtcaatatatcggatgatttggttttttccttagtgataatttttatgagataaaaagatttcgtcttattttcatcattgacggcactaaaacaagggtattgatctgccctcagagtcattcttaaggcgcagatgcaatcccctgcaaaataatgtatatgaatccattcatttgaatacaagcacctgcttacccgcagataccattactgtgcaaaaacaatttcactgtgcatcagccaattcgctgtataaaaaccgtttcactgtgtatcagccaattcactgcgcaatggcaatcactgcaatacgagtgtcacggtcagtgttccgccattcgctgatgcctgaatcagcagcggctgtgaaaatgtattcgtaaacttcagatccagatagctgcctgcaatcgtcgcgtcaagtcccgccggaagatagtctaccggaagggaatgtgcatggcgctccgttgccggaagtcccgcatataccatcgccgcatacagtgtggacgatacctggcacacaccgccgccggtgccggtgccctttttgccgctcacatagatcggagccgtcacatatccgttcgcagatgtgcgcggtaagatggtattgctgaaagaaaagctgccgcccggctgtaccaccgtgccgttaatgcgctgtgccgcaagcgccacgtttgttgcgcgcggaatattatcaacataagaagtcgtacaggtaccgatcaccgtgccggatgcctgctgcgtgctctgtgccggtgcactgctctgcgctgtcccattgttctgtatcccagtctggctgtccgtctgctgcgcctggctgtctgcctgctgtactgccaccaccggctgtccgtccgcgctgccgtttctgccctcggcttttccatatgccacataatgtctgcagtaagccgccatgtcgctgccgaatgccgcctgcagatcctcataacgctgtctgtatgcctgcggattaaattccgcgctggcattgcggccttccttcacgccaaagctgatgaaatggttcagaagcgcatctgcattatttccataggctgccgccacatccggatacgccgcactgtaataggatgcgtcaaacaccgcacggtacgccgcgcgatccgcctgccctgcctgtgcctgtaccggatgcatcaccataagcatcacgccagacagcacacacaacattcctaataaccattcctttttcacagctctcataactcttcctccgaacgtaaccacagtttcctcacagaccgccttccttctgtctttctcctgtgtgcattctttccgtttcctgcggttctgtctttttttgcattgtaacagagggtttatcaaaaaacaagcaaagttttcagaaagtgtcagaaaaattgcatttgtatctattttccgcttttatcttcatcaagtggttctttttcttcctccatttgtgcaaatccaagcacaaccttaaagagatcgccgtccacatagagcataaagctgccgcccatcagttccatcaggctctttgcaatggagataccgagtccgcttccctcggtattgcgcgattcgtccccgcggacaaaacgctccataagttcctcactggatatgttgagcggataccgcgatgtattccggaaaatgagctccacctgtccgccgttctcccgcagatccacgtatacccgcgtgcccggctgcgcatatttgcagatattgttcatcaggttgtcaatcacgcgccagaaatgcctgccgtccgccatcacatacaccggcgtctccggcttctggatcagcagtgtcagatctgcggcgttcagtttgtcctcgaattctccgacgatctgcaccacagagacgcccgcctcgagtttttccagatgcacggcgagattgccagtggaagctttcgacgcctcgatcagatcctcgatcagctttttcagccggtttgactggcgctctaacacttccagatacccctctgccgtctcattggaaagttcctctttttccagaagatccacataattgatgatggaggtcagcggcgtcttaatatcgtgcgagacgttcgtgatgagttccgtcttaaaccgctcactcttcacgctctcggcaaccgcctttgccatacccgtctggatgctgttgaggtgctcgccgtgttcctttaaatcccggtacatgtgcgtcgtatcgaccgggtgctccatatcgccctccgcaaggcgttcgcctccctctgcgagacgcttcatctgtaaaactccccagaagatgcatgcgaactctacgacttttacaaaccgccagcccgctcccatgctgcttcctgtatgaagcgtgccggcaagcgcttccgccatcatggcaatgccaaaaacaagcaccgcccttaagaaaagaggcacattcagggtcaccgcgccgcagagcctgccgatcacgccaagcgccatgtagatgacggtatttttccaccatgccccggctttcacgcgcgcagcaaaggtcagcagcgacagaagcgcaatccaccctcccgctatgaggcaaaacaaaaccccgacaagcatcggcactgcagcatttctgccgttgacagcttccatcaggatcagaaacagaaatccctccgccaccagcgcaaatccgagatacacatcaagcggcatgccatccagccaggtaagcgtaatcccgtcctctcccgcgtgatgccccgccgaccgcaccagccacaccaggcagaatacggtaagcacaaatgctgccgccagaatcgggaaaatggcatagcggacgccatacatcagcgccgtaagcgtcgtaacctgcacaaacaaatcgtcactccagccaagcggcacattctccggaagaatcgtgactacccagtatttccggtgcagtgattccgccgtgtagttcatctgcagcatgccgtcagtaagctggtacgttgtcctggcatcgcttcccttttgctccagatcagagttcccgattacagtgaccggtattcccacaagctcaccgcaggtgactccgtccagaatcacactgttcgtccagtcaaccgtctgaaatcccgtgttttcgctcagactgtctgcatcgtcgaatgtcacataggtcccgctgtacgcatggagatccagatattttcctacatctgcgtcatacgtgtaatcatagcctgtcgccagatccggcgacagcatcagaatgctcacatgttttaccgggatgtatgcgtccggcgtttcataataaaatatgccatcatctgcattgtaacaccgcttctcaatatccacctgcgcagcgtaatctccgccatccgtgtagaggctgtacccgccccacagcgtcatgctgtaattatagcgtgtcacctcattgatgtcatagcttttgcagtacagcttgtcccttgtgaccttctcatcaaaattgcgctccacataagtgtacgattcgttgagatctacagaatcaatattttccgcttcaatgattccatagcggaaatacgtgtcattccaccgattattttccggttttgcaccattttccatgttcacactgtaatccagtgcccggatggcatactgatctgcaacactctgataactctttgtaaggaactgttcgcgcgacatctcatatacgcccgcctgatccataagcagcacaccggcagaccctgcgaaaaataccaccgcaccgagcgtgatgccgacccacgctgccgcttttgctcccacactgtcttttctgtttctcacactgtttcctccattttatagccccgcccccacacgactttcaggtagcgcggctccgccgggttatactccaccttttctcgcaaatgtcttatatgtaccgcgaccgtattctccgtgccgtagggattgtcccgccacacctgcacatagatctggttcggcgaaaatacttcccccgggtgttccatcaaaagttttaaaatatcgtattccgtgcgcgtgagcgataccggctccccatcgagcgtgacctcctttgtgcggtcgcacagttcaatcccgccgatcgcaagcacatcccgttcctgcttcgtactgccgccgagctgcatatagcgccgcagctgtgattttacccgcgcctgcagttccaccgggttaaaaggtttcgtcacatagtcgtccgctcccaccgtcagtcccagaatcttatcggtgtcctcgctcttcgccgtcagaaggatgaccggcacgttgcttttctcacggatcttcaccatggcagagataccgttcatctccggcatcatgatgtccatgagcacgagatggatctcttccttatttaatatatctacggcttcccttccgttgtatgccgtaaatacctgatagccgtccgccgtcagatagatttccagagccgacacgatgtccttttcatcgtcacacaccagtatgttgtacattttctccccttttccgcgtaaactccccgcaagccgcgccgcacatgccgcctgccgctatttgacgctttttgattctgattttattgtagcggaatgtttatgaagttaaaagaagtgaattcattaagatttgatgaagaaaggaaaaagacaagagggcgtctttcctcctgtcttttttatatctacatttaattataatgttctattctgcatttaagccatttcctgaccgttcactaatagaacagcagatttccccgcttctttgcctgctttagcatcacatcaaagaacacgcttcctatcaccagccacaccagcgccacgatacacaatcccggcagcatgcctgtatattcaccgccaaccgcgatctgacgcaatatttcgttacatctggtcagcggaatgtaatgcgtaatctttaatatggcatcactggtcggcacggtatccgtcacaaaaagaagcgcggtctgtatcagaaatacgatcgttcccgtccgcttaaagtaaattgcgatacctgccacaatcagacctatgccgtacattccgagggattctaatagaatcggcaccagaaacgccggatgaaaagaaaattcaatcccccacacgaactttgaaatgatgacaacaatcacaatcgtaatcgtctcaagcagtaccgaggagacatataatcctccaaacagatactgtaacggatattttgaggataccttcttgtacaaggttccgtgtgtcagctcactctgcagcgatcccgcgacattggaaattgctgagattgcatagatccaggcaacatatcccaaaagcaccagttccttgtaatttccataatggtaggtttgtgcgtaagaatttccggaatccgtcaccataaataccgtaaacaaagcgaaatacaccaataagtcggaaatcatcccaaaccggtaacggatcgaccgcagaaaatccatttttatctcataccagaacattctaaacatctgcccgctcctccccatgatacagtttcttataaatctgcccgatttcttcctctcttccattctccacgacttctgcaaagcgcccgtcctttaggaaaataagcgtatctgcgacatccgatgcaaatgagaaatcatgcgcaatgacaatgatgcttctgccatcacggacactgcgtatggtatccgcaaccagctttcggttatcaatatccagtccgtccgtcgcctcgtcaataatcacgcattttgcgcctgtcacaaccgcagacatcagcgatacgatgcgcttctgcccgtacgagagcgtttcgaccagcttatttttcaccatctcatagattgggaatttctctttttcccaggcaatcgcggcatccgccgtacttttggacattcccttcagcatgctaaaatagatcagattctcatacaccgtatttttcacatacagatttctctcccccgaaagtatcacatcaaatccctgttcatccattccgtccgaaaaagagatcgtaccctcgtccggcagcataaagccgcacaaggtattgatgaacgtcgtcttccccgttccgttcggtgcaatgatgacatagacgcgatccggcaaaaactcaaatgtgatgtcttttaaaacttcgttttccttaaagcttttctttac

SEQ ID NO: 11592 - DNA, 22471 bp, Unknown
  gut microbiota DNA sequence
atatcgaggcattccttgaccactacgatttgtgggaactggtggaggacatagagtgttatggcaataatctgcggcagaagggagaaaatatccggctggtcgtagagcggaaccggctggatgaggcggtctatgtcggagacattcaaggagattatgatgcgagccgggcggcaggagtcgggtttatccacgccgcatatggattcggagagattgcggagccggtcccggaactgaaaacctttgcagacctaaaaacctttgatatttcatcggcgagcaaaacgcagagcgcttggaccatgtgagccggcagcaccgggcagccagagaacagagagccgtaaccatgtgagccggcagccgcatgcaggagagagaaagcatgacaaagtttgaagaattactacagcagatcaacagacagcatgtctatatacagacacataatttcccggatccggatgcgattgcaagtgcatatggtctgaagcggctgcttgcaaccaggggtatcgaggcgagcatctgctataagggcaagatcgaccggtacggtaccggccgtctgtgtgagattcttgacattgaactgttgaatgtggaggatctgaccgaagtgctgacggatgaggacgaagtgatactggtggattcccagaagggcaattccaacatcatcaatattacgggagatgagatcatctgcatcgaccatcatccttacaatgataagtgtcagtaccggtttcaggacatccgccccgaggtcggggcgtgcgcaacgatgatcgcgcagtattttatggaaaatgacattgcgatggataaaaagatcgcaacagcactgacatacggcatccgcattgacacgcacaatctttcacgcggcgtgtcaaagctcgatatcgagatgctctatcggatgtacgatgactgtgattatgaggagatccacacactggagaacagcaacctgtgttttgaggatctggtggcgtattccaaggcgatttccagcattgaggtgtacgataacatcagctttgccgatacgggggaggactgcccggaggcattgatcgcgagtgtctctgactttatgctggcgctggtggaggtttctttttccgtggtgtactcaaggagaggggatggcatcaaactgtccgtccggagtgaaaaatcttctctcgacgccggcaagatcacggcggaggcgctgcaggggatcggaaacggcggcgggcatgctgcgatggcaggtggctttgtaccgtttaccggttcggacggtaaggcggtcattttgatcgaccagatcaaggagcgttttttttcgacgattgcaaagcggagatagcacagacgcagagtctgcagagccggagggcagcaattggagcagagccggaagaacgcaagtgaagcagagccggaagaacgcaagtgaagcagaagcggaagaccgcaagtggagcagaaccggagggcagggaaacggcatttcagaccttgacaatgcgggcttgcaaggcttatacttacacatagttgacaaaggcagtgacgaagacagtaagctgtggatgaaaggcaaagcgagccggggcggtgagagccggtgcgagtaagccgcagacgaagatcccttccaagccgcagcccgaaatgcagccgcagatgtggcacagcagagcctgtgtcagacaggaaggcagcacggtaggcgctgacgcttttcctgcgttaaagggaacgggtatccagattttctccggatgagattttttcaagctgcagaagcacacccagggtttctgtgcgtggagaagtctgtgtacaatgtaattaggtggtataacgataaaggctctcgtcctatttacaggacgggagccttaaatgttttattttggaggaaaaaatgtataacaaagtagacacgaacctgaattttgtggacagagaaaagcaggtaagagagttctggaaagacaatgacatcttcaagaaaagtatggagcagcgcaagcagggcgagacttacacgttctatgacggaccaccaaccgccaacggcaagccgcatatcggtcatgtggagacgcgtacgatcaaggatatgatcccgagatttcaggcaatgaagggaaaatatgtgccgcgtaaagccggatgggatacacacggactgccggtagagctcggcgtggagaagatgctcggcttaaacggcaaggagcagatcgaggagtacggaatcgagccgttcattaaaaaatgtaaggaatccgtgtgggagtacaagggcatgtgggaggatttctccgacatcgtcggtttctgggcagatatggagaacccatatattacctatgacaacaatttcatcgagtccgagtggtgggcgttaaagcagatctgggacaagaagcttttgtacaagggctttaagattgttccgtactgcccgcgctgtggaactccgctttcctcacaggaggtggcgcagggatataagacggtcaaggagcgttccgctgtggttcgtttcaaggttgtcggagaggatgcctacttcctcgcatggaccacgacgccgtggacacttccgtcaaacgtggcactctgcgtgaacccggaggatacctactgcaaggtaaaggcagccgacggttatacctattatatggcggaggcactgctcgataaagtgctcggacggcttggaacaccagccgaaaagggcaaggacggcgagccggatacgccggaggtaaaggcttacgaggtgcttgagacctataagggaagcgagcttgagcgcaaggagtatgagccgctgtacgcctgcgcaaaagaagtggcggacagacagcacaagaagggatttttcgtgacctgcgacacttacgttacgatgtcagacggtaccggaatcgttcacatcgctcctgcatttggtgaggacgatgcgaatgtcggcagaaaatatgacctgccgttcgtgcagtttgtagacggaaagggtgaactgaccaaggagacgccgtatgccggcattttcgtgaaaaaagcagacccggaggtgttgaaggatctggaggcacagggcaagcttttcgacgcgccgaagtttgagcatgagtatccgcactgctggagatgtgatacgccgctcatctactatgcgagagagtcctggttcatcaagatgactgcagtgaaggacgatatgatccgcaacaacaacacggtcaactggattccggaatccatcggaaaaggacgtttcggcgactggcttgagaatattcaggactggggtatttcccgtaaccgttactggggaactccgttaaatatctgggagtgcgagggctgcggacatcaggagtccatcggcagccgtgcggagctggcagagaaaagcggagatccgaaggctgcggaggtagaacttcaccgcccgtatatcgatgaagtgacttttacctgtccggactgcggcaagaccatgaaacgtgtgccggaagtcatcgactgctggttcgattccggtgcaatgccgtttgcacagcatcactatccgttcgagaatcaggatctgtttgcgcagcagttcccggcaaaattcatttccgagggcgtggatcagacccgtggatggttctattccctgatggcggagagtacactgttattcaacaaggctccgtttgagaatgtcattgtcatgggacatgtgcaggacgagaacggacagaagatgagcaaatccaaaggaaatgcggtagacccgtttgaggcgctctctgcctacggtgcagacgcgatccgctggtatttctacacgagcagtgcgccgtggattccgaagcggtttaacggcaaactcgtgcaggagggacagcgcaagttcatgggtacgctctggaatacctatgcattcttcgtgctgtatgcgaacattgacaattttgacgcatcgaaatatacgcttgactatgagaagctttccgtgatggacaaatggctgctctccaagctgaatacggtgattaaggaagtggacaacaacctttccaactaccgcatcccggaggctgcaagagcgctggatgattttgtcgatgatatgagcaactggtatgtcagaagaagccgtgagcgtttctgggcaaagggcatggagcaggataagatcaacgcttacatgacactctacacagcgcttgtgacgatctgcaagtgtgcggcgccgatgatcccgttcatgaccgaggatatctatcagaatctggtgcgctccgtggatcagacggctccggagagcattcacctgtgcgatttcccggtggcaaacgaggtgtacatcgatgcagagcttgagaaaaatatggatgaggtcttaaagatcgttgtcatgggccgtgcatgccgtaattccgcgaacatcaagaaccgtcagccgatcggaaacatgttcgtaaaagctccgtctgcactgccggagttcttcgtggagatcatcgaggatgagctgaatgtgaaaaaagtgacatttacagacgacgtgagcgcttacacaagctacacgttcaagccgcagctgcgcaccgtcggaccgaagtacggcaagttcttaggacagatccagaaagcactcgcagcgcttgacggcaatgcggcgatggcagaattaaaggcaaacggcgtgcttgcacttccgtccgttgacgagtctgtcaagctggcagaggaggatctcctgatcaccatgacgcagatggaaggttatgtgaccgagggagataacaccgtgacagtggtgctcgatacgaacctgacaccggaacttatcgaggagggctttgtgcgtgagatcatcagcaagatccagaccatgcgtaaggaagccggattcgaggtgatggatcagatcacgatctatcacaagtcagatgaaaaagtatctggtatttttgagcagtatggtgatacaattaaatcggacgttctcggcgtgaatgtcgtggcggatgcagccggagcatttgcggatgagccggaagtttacagcaaggaatggaatattaacggcgaacatgttcttctgggagtgaaaaaaggaggaaactagatgaaatcaggtgtttttgacaagaaagcctttattcagagtgtgcgcgataatctgaagaatttataccgcaagacattggaggaggcggatcagcaggaaattttccaggcggtctccttcgcggtcaaggatgtcatcaatgacagatggcttgcaacacagcaggtatttgacaaggaagatccaaagatcgtgtactacatgtcgatggaatttctgatgggacgcgcgctcggcaataatctgatcaatctgaaggaatataaagaagtgagggaagcgctggatgagatcggcctgaatctcgatgtgatcgaagatcaggagccggatccggcactcggcaacggtggtctgggaagactggctgcctgctttatggattccctctccacactcggatacgcggcttacggctgcgggatccgttatcgctacggtatgttcaagcagaagattcaggacggctttcaggtcgaagtgcctgataactggctgaaaaatggttatccgtttgaactgcacagaccggagtacacttacgagatcaagtttggcggacatgtacgcacggagagcagggaggatggaagcctgcgttttgtgcaggaggattatcagtcggtgctggcgatcccgtatgacatgccggtggtcggatacggcaacaacgtggtcaatacgttaatgatctgggatgcggcggcaaaggattattttgagctggattcatttgataagggagattatcagaaggcggtcgagcagcagaatcttgcaagaaatctggtggaagtgctttacccgaacgacaatcatgttgcgggcaaggagctccgcttaaagcagcagtatttcttcgtatctgcgagtgtacagcgcgcgctggcgcgttacaagaagaatcatgatgacatccgcagactgccggagaaggtgacgttccagttgaacgacacacacccgacggtgacggtggcagagctgatgcgtattcttgtggatgaggaaggtctcggctgggacgaggcgtgggagattaccacgaagacctgtgcctacaccaaccatacgatcatggcggaagcactagaaaaatggccgattgagatttttcagcggctgcttccgagaatctaccagatcgtggatgagatcaaccgccgttttgtactgcagatccaggaacgctacccgggggatgacggcaaggttgtccgcatggcaatcctttacgacggtcaggtgaagatggcgcatctcgccattgtagccggttattccgtcaacggtgtggcaagactgcacacggagatcttaaagaacgagcagcttcatgatttttatgagatgttcccggagaagttcaacaacaagaccaacggcatcacgcagagacgtttcctgatgcacggcaatccgctgcttgccgactgggtgacaaagcatatcggtgacggctggatcacagagctgatgcagcttgcacgtctggttccgtatgcatcggacgcaaaagcccagaaggagttcatggagatcaagcgcaggaacaaagtgcgcctggcagagtatatcaaggagcataacggcatcgaagtcgatccggattccattttcgatgtgcaggtaaagcgtctgcatgagtataagagacagttcttgaatattctgcatgtgatgtacctgtacaatgagttaaaggcaaatccgcagatggatttctacccgagaacctttattttcggcgcgaaagcggcggcaggatatcggaacgccaagcttacgatcaagctcatcaacagtgtggcggacgtcatcaacaacgatgcggacattaaaggaaagatcaaggtcgtattcatcgaggattaccgcgtgtccaatgcggagtggatcttcgcagcggcggatgtcagcgagcagatttcgactgccagcaaggaggcatccggtaccggcaatatgaagttcatgttaaacggtgcgctgacactcggtaccatggacggcgcgaacgtggagatggcagaggaagtcggaatggagaatattttcattttcggcatgagctccgaggaagtcattgcgcatgagcgcaaccgcgattatgatccgatgcagatctacaacagcgacgagggtatccgcaaggtggtaaatcagcttgtggacggcacattttcgccgaacgatccggggttgttccgtgatctctacaattcactgctcaacacgcagtgcacgcagtatgcagacacgtattttatcctcaaggatttccgttcctatgtggatgcgcagaagcggattgtggagtactatcaggataagcaggcatgggcgaagagcgctattttaaatacggcccacgcaggcaaattctcttccgaccgcacaattcaggagtatgtggatgagatctggcatctggatcacatcaccgtgccggatgcactggttgcgaaaatgtgaagagacaccgcaccggaaatgctccggaggcggatgaggaacgttctccttcgacagaagagaaaaagatcgtgattccggaaaagagccggctctgatgaaaggagccggcggcggaaccatagagaagattcagaataaaaacggcggcagtccggcggagagtatccgcgggactgccgccatcatttttttatctgccgcgcaaagtgtgcggcaggcgcacgcttcattccttcgcaggaaaatgatacttagcggttcatctcaggctggaatccggaagtatccttgtgctgtgcgatgatgccgtcgatttcctcgagatcggtaaagaccatatcgccgataacgctgtgcttgatggctgccatggcgttgccgtactccaacattttctggcagtcgtgatgtcttaggtaaccgtagagagcgccggagacataggcgtcaccgcttccgatccggtcgaccacatcgatgctgttgtaaggagattcactgtagtagcggtcttccttcgcagagtagatgatggaggtaaagtcgtgctttttcggagtgatgacagtgcgctcagtcgaggcaaccacggagatcggatattcttcacagaaggacttctgaatctcctcaatcgtgccggtcttgccgaaggtcagacgggcagtgtcggcggagcagaaaaagatatcgacatacggaaggatggattcgatgcattttcttgcctcctcgccgctccagaggttcgcgcggtagttgacatcgaaggagatcagggtgccgttctccttgaactttcggatacattcgatcgcaaacttctgtgcgttgccgccgagtcctaaggtgataccactggtatggaacagtctggtgttgtagaacatggtagccggaacgtccttgatgtcaatattgttgatggatgaatgttttctgtcatagaccacacgcggctttctcgggtaggagccgtactcgtagtagtagatgccgacgcggctgtcgtccgagtgatcctcgatcagataattctcgctgacgcgggaagcgttgagctggttcttgatgaaagcggccagcagattgttcggaatctttgaaatgattgccgtcttaaggccgagctgcccgatctcggaagcaatgttgagttcagcgccgccgaggtgcttcatcagcgtatcgccctgtgcaagacgtccgttgatcggcgtggaaagccggagtaaaatctcccccaaagtgatgacatcgtatttacggtccataaataatctcctcctgatgatgtaagaataaataagaaagtaaaaattccgacacgtcacggcatctcaaaaagaatgttttatgagaaaatgcagcacactgtgtctatggatacgatatgtgtgttccacattacgaaacatagttctgtaatgtgaaccaacctgtttttattatatatcatcctgctaaaatagaaaagtgaaaatcggaaataatttggaatttttttggacttaaataaaaacatatttgacattctggtattagatgttataattttattatagaaaatgaaacacggtttcacatagtgaaacatacatttaggaggattcaataatggcaaagaaagtcgttacatttggtgagattatgcttcgtcttgcaccggaaggatactatcgttttgtacaggctggtacctacggcgctacttacggcggcggtgaggcaaacgttgcagtatctcttgcaaactacggaatggatgcaagctttgttacaaagcttccggctcatgagatcggacaggctggtgtgaatgcattaagacagtacggtgtagacacttctgatatcgttcgcggcggtgaccgtgtaggtatctacttccttgagaagggtgcaagccagagaccgtccaaggttatttatgaccgcgcaggttcttccattgcaacagcaacgactgctgattttgactgggataagatttttgacggtgctgactggttccacttcacaggaatcactcctgcacttggtgacaacgttgcagcaatctgcttagaggcatgcaaggctgcaaaggctaagggcattactgtaagctgcgatttaaactaccgcaacaagctgtggtccaaggagaaagccggacaggtgatgggcgagctttgcaagtatgtagacgtatgtatctccaacgaggaagatgcaaacgacgtattcggcatcaagtctgagggtacagaggttaccgcaggcgaactgaacaaggaaggctacaaagaggttgcacagaagttaacagaccgttttggattcaagaaggttgcaatcacattaagaacttccatctccgcaaacgataaccgttgggcagcaatgctttacgaggatggtcagagctacttctccaaggagtacttaatgcacatcgttgaccgtgtcggcggcggcgattccttcggcggcggactgatctacgcttgcttaaacgactacgatccgcagtctacgatcgagtttgcagtagcagcaagctgcttaaagcattctgttgagggtgacttcaacatggtaagcgttgacgaggtcaagaaactggctggcggcgatgcttccggacgtgtacagagataatagcgtaagctgtcatttcaaataatttaagttaattcctttccctaatttaatataccaagaggctgtggtttccctgccacagtctgcagcacagtgaatttttacccatttgagctgtgcagaagagagcgccccgcattgcggggcgctttttgactttatgggattagggtgccgaaagtacagtttaatatttgaggttgtttgtaccttgaaaatttaacacgtattggtaaaagatatgatttataaatctataattcattgattacttgaaactgtagttcattgattttatgctggtttcttatttgaagcacactgttctaagctatttgcataatctaatagcttttgaaaatctaatgctgctattttgaatctgaagaataagcgcgtacgtttttggggcacaagtatctttcctattcacatggtacctttggcggagaagagatgaaattgcctcaattctatttctaaattatgagtattcagagaattcttctgtttgcatgtatgtaattgctttgtacaaccagcggatttccaaaatactccctttcgcacccatgtttttagaaaaacacgttctttgggtacacaattattcttacatttgatgagatatttaccagcatctataaaaacaaaatccgcatatatttcatctggtttgcgtcctgtgaaattggttgtaacaggctttagattatgtcctgatgctaaacgtgagttttgttcttcgttgtatgttccatacttaaattcattttctgcataaacctcaaaggtttccgcgacgtttatctctgagttttactccagataatcgttcagacaggtgacgaacagtgcatccccaaacaattagcaaagccgcccgattcccggacggcaaattggcataggatgcattttatactccccaaagcagtatgccgagtgcggcagaaaagagtatcattataatcggcgacggtgcagtttttttgattcttttatatccgaaatgtgtcagccacagaatggcaaagaccaaaatggatttaggatccggagcaagcgccgaataaatatccgtaaaaccaagcaatgttgatatggtcataccgattgccgtagcgagaatcattgcgataacgcaggggcggacgccggagagaaaagcgttgacaccggcatatttcatcaggtttttgagtaccgccgcaattaaaagtataataatgaaagacggaagaacaacgccgagcgtagcaagaaacgagccgagaatgccaccttgcgtggaacctataaatgtcgccatattaacggcaagcggaccgggcgtcgattccgaaacggcaatgaaatttaagaattcgctttccgttagccagccgtttgaaatgactgtttctcttacaagggaaaccattccgtatccgccgccgaaggaaagggcaccgatcattaaaaaattcaggaataatttcaggtagatcattgttaattgccgtttcctttccgcagttttttcaggaagaaaatcgcaagtcctgctgtaccgcaaatcagaatatagtaaacggaagaaaaagaaacggcgaaaacagtgcacgccagcattgcagcaatgaccgacagcaaaatgaccgtgttgaaggcatttctttcaatggttttcagcattttcagcccggcagaggaaatcagatagatcacacatacctgtattccgcggaaagcacgggaaacccatgtaaggcttaagaattgatcaaaaaacagtgagatgcaaaaaattacggtaaacgaaggaatacaaaccgccacggtagccgccgcagcaccgaacaagcctgcaattttgtagccgatatatgtggcgctgttgattgcaaccggtccgggtgtagactcggcaatggctaccatattcagaaagtcgtcctttttgatccacttcttgcgttctacaaattcgttttcaagcaacgcaatcatagcatatccgccgccgaaggtaaaagcgccgattttaagaaaggtaaaaaataaagtccattcttttctcattgccgcatcgcctttcttttacagataataaaaattgtaacgataccgaaaataatcaggtagccggacagcacctgtgatattaacggtgagtgaagcgcccaaaaggggaaatccgtttttctttacggtaaatcaatgcaactacgacaccgccaagtactccgccgtaaatggcaaggccgccaggattgactactaaaacagaaagcaggtcgtttttgttattatcccattcgaaaatcaaacggtatattgccacagcaaaaccaagcaccataccgtaggtgatgatgattccgtaccaagcggatattgcgctcttgaattccgaaaggattttctattgcatatcggttcaatttcttgttttctcgcttttctcagtctacccgcagcatccgataaccaacgccgatatgcgtctgaatgtattgcggactgtccttttgcagctccagttttttacgcagtgtcgccataaacacccgcagcgaggcaatatcgttttcccagctgctgccccagatctgctgtgtgatataggtgtgcgtcagaacctttccgacattatgggagagcagacataaaagcttgtattcaatcggggtaagatgcaattcttccccttttaagtaagcgcagccagcggcataatcaattttaagctcgccgttttcaaaaattggggtgtcggcatcgccacttgcttgcaggagcaacagccttctttgtgtgacacgaagccgtgccaaaagctcttctacggaaaatggctttgtcaaatagtcatccgccccggcgtcaagtgccataattttatcacgatcctcgctacgcgcactgatcacaataatgggcatattcgaccatgagcggatgctttcgatcacctgtgtgccgtcaatatccggtagacccagatccagcagaacgatatcagggttatgggaggtcgcctccataatcgcaccatgtccgttctccgcagtcagataacggtaatcgtgcgactttaatgttgttacgatcagattgcggactgggcggtcgtcttccacaacaagtataagcggtttattcattcagagtcacctcgctaagcggtaaagtaaaggtaaatacacagccgcacggcacattatccctaagcgtcagcgttccgccgtgcagttctacgatcgatttgcataaggtaagaccgatcccaaagcttctgcggctgtcggcaactgtactttttccagtgtaaaacatttcaaaaatatgcgatttcatatcgtcggggattccgctaccgttatctgcaacacggatcacggcgtattttccttgcttttctgcacttacgcagatctccgagccttgttcggtatatttcaaagcgttgtcgataagattgacgatgacctgtacgataagctgtgcgtccatgcgtgcaagaatcaaatcgtcacacttcaccgttaccgtgtgcccgacagacttctgcttcaaatgtgaaacggcttcactgatcacttcgtctacaagctggttggtaagctccagcttcaggcgtccgtcattcagccgtgtaacatacaacagattttccactacgtcaatcagccactcggaatcgtcatatatatctttatatatctgttgctttgtcgtttcgtccaagcagtttccgttatgcaaaagtgtgtccgcattgcctgaaatcgagcaaagaggcgtgcgtagatcatgtgagatcgacctcaaaaggtcggcgcgcagctgctcgctttttgcaagatctgctgcccgttctttttcagcagcgttgtgtgtattatccattgccagagcacattcgttcacaactgacagcacgatgctgttttcgaatgaatcgggcttttcaggtctcatcggtattccgatcactccatagactctgctccctgcacggatcgcaagataaagacattcggattttccgaactgtgctgttgttgctcctgtacggcgaccgttttgaaatgcccattctgcggctttctgctctgcatcgttcagtagattttcagagtatgtatactttttttcggcgaaaagccgtccggtcgacattccattttcactttttgtataagcaacaatactgcggtcaagcagccgagagagctgcatacaggtcacacttaagatatcatcgttgcttttcgctttttgcagcagacggtcggtgtcgaacagcacctgcgtgcggaacgcagaacgagctgaaagtctcgcatgatccttaagcttcgaggcaagcgtgccggtgagaacggaagctaccagcatgacggcaaaggtaacgggatagcctacagcataggttttgaatgatagctgtggttcggtaaggaaaaatccgaacaatacaacacttaaaagcgagcctgccatactgcaaagatatcctttggtcaaaacggagaccatcagtacgccgagaatgtagaccgtaacgatatttgtgtcggggaaatcgagatgatcgaacaaaaaaccgatcgccgtgcatacggcaagtgacagaacggtcacgccaatatcccgcaacgaaggtgtttctgcaccgaaaagcaaacggcgccggtgcggtcttacatagttcagtgcgtctggaatgatatgaatatccacattgggagcgacagagatcagtttttcggttagggtgggttttccaaacagtcctctgcggcgggcgctgctttgtccgatcacgattttggtcacatctgaaagccggacatattccgaaatctgtagcggcacatcctcgccgtgcgtcataatgatctcagcgccaagcccttgcgcaagctgaatgttttgttcaagccgcagccgatttttttcgctttcaaccgaatcggtttgcacatagatggcggtaaattttgcatgaagaaccttagccatctttgcggcggtatgtatgatccgtgcattggacggtgaagaggaaaggcagacaaggatatgctcgtccgcaccgttttttggctgttcggtttgtatttgcatcggtttcaccgcctttttggtttcattatacaacaaaatcgtgaaatcttctaccgtaaactaaaacgcatcctcttttccgtcagaaaggataatatcgacttttccgtgtgtttcccgaaaatggcggatctcgcttaatatctcactgtcggacagtccttgcggcagcaaaatttcggaaaactcacggaatttgttctcttttaacagcgccttcctgtttttctcaagaaatcggtccagcctgctcataagataaaagccgaaagcaaatatgccaagcaagctgacaatcagcaatagttcagccaatgtcgttcacctctgttaaatgcgaaagcacctttgcagttctttataagcaccgagaaccaaaagtgtgatcttgtctgtaagaacagtttccggcgagactgccatattgatttttctgttctccttagtcgccataatattgatgctgtatttcctgcggatatcaagctctccgacggttttgccgatccattcctctggtacctctacttcaaaaatggcatgagaatcatcaacctcgatgtaatcccgaatgtggtcggcggtataccgaatagaagcccattttgccacctgtttttccgggtaaacgacctcgtccgctccgttgcgcagaaggaattttgcctgtacatcacgctcggcgcgggacacaactaattttgcaccgagttctttcagcaaagaagtagtttcaagtgagttttgaaaattacctccgatggtgacgatgcatacatcaaagttgccgataccgagcgactttaaaaactccgtatttgtgctgtcgccgatctgtgcattggtgacgatcggcaggatttcatttattctttcttcgttgctgtctactgccatcacctcatgcccgagtttgttcagttgcaaagcaatatgcttaccgaatctgccgagacctatcaacaatatgtttttcataacagtaactcctttatccgactgtgatcttttcgagcggcagttttgcaccgctctgatttttattagagatcgccgcatagatcagggtaagtccaccgactcttcccagatacattaagacgatcaaaataaactgagaaaaaacactgagctgcggcgttacgccgagcgtaaggccgaccgttccgacggcggatgccgtttcgtaaaggcaggcgctaagcggcatgccttctgccgtgctgataataatgccgccgataaaaaataacaggaaatatattacggcgatggttgaggcgctttttaccgccgagcattcaagccgtctgccatagacttcagtatcgttttttttacggcagacggaaaatgcgttcaagatcagaacggcaagcgtagtcgtttttataccgccggcagtggaaccgggtgagccgccgacaagcatcagcaggatcataattgctttggaagattcagtcatggcggtaaggtcggcggtgttgaatccggcggttctcggtgtgacagactgaaaaagcgaggcaaggatcttctcaccgggcggcagtcctgtgaaatcgaagaggaaaaaaaatattgcggggacgataataagaatcaccgatgttactaatattaccttgctttgcatacggtattttttgaaatgccacctgtttgtacagatatcatcccaagtcaaaaagccaatgccgcccacgataattaaaatcataattacaatgtttattgtcggctctccgacgtatcccgtaagagatggatatttgttttcggtggtgccgagtatgtcgaatcctgcattgcaaaaagcggagaccgaatgaaacgccgccatccaaattcctttgaaaccgtgatctctgcaaaataccggtagcatggcaaccattccgataagttcgatcagaaaagtcccacgtacaataaagcgagtcaggcgaacgatgccgccgacttttggggctgaaatggcatcctgcatggtgctgcgttgcatcagcgatatttttctgccggaaagcatggcaaatgttgcagcaaccgtcacaacgccaagtccgcctatctgaataagcagcaaaatcaccgcctgcccgaaagcggaccaatagctgcctgtatcctgcacaacaagccccgtaacgcaaacagcggaggttgaagtgaacagtgcctcatgaaatggtgtaacagatccggtgtttgatgaaaatggtagcatcaagataagtgctccaagtacaatgactccggcaaaacccagagcaatcagcttaaaggatgacagccgtttttttctatgtataatttcaagcatatatatttctcctttttctgcttgcttacaaagagtataacgtgaaatataaaaaaaaggtgtaatgatctggtttactgtattaagatcgtataaagatgctcatgctaaaaaaatagtgcagcgtatattaaacggcacagacaaagacaacttgcttgaaactgttgtgcagctcgaaacagaacaacagtttcaagcaatttgaaaaagcagatgcagagattttggacagacgtgaacaatacaccgcctcctactcgattgggagaattcatccctgtcacacaaaaatacgttgtgaagatgcgtgaccgcgcgaatgggaagcatgccgcatgaccgcgcccggcgcaaaaattctgtgacaggagtctgttttacttcctattttggcaaatatgtacaatcatacgccgcctgttttctggcaatagttacgaaaattggaaaaaagcggaaaatattgattaaatcgggatttttcgtgttaaaatagaaatggatgctttaaaactgtgatgaaaggagaatcggggaagatgtttgagatcggtgagtatattgtgtatggagtgaagggtgtatgccggattgaggatattacccacattgacatttccggggcggacaaagaccgtttgtattatgttcttgccccggttggcgatggcagtggaaggatctatgcaccgacggacaatcagaagattacgatgcgcaaagtgatttccagggaggaagcggatcagctgattgaggatatgcctaagatcgagcagctctgggtgccggatgacaggcagagagaggcgagatacaaggaggcaatgaacacctgcgattaccgtgcgtgggtcagcattgtaaagacactatacatcagaaaacaggagcgcacggcacaggggaagaagatcacggcgctggacgagcgctacatgcggacagcggagaatgaactgtacagtgaactctcgctcacactcggcataccgaaggatgagatggagcagtatatcagagagcggctgacgcaataaacgctgtgcctgcgtctgaaacaggattgttatgaaaaacccgtcatgaaatgagaaaggaaatcatttcatgacgggttttatgcaaaataggatacggtggcatgaatgccgtcactgctggcttctgccggtatggaacatattccatacgtcatcgattgcatcgatccgtattatacggtggtattgacaccgttgacagcggcgtgctcatcttcgtccatcggaatgaccagacatttctgcccgtcgatgacctgggagtgaatctgtccgactttttccggcttgacgcgcaggatgacatcgtaggtcttgacggcagggacatcttcgccatcggcatctccctccgagaccggaacggagcgcgtctcctcgagctgttgctttaagttttccacctgctttaccagctccagcttttctttgcgctttccgttggcttccacaagcttcggatcaactaactgtccggcttccggaagttcctcgccaaatacattttcataggtgttctcaatgacggctgcctgttcctcggtgacaccgctttctgcaaggacatctgcaatggcggatctggtaacgatgaccggttccggttccaccgtctcgtcctccgtgaccggaatcatattgttcagattttcctggatatccccgaagacagcgtcgctctcttcctcatcctcaccgatgacttctttgacgatgctctggaatgtcagctttttctcggtggcggtcagcttggtgccacagccgagaccggattccatgaattccgcgtgcggtgtcttggtatccctggtgtagaacatcacggagtgaatatcgctgctgcggtcggtaaatgccggaaaaacgaaaccggtgtccggaacgccgaccacccagtcgcggatgcgcggcccgatacggttctcgtcctcgcggtagccaagccccggcttggtcagagtgaccggacagatcgcacacagcagatactcgtagacttcctcggattcgtcgagcttattattgtcggaggttttggtcatgacatcgtaagcgtcgtggaaaaccagaatcagataattcccgacataactgtaattctcaatgacaagatcatagaatgtgtccatcagatcgtcgttttttaaggcgctctcgcgcagccccatcaaaaactgctgtcttccgccgggtgcctcctcggcggtcggaaactccagctccagaatgttgttgccgatcgtgccggacatgactttttttgcaatttccaggtatttatagaattcctcatcctccagatttaagaaggtctccccgaaggttgtgaccttgttgcggtctgcgtctacgtagcatccgcagagtctggtgaaggtgcaggcatcctttttaaaacgtctttttaactccaagatatcttttttattcatatatcatcccatgcctttcgtaaatcgtgcacaagatattatagcgaaaaaatgggtggtgtgcaagaagaatggaatgtggacacgggagaaatggaatgtggacacgggagaatggaaaggtacttgccggtgcagaaaagtacaggtataatggatagaagtggcgcacagcgctttttaataagaaaatgactgtatgcaggaagtgggcggcaggcagcgacagagggtggattgatggcaaaattatattattactatggtgcaatgggaagttctaagacggcaaatgcgctgatgacgcattttaactatgaggaagtgggacagaaagcgctgttatgtaaaccggcgatcgatgccagagatggcgagcggacggtatattcaaggatcgggcttcaacatgactgcattctgttagaagaactgcagcagatgaaggaggaggagattcgcggatatgactgcatcattgtagacgaggtgcagtttgccacgccgcagcaggtggattttctgtctgatattgtggattttatggatgtgccggtggtctgttatggactgcgcgcagatttccgtaacctgctgttcccggggagcgagcgcctgattgcgattgcggatgtgatccaggagttaaagacggtgtgctggtgcggcagaaaagctacctgtaatacgagatacaacgagcatggtattgtgcgctctggcccgcaggtcatgttaggagcaaacgacagctatgtggcgctctgcagaagacattttaagctgggaatgttaggacccgatgccgaagcaaaagaacagtgtgcggagtagaaccgtttctgtttggaaagcgggcaggtttacgaggcagggaatggaaaggaatacgatatgttagaaacggaacggctgctattgagaaagtggacagaggaagacgcggacagtttatttgaatatgcaaaagacccggaggttggtccgattgcaggatggccgccgcaccggtcaagagaggaaagtctggatgtgatccggaatgtactaaacggcagagagtgctatgcgatctgcgaaaagggaaatccaaaagcaatcggtgcgattgaactgatattaaacagacataacgatacggaaaatcatgacgaggaatgtgagctggggtactggcttggaaaacctttctggggaagaggctatatgccggaggcagcaagagaaatgatccgtcatggatttgaagatctcggcatgaataccatatggtgcggatattttgagggcaatcagaagtcaaaaagagtgcaggagaagattggctttgtatatcatcacacacgggaaaaggtatccgtgccgttaatgaaggaagtgcgtaccgaacatcgaaatataatgacgaaagagcgctggatggcggagagagaaaaaaattgtggaaaagtatgaacgagatattggtaaagcagctggcgattgatttctgtacagaggaaggagcagttaccagcagggaaaatatcttcactgtgtataccccgctgcagggacgcaggatttttgaagaaggggaatgttttctgaagattgcctgcatcaatggcaagattcttgcatccggtaagaaggatattattgcatgggtgagggaaacatttaaagacagaagcggcgcctggttcatggacgtggaagctttacatgagctggaagcaggtttaaaaatgtttcactgccagattgcacaggctcatccattttatattgcgaccgaaatgtccgaggtagacacgaaagattatgagatccgaatctttgagggagaagaactggagccattcagaggagatgaacgctttggagaagcatttctctttcatgagctgccaaaggatgaaattggggtaggagcttacagagatggcgtccttcttggcatggcgggcgctacaagcgacagcgacagcatgtggcagattggaattaatgtgatgccggaggcagaaggacttggaataggttccatgcttgttgcggtcctgaaaaacgagattttaaagcgcgggaagcttccgttttatggtacctcaatgtcacatatagcatcgcagagagtagcacttggggcgggatttgtgccgatgtgggcggaactgtattgtaaatcctgcaagtaaaggagaaggactcggtatggaaaaatgacatccatcggaagccgaatgtcattataaaaagttcggaaaataagacatat

SEQ ID NO: 11593 - DNA, 1627 bp, Unknown
  gut microbiota DNA sequence
cacattctgctgctgccgcggcacattcggtttcacacgctgtccgctctttccctgtaatttcctgatctcctttatcaccacgatcatcacaatgatccatatcagtccgcccatagcttcccccttattccaatcatcttttgttcctgtcattcatacagagcccttcgccccacttattcttattatagtgttttcttttttgtttctcaaccagaactttcctccgcggtacagttcttctgcatccgctctccctttttgcctcattttgttattttaaatatcatcattatccaatattgcttttattttcgccttgtggtatgattttatcagattatttttccagatatggttattttaaataacatgtaaggaggagatttcatgaagaaattatcatctgtgattctggcggacctcgtcgccagcaagagaaaagagaagtccatgacacagcaggctctcgctgaggcgaccgggatcaaccgcgccctgatctcaagaattgaaaaacaggattttatcccgtccatcccgcagttagaacagctgggagaagtgctcggctttgagccggacagcgtttttgccgataccgcacacgacaggcttccctccccgtcgccgttacgcattgcggttgccggcaccggctacgtcggactctccatcgccaccctgctcgcgcaacacaaccatgtgacggcggtcgacattcttccggaaaaagtcgatctcatcaaccggcgcaaatccccgattcaggacgattatattgaaaaatatctcgccgaaaaagatctcgatctcaccgccaccttagacggcgccgcagcatacagggacgccgattacgtcatcatcgccgcaccgaccaactacgacagcgccaggaattattttgacacctccgctgtggaggccgtgattgaactggttctctccgtcaatccggacgcggtcatggtcatcaaatcgacgatcccggtcggctacacggaatcggtacgcaaaaaataccacaccgcaaatatcatcttcagccccgaatttctccgcgagtcgaaggcgttatatgacaatctctatccgagccggatcatcgtctcgaccgactccgacgatgcgcggctttctgccgccgcgagaaattttgccgcactgctgcaggagggcgccctcaaggaaaatatcccgacgcttttcatgggatttaccgaggcggaagccgtcaaactttttgcaaacacctatctggcgctgcgcgtgtcctatttcaatgagcttgacacctatgcggagacgaaaaacctaagcacacgcgacatcatcgacggcgtatgtctcgacccgagaatcggcacgcattacaacaacccgtccttcggatacggcggttactgtctgccgaaagacaccaaacagcttctggctaattacaatgacgttccgcagaacatgatgagcgcaatcgtggagagcaaccgcacccgcaaagattttatcgccgaccgcgttctgcagatggcaggatactacaactacgcctccgccaacacctacaattccggcatggagcatccggtcaccatcggcgtctaccgcctgacgatgaaat

SEQ ID NO: 11594 - DNA, 1313 bp, Unknown
  gut microbiota DNA sequence
gtgctggaacaggcaatcgggtgcagattaaaggtgccgcagcagaaacgggcgagaggtgagtgttcctgcctgctcggcgcagacatcggtgcttataacacctgcggacatgaatgtctgtactgctatgccaactatgacagccgcaccgtccgggagaaccggctgcagcatgatccccgctcgccgcttctgatcgggcatgtgcagagcacagacattgtaaaagatgcaatccagcgttcctggaaagatccacagatgagtatttttgatttgtattaataaaaaaagtaaaatcatgcaggaggcaccacaatgaaaaaagagttgaactgggcagtattgggatgcggcgtcatcgcaaatgaaatggcacaggccttagagcatatgggaaagcatctctacgcggtcggcaaccgcacacacgagaaggcggtcgcatttgcggagaagtacggtgtgcagaaggtgtacaatgattttcatgaaatgttccatgatcccgacgtagatgtcatttacattaccacgccgcacaatacacatatcgaatttgcccgcgaggcacttgcaggcgggaagcatgtgctctgtgaaaaatcggtcatgttaaacagccgtgagcttgcggaggcgattgcgcttgcagacgaacaccacgttgtgtttgcagaggcgatgacaatctggcacatgcctttatataagaagctctggcagattgttgagacgggggatggagagattccggcactcgggaaggtgcagtttatccagctcaatttcggcagctacaaggaatataatatgaagaaccggtttttcaatatgaatctggcaggtggagcgctcttagacatcggtgtctatgcactttccattgtaagaagctttatgtcaagccagcctgatcaggtactttcccaggtaaaatacgcaccgaccggcgcggatgaacaggagggaattcttctgatgaatccggacggacagatggcggcgctgtcgctgtccctacactccaaacagccaaagcgcgctgtaatcagctgtgaaaaaggatatatagagatcatggaatatccgcgcgccgaccgtgctatcgttgtggaagcagagaccggaaaggtgcatgagatcacggcaggtgcaacggcggatgcattattgtatgaaatgacagacatggaagatgctatcttgaacggaaataccggggtaatgcgcttaaaagatacccgtgacgtcatggaactcatgaccggtctgcgcaaagagtggaacatgaaatatccgggagaaga

SEQ ID NO: 11595 - DNA, 33261 bp, Unknown
  gut microbiota DNA sequence
ttgtgttgtaaatcccccagagtttaaaattgatttttatgggcagaaagaaatttttagcttaatagatgaggatgatagcattgcaaatcaaacgacgagtccattggtaaaaatgattgatgataagatagctgcagatatgtatatgtattcagatcaaattgatgatgcaatatcgaacatgttgaagtacgctgaggagttcaaaagtaatagaaggagaattaaagaaatacctacaataaaagctgaaatggaaaaggctgacacgattttaaaaaaatttaaggcaagtggaattgaaaaagccagaagagattttgagactgttgataacaaaataaacaatattgaaaaaacatttgtttcagaattaggtaaagtaaatggggccattgctggttttgaagaccaaagaagggaattagagtcacgtattggtgaactcgataaaacggaagaaaacgtaattgagatcgagatgtttaaaaaattggcagatatcaatcaaagccttattgatgtgttgaatcaaaaaagagatgctattgaatcgatggaaaaagcatatgaagtatcgcctacttatgcgaggcgagaggaagcgcataataaatatttgagtgcgttagaagaagttagaaatactggaggggaagatattaatggtattcaagatcagctccaaaaaaatacacaaagatataatgaattggtattgttgctgaaggaacaagaaaatgtagaaaagaaaatagaggaaagcataaatgtttttgttgataaacggcttgaactatcccaaaagagacaggatgtaattgatgaactaaatttagagagtatttctattaaagttattccgttagggcatttgtcaagatggaaggcaaacttacagaaggaacttggaaaagagggaacttttgacaacgattttcaaaagttggtagaacaatctttatctgcgaacagtgattggaagggatataaagtccttttaaagtttatgttgatgactgatacaggtaatatagaagatgtgcttggaccactggcggatatgcgatttgctaagctttggaaagataaatacaacaacgatacattaagttcaatggttaaggtattcccggaggataaattacaaattaagataatagatgagaatggatcaattgatattaatgaaggctcacctggtcagaagagtgcagctatactggcatttattttgaatagtggtgagaatccattgattattgatcaaccagaagatgatttagataatagtttaatatattcacttgttgtaaaatctataaggaaaatgaagaataaacgccaaattattattgttacacataatcctaatattcccgtcttgggcgatgcagaaggaattattgttttggagcgtaataatgaggggaaagttacctttaggaaagataaaaaaacaggatgtattgaagaaaaacttattagggaaggtatttgcgaaattatggaggggggagaggacgcttttcgtaaacgagaacaaaagtatcaatataagtaagggatacagggggtaaataaaatggtaaagaaaaatggcactagaattttttaaggaacttttgctcgaggtcatagataaccccaccttccaagcttttgcaacctgaatttcggacatgcaccgcaaaaaatatacctacaataaaattagcttccccatgcagggtatgtcttgtttcaagacataccctgcatttgtgttttaaaagccatcatgctaaaatgagatacatagtgacaggcaaaaggaggttttaccatgtattatgtaccggatggcacaaagcagtgcggatattatgaatgtaaaaagtgcgggaatcggtttctgtccttgcagacgatgacgcggattccctgtccggattgtgcatcggaggttgattatgagatcgggccggatgaaacgcttgcggacgtgacagatacggcagtgcttctgcagaaaatcgagggcgaggaggaagtggcgaaaatggatgcgctcttaagtcttgcgattaccggcggagactttaactggatttaagaaaagatagaacgggcagtggatgaaacagataagacacagaacaggagcggtgacagagatggaacagacaacggcaaaaaagaataaatacgagattgatatgtgcaatggaacgattatggacaaattgatttccttctcgctgccgcttatgctgtcgggtattttgcagctgatgttcaatgcggtagatattatcgtggtgggcaggttttccggcagccaggcgctggcagcggtgggatcgaccagtgcgctcatcaacgtgttcacgaatctgtttatcggaatttcgctgggggcaaatgtactgacggcgcgtttctatgcggcggggcgtgagaaagaggtatctgagaccgtacataccgcgataaccctggcactggtcagtggaattgtcatggcgctggtgggacttgttttttccaagggagcgctggcgctgatggggacaccggacgacgtcatcgggctgtcggcactttatatgcggatttattttctgggaatgccgtttttcatgctctacaattatggcgcggcgatcctgcgcgccgtcggggacacgaagcgtccgctgctgtttttgatgattgcgggagttatcaacgcgtgcttgaatatggtgctggtcattgtgttcaagctcggcgttgccggtgtggcgatcgccacggtgatctcgcagatgatttcctgtgtgctggtgctgcggtgcctctaccggtcggagagcagttaccggctgcgtttttccgagcttggcatgaaagggtactacttgaagcagatcttttcggtcggcgttccggcaggaatccagagtacggtcattaacttttccaatgtgctcctgcagtcctcggtcaattcgttcggatcgacggcgatggcaggctacacggcggcaaacaatctgctcggcttcttgtatgtctcggtgaactccatcacacaggcgtgcatgagctttaccagccagaattacggcgttggaaaattaaagcgcatggatcgtgtgctggcagactgcatgatcttatcggtcgtggtcgctgtagctttgggatgcatctgctatgggttcggaccggaaattttacagatctacacggaggatgccgaggtaattgcgtgcggtatggagatccttgcatacacgacgatcacctattttctttgcggctggatggatttgttcccgggggcgctgcgcggcatgggatattccgcggtgccgatggtgttgtcggtcatcggaacggttggtacgagagtggtgtggatttttggcatttttccataccacagatcactggcgattctgtttatatcttatccagcgtcgtggattatcacgattgtcctgcaggtaatctgtttttactttgtgagacggagagtgcaccggagaagtcaggcgctcgccggacaggaagcctgattcctcaatcagccaggaaacccagtggaaagtgacaggtcatctgtcggaactctgccggatcgaggcaaaagcccaatcccggaatccgacaggaaccccagctcatagtccagctcatataactacacggagacaacgatggaagcatattattacagcaaaatggacaaaacaaagcaggcggtatatcatgcgatgctgcagggactattggcgttggaggattccattccgatgccgcgccttgaggcggaggatctctatcaggtatttttcctgctgcggctggatcatccagagattttctgggcgaccggctacaagtaccggtattatccggagtcggcgaaccttgtgttcctgccggaatacctctttgaaaaaggcaagatcagagagcaccagaaggcgatgaaggcgcgggtggaaaaactggcgcgcgcggcgcagaatctctccgagtgggagaaggaaaaatacgtccatgactttatctgcgaaaatgtgcactacgataagttgaaaaagccgtattcccatgagatcataggtcctctcggacagggtgtgggcgtctgtgagggaatcgcaaagtcagtaaaggtgctttgcgctgcacttggcgtctggtgcgtgattgctctgtgcggaaactgcccagagaaggggatcaaataccgccatacgtggaacattgtaaaaatcggcgggcagtattatcatctggatgccacatttgacaacacgctcggtgcgggagcacagatccggtacgattatttcaatctctgcgacaagagcgtatttcgggatcatcagcccctgatcgcgcctgcgccggaatgtacggatgcacagcatttttattatcgggagaaaaagctttccttcacgaaggtggaggatgtctataaacgtgcgcttcagacagcaaaaaaaggaaaaacgtttacctttcactggaggggcgggtatctcaccagggaggtcttgggggaactgttagaacagatttccgcggccggcagggagcggggaaaaagcgccagagtcagtgtgaactggcagcaggcggtgctccggttcgattatgtggaggcgggcagcgcgccggaggcgagtgttgtgatggaagaagcaaatgagggagaaaaagaatgacggaagacttactggaacagattcagagaaaagacgcggcggcgtttacacacggagggaaatttcatgcagacgatgtgttttccgcggcgctgctgctttacctgaatccggagattgtaattacgcgcggcaacagggtgccggagaattttgccgggatcgtgtttgacatcggaagaggacggtacgaccatcatcagaaagacagccgggtgcgggagaacggtgtgccctatgcggcgttcggactgctgtgggaggaactcgggggagcaatcctcggggaggagctggcggcggaatttgacgaggcgtttgtacagccgttggataataacgacaataccggggagaaaaacgagctggcgacgctcattggcaattttaacccggcatgggatgcgcagggcggaagcgacgccgccttttttcaggcggtcagcgtggcgggcatgattcttgaaaataaattcgagcgctatcgcggaaatgagcgcgccgaccgtcagatcgaggaagtgctggcggcgcatgagcgtgccgtagtgtccggggagatggcggagcgcgatgccgcgattctgatattgccctattttatcccgttccagaaacgcctgtcggagaccgggattgcgtttgtgattttcccgtcgaaccggggcggatactgtatccagccgcagaagcgggagtattctctccattataagtgcagctttccggaatgctggctcggactggaaaaggaagaactggcggaggcatcaggtttagagagcgccgttttctgccataagggcggttttctcatgacggtcggggaactttccgatgcagtggaggcatgccggatcagtctggacagctttaaggaggagaaggcgtttgtaaacgtgggcggcggagagacagcggatgaacttttaagagaactgccggggatggcggaagcgcagatctatcacatgccgctgccagagttgccggaactggaacaggacggcagttacggtgaagtggcgatggaaaaagccgactggaagcttcggaacaaggattatgtgaaacagatcctgcagtgccggccggaggccgtttacgtcgagggggatgtatttgcggcatatccggtggtgcatctgctccggaaaaagcacgtgccggtgcttgccatggcggagcgcggcggggagcggattctcgtgcggattccgtccggttcctagatgggacttgtagaagacaagcgaaaagtgctatgattcttatgcaatgtggaatatgctttcaggaatttctgcttccggcgaagaggcaggaaaatcagatagacataccaaggaggaatggacaatggcttgtacaacgattttagtggggaaaaaagcatcatatgatggatcaacgatgattgcgcgcaacgacgattcgggttcgggacattttacaccgaagaaatttgtggtcgtgcatccggaggagcagccgcgacactacgagtctgtgatttcacatgtgaagatcgagctgccggagcagccgatgcgctacacggcggtgccgaatgcggtcgacggggaaggcatctgggcggcaagcggcgtgaatgaggcgcatgttgccatgacggcgacggagacgatcacctcgaatccgcgcgtgctcggcgcagatccgctggtggtataccagaaggcagaggatggtcagccggagatctgtggagggatcggcgaggaagatcttgtgtgtcttgtacttccgtatatccgcagcgccagagagggtgtcagacgtctgggaagcctgctggagcagtacggcacctatgagatgaacggcattgcatttcaggatcaggatgagatctggtggctggagacaatcggcggacatcactggatggcgcgcagagtgccggatgatgtctatgtggtcatgccgaaccagcttggaatcgaccggtttgatttttccgatgccctcggggagcagaaggaatatatgtgcccggcggatctggaagaattcgtaaagacgtatcatctggatctctcacaggatggcgagtttcatccgcgcgacgcgttcggcagccatgacgatgcggatcatgtatacaacacgccgcgtgcgtggttcatggagcgctatctgaatccgcacacgaaggtgtgggacggaccgcatgcggatttcacaccggtttcggatgatcttccgtggtgcatggtaccggagaaaaaggtgacggtggaggacgtcaaatacgtcttgtcctcccatttccagggaacgccgtatgatccgtatgccgcttacggggataagtccctgcgcggtgcataccgctcgatcggcatcaaccggaacgattttctcgcagtgatccagatgcgcccgcagatggagcaggagaacggcgtgatcgaatggctggcatttgcgtcaaacgcatttaacgtgctggtgccgttctatgccgatgtggaggagacgccggaatatctgtcgaacacgacaggcgaggtgtccacggagaacttttactggtcgagccggctgattgcggcgatggcagacgcgtcctaccggagctcggtgttccatatcgagcgctatcaggagcatgtgatggcaaagggacatgagctgatccatcactacgacgagctcctcgctaaggagacggatgctgtgatgcgcagaagacttcgcgaggaggcaaaccgcagcattgcgaagatgctgcagaaggagacggcagataccctggacaaggttttatttgaactcagcagtcagatgaagaatgcatattccagatcggatgcatagggaggactgccatggtaaaaattgatctgatcacgggcttcctcggatcggggaagacgacgtttttgaaaaaatatgcgaagcgcctgatggagcaggggcagaatatcggaattctggaaaatgatttcggtgcggtcaatgtcgatatgatgctgctgcaggagttagagggggagcagtgcgaactggagatgatctccggcggctgcgatcctgagacgcaccgcagaaggttccgcaccaagctgatcgctatgggaatgtgtgggtatgaccgcgtgctcgtggagccgtcgggaatctacgacatggacgagttctttgacgtgttgcatgaggagccgctggatcagtggtacgagatcggcaatgtgattgctgtggtggacgcgcgtctggaggacacactttcaccggaggcggagtacctgctggcatcgcaggcggcaaatgccggctgtatgattttaagcaagtgcgacacggcgacagaggagcagcggcggaatacaatcgcgcatctgaagcggtcgcttacagcactcggctgcaagcagcgggcggatcagaaggttttgtgcgagggcgcagaaccgctcccggatcaggattttgccacaattctctcctgcggttatcacatcgcaagctatgagaagccggactttgcgaagggacagtcgtttgaatcgctgtattttctggatatgcacctggacggggatgcggttacggcggcggtgaagaagatgctgaaagatccgtcgtgcggacatattttccgtgtgaagggatttttgcagaattcggacggcacatggctggagatcaatgcaacacagcaggagatcacgcgaaagccgattgcaaacgggcaggacgttctgattgtgatcggagagaagcttgtggaagacgccatccgggcgtattggaaaggttagagacagacgatgatttatgtggtgacggcgctctatcaggaggcacacggattcatccgggaactggaattaaaaaagaacacggcgtatgcgccatttgaggtgtttgacaatgagaacgccggcatccggctggttgtgaccggtgtgggggagattgcggcggccgcggtggtcgccgcagtctgtgcgcaggatggagctgatgcggcagactttctcatcaatatcggctgctgcgcggcagcaaacgctggcgcggacagtggctgtgaaactgtagacagtggcatggacagcggatacggggcggcacacgccgcacagatcggagacctgtacgtgtgtcacaagatcacggagcaggcgaccgggaaaacgttctatccggatattctgtaccggcacccgtggaaggaacgtgaacttgtgaccgggatgcagccgctgcaaagagcagcggcacacggagctttatatgatatggaagcggcggccgtctatcaggcaggcatccgctttttttctccggaccggatgctttttttgaaggtggtatcggatttcggaattgcagggcaggagagaatgacggcggaggcgctcacggggctgctggagcagcatgtaaaggaggtcgtggcatttcttacaaatctgcgggaggcggcagacgaggaggagacgctgcgaaacgacggtattttgcaggaagacgagacggtgctggagcggctttttgcggcgctgcactgctcgcagacgatgcgggcgtcggcgcggcagtatatcacgtatgcggcgcttaccggatacgactggaaagcggaactgaaagaatggtatgcgcgggggctgctcccgtgcaaagacaggcgggaagggaaggtgcggcttgaagaacttaaacaggtcttattataacccgccgttttcccatatctatgtggagcgggaagtggcggaagacccggagacaaagcggatactcgcgcagtttccgcaggcagaagtgattgtcatcgaccactataaggacgttttttgccggagcaggcaggattatgtcaggcagcatgcggcgcagaatctgattcttgcggcgaagcacggtgagctgctttatccgggcgcgcaggtctgccagagctttggaaatgaacatttttactatacctcctgtgtgatgaactgcgtgtttgactgtgaatactgctatctgaagggaatgtatccgtccgccaacctggtggtgttcgtcaatctggaggatatttttgcggaagtggaaaagagacttgccgcgcacccggtctacctgtgcgtgtcctacgacacggatctgctggcgttagagcatctgaccggttatgcggcacgctggattgagttagtgcgcaggatgaacaccgacgggcagcggctgcgcatcgagcttagaaccaagggaaccggaggcagcctgtggcagacggtccggccggaggcaggcgtcatctgtgcgtttaccatctcaccgcagcaggtgattgatgcatatgagcacggtacggcttcgctcgccgggcggctggcaggagcgaaggcggcgatggaacacggcttttcggtgcgtctctgctttgacccgatgatttattgcagtgactggaagaatcactatgacgcgatgcttgcgcaggtctgtgggacgctggatctggaaaaactatcggatgtcagcgtcggaaccttccgcatctcccaggattatttgaagaagatgcggaaaaatgagccggactcggcggtggtgcagttcccctaccagaatgacagcggggtgtatcactatccgacggcgctcatggaggagatggagcagtatatgacggaaaaacttgccgcttatcttccggcagagcggattttcagatggaaggaataaggagagagtacatggagcagtgtagagaaaacaaggcggcgattgtcacgggggcttcctccgggatcggggcggcgatcagtgccagactgtgcgaaatgggatatgaggtgtttggcatcgggcgctcgttcggcagcagttttgcggaacagtttccggacgctgcaggcaatccgctgtttcatgcggtggtctgtgatcttctggacacggaaaaaatgttgaagatggtgcgggaaatcgcggcggaagccgaggtgacgctgcttgtcaacaatgccggcagcgcatactacgggctgcacgaggagttaaacccgaagaagattcaggagatggtgcgcacagatctggaagtgccgatgatattaagccagcagctgctgcgcgggtttaagaaaaacaagggctgcatcgtcaatatcgcatccgtgacggcgcagcagtcgaatccgcacggctgtgcctacggcgcggtaaaggcaggacttgcgagcttttcgcgcagcctctttgacgaggcgcgaaaatacggtgtgcgcgtggcgacggtatccccggatatgacgaagacggaattgtatcgcaatgcagactttacggtgggggaggagacggagagctatcttctgccgcaggacgtcgcggaggcggtggcgtatatcgtggggcagagagagggcgtggcggtgtcggaggtgacgctccgcccgcagtatcacagaatccggcgcaagccggtagcgaaaaaggagagaccggtcgaatgaaagatcttacaaaaggaaaaccgtcaacgctgattcttgcgtttgcactgccgatatttctggggaatctgctgcagctgacctacagtgtgaccgacacgagaattgtcggctcttttctcggggaggatgcgctcgctgcagtcggtgcaacgacgacgctcagcaatctcatcatcggctttttgctcggattggcgaacgggtttgccatcatcacggcgcagcggttcggcgcgaaggatatccggggcgtgaaaaaatcgtttgccgcttccctggtgctcggaacggtgatctcggtcgtgctgacggtgctaggactggtgtttttacagccgatcctgcggtttttaaatgtgccggagcatctgattccggtggcaggaccttacatatttatcatcatagcgggacttcttgcgacattcctctatgacgcgtgtgccgcagcacttcgggcgctcggggataccgtcacgccgctcgtgattctggcagtgtcggtggcgttaaatatcgcgggagatcttctgttcgtgctggtgttaaaggcgggtgtgcgcggagctgccgccgccacggttctggcacagattctggcgtttgtgatctgctggatctacatgctaagacggtatgaaatgctccgtcttgcacaggaggatttccgggatgcggatacggcgatggtgaaaaacatgctcggatcggggctgtcgatgggctttatgagctcgctggtcaatatcggctcgctgacactccagacggcgatcaataagctggggcaggatatcatcgtggcgcacacggcggcacggaaaatttccgagatttttatgacgatgttcagcgtcttcggacagacgatggcgacctactgtggacagaatctgggcgcgggcaggatcgaccgggtcaaaaaaggcatccggctcggcattttctacacctgcatctggtgtacgctttccgcggtggcgagctacacgatcggcagctggctggtatatcttgtgacgggaagcacgaatgaggttgtgatcttaaatgcgaccaactacctgaaattcgacacgctgttctactatgtgacggcggtgatctgcgtgctccgaaacgccatgcagggactgggcgatcatatcacgccgctcatatcgagttcacttgagatggtcgggaaaatcgtgatcgccgccacgcttgtgccgatgttaggctacaccggtgttattgtggcggagccgctggtgtggtttatcatggtgattccgctcgtcgtgcagatcttccggatgccggtacttcgggaagaaaacagggcgaatcagggaaaatgatgcatcgttggacaataacaacgcttgaaatgccataaaatcaagcaattgcaggatttcacaaaaagttcacagaaaattagcactcaacacttgacagtgctaataaacggtgctataacatagtcagaacaaaggagaggaacaaaaggagaacaggaaatgagttctatgagttcccagaacatcccggttccaaagaaacaaggaaacagcatgagtgtatctgccgaaggcaggtacgaagtagaaaaggagagatgacttatgttaacacctagtatttttggagagaatttatttgatgactggtttgatgatttcccatttttcgatgacagagatttgcgcaaggttgacaagaagctgtacggcagaagagccggtaacctgatgaagacagatattcaggagatgaaggatggctacaagatggaagttgatcttccgggcttcaagaaggatgagattaccgtagagctggatgacggatatctgaccatcagtgccgccaagggactggatcaggacgagaaggagaaagaatccggacgttacatccgcagagagcgttacgcaggtgcttgcagccggagtttctatgtgggtgagggcgtaaccgaggaggatatcaaggctgagttcaagcatggtattttaacgctggttgttccgaagaaggaagcaaaacctgcagtagagcagaagaaatacattgcgattgaaggataaggatgacagagagaaaggaagcgtatgatcatgtcagataagaatccaaaacatccgttgaagaagaaaaaagtagcagcaaaggtgaatatggcagaccatgaggcggtcgaggaagcgagagaagcccacaagtcgaaaaagcatgtttactaagtgatacgcctgtagatggcaggagaaaagggacagggagctgcacagcacgaagtgctgtgcgccccctgtccctttttcgtgtaataggaaacttcgttcctattacacaaaaacgtgtccaaagcttacccattcgctaatccaactgcatggagttgagtttttctgccagcagagccaggaaacgcttgccgaagctgctgagttcgtgatccctgcgggagatccagccaagctcaatcctctgatgcgtgtccagattcatgacggcgtaatcttcttccagcaggttttccccggacatgccggaaccgatggtgtaagtgtttaacgccatgccgatgctggcgtccgccatctcgtccgtgatggagatcgtctttttggcgacggtattctccaccagctcctcggagaagaagcggtccctggaactgtcaatgccctgaaaatagtggctgtagatatagggagccaggtcttccatcgataccttcgtcctgccggcgagcggatgctgcttgggaacatagactttggggcgcatggttgccagcagatgaaactcaagttcctgctgttccatctcccagtcgagaacgcggttctcgcggtttttcaacagaacgccgatctcacagaattccgatgcgacgtaatctaagatctccttggtgcgcaatggtgagagtctataaagtgccggtgctaaagccggttatggatgtccttatggcactgagcaaagcgtttccgatgaatctggttctgctcatcttttatctgatctggacgacgcagttttccagtatcgcagcattttttcattcacagaagacgatcaaggatgtcagtctgatgtatgtggcggttgcagctctggtgttctgcagtcttgccagtatttcggaaatcataagaagcggtctgatctccgtggacaagggacagtatgaagcgggatatgcctcgggactgacaaaagcacagacctttttccatgtgattgtgccgcaggcggtgcgggcggtcattccaccgctcacgaacgatattctctcgctggtaaagggaacggcgttagtgtcggtcatcggagtgtcagatattctgacggattccatcaacgcggcaagtgcggcgtactcttacctggaggcgtatgtggcggcagccatggtattctggggcatcggaattgtgttagagcggctgagccactatgtggagcggaaattttcaaaaagcgttaagacactggcaggctgagatgcggtacggcatcgtacattattataataggaaggaaacagggctatggcagtattagaagtgagaaatgtaaaaaaggtttttggagataatgtgattttaagaggaatcgatcttgatgtacagaaaggggacgtcatcgtcatactcggaccgagcggttccggtaagaccacctttttgcgctgcctgaatcttctggaaaaaccggatgaaggctcgatggtcttaaacggaagagaatataacttaaaaaatgtaaaaaataaggaaaagctggagattcggagaaatacttccttcgttttccagaattacaatctcttcgtgaacaagacggttctttccaatgtgacgctggggcttaccgtgggacgccatatgaaaaaggaagaggccgagaagaccggaaaagaactgttagacaaggtcggtcttgcaggaaagtacgattactacccggcacagctatccggcggcatgcagcagcgtgtcggaattgcacgggcaatggcagcgaatccagaggtcattctttttgatgagccgacgtccgcactcgatccggagctggtgggagaggtgttaaatgtcatgaaacagttcgcaaaacagggagtcacaatgattgtggtaacacatgagatgcagtttgcaagagaagtggcaagtcaggttatttttatggcagacggtgtggttgtggaaaaaggaacgccggaggagatctttgatcatccgaaggaggaggcaaccagaaaattcttaaaacgtattttaaaggaagagtcatagctgtgtgcgaagacggagaggagagaaagatatgcagaaatatgtgatttcaatttcaagacaatttggaagtctgggaagaccgattgcaaagaaactggcagaacttctggaaattgaatactacgacagagatattgtggaggaggcgtccaaagttcataacattccgttaaaggaagcgagcaatctggaggagtcggcaaagtatctgttcatgagtttcccactcggcagcggaaccacggcgacgcaggatgccctgtttaagacggagagcgagatgataaaaaaacttgccgtgaaggaatcctgcatcattgtcggcagatgcgcggacgcaattctggaggattgcgatcatctgatcagaatttttatctatgcgccgtacgaagaccgcattgtcaactgtgtcaatgatctcggcatggacacaaaggcggcgaagcggatgatccgtgatgtggacaaggcgagagatgcctaccatatgcggtatgcggggtatctgccgaacgatatgaaccatatggatctgatggtcaacagcgcaactctgggggtcgatatgacagcgagactgttggcggaagtggtgcgtgataaattttcataagacgggcagtgtgcgtaagaccgcacagtgccacagaggataaggcatggaaaaacacagaaaaaaactgatcaaaaacgcagcggtattcgacgggcacagcagtgggctggcgcatgggaaaaagattgtcattgaagacgatcttgtcacagagattaccggggatgaagtatcggaagaaaattttggcgaggtatttgacggcacgggcatggtggcgatgccgggaatgacggacgcgcatgttcacatgggctgtctgttcgcaaagggagaattcccggtggattacgctacggtgctgaccgtcgcaaaatgtaaggatgcgctgatggccgggtttaccacgttccgtgatgcgggaagtgtgagcgagggattaaagctggcgtttgacgagggtgtgcttccaggtccgcgcatctatccctgcggtgcctacatcagccagacgtgcgggcatggggattcggagtatgcgcatacctatcgagacatccagtacaggcatccgtccagcaccgttttggtggacggggtgccggagatcatccgggccgtgcgcgagcagttctaccgcggtgcatcccacatcaaactgatggctaccgagatcttaaaccggcatgaggatatcaggcttttgttcggaacggatatgatgatcacgggaccggattatcaggtggagcagagcgaggatatccggtattacgaaaagcgcttcggcacaatgcgggcgctgagggctttgacgggcactgcaaacgaggtgtttgcgcttacgacctaccagaatccttacccgaagggaaagatcggtgtgctggaggcgggatcctatgcagatctgcttctggtggatggagatccgacaaaaagtgtattggttcttgcagacaccgatcatctgcgcctgattatgaaagggggaacggtgtacaaaaatacactgtgctgagattttattccgctaatacgctgacttgcatgtggctgagattcgtagtaatcttattccaaaaactagaagcaggaggtaattatgaaagagctgctgtactggattgtggaatggattgcgaagattcacagccacattcttcgtctgaatgatgcgtatgaatacaattttacagataaagaactgcattttctcgtcattggtatgatgggaatgggattcatttttgtcgtgtatcctgtttttaaatggcttgcaaagcatgagcatgtcatggtaattgcgtggatttatgtgttgacactgattatcgtgatcacgtttgccatagagatcgggcagaaagtaacaggcaccggcaatatggaatttgcagacattgtgatgggtgtattcggattcattgtaatgttccttgtgttctcagttctgcggggtatttataagctgataagaaatctgatcagaggagacagggaagatgaatgaattttggaaaagagtgcttgagacgtgcgtggtgattctgggaaactgcctgtatgcattcggcgtggcgatgttcattgtgccgggaggactgattaccggcggaacgacgggaattgcgctgtttgtgcaccacataatgggttgttccgtctccgtgtttgtactgctgttcaatacggttatgtttctgatcggatttgcggtattcgggaaaaaatttgcagctaacacactggtcagcaccttcagctatccggtagcgctggagctgtttacacggcttctgcacggctatgcgatcacggatgatataattctctgcatgatctttggaggaatctgtatcggaggagccatcggcgttgtgatccgtgcgggcgcatcgactggcggcatggatataccgccgcttgtgttgaaccgttattttaagataccggtgtcaaagtccatttatgtattcgatatgctgattttgctgctccaggcgtttgacagtacaggagaacagcttctctatggtattctgctggtgattgtctacagcgtggtgctggataagtgcctgatgcttggaactgcaaagatgcagatcaaagtagtcagtgagaaaatcgatgagatcagaaaagcagtcttaacagatatcgaccgcggtgttacaatgttaaaaagtgagaccggatacatggagcgggagacagagatgctgcttacggtggtgtcaatacaggaactggcgaagacggagaagctgatccattcggtggatgaggatgcatttgttgtgatcaatcgtgtcagtgaggtttccggccgcggtttttcaagtaaaaagcgttatctggaaaaggagatttcatgacattacagcaactgagatatgcactgacgatagccggctgcggatcgatgaatgaggcggcaaagcgtctgtttttatcgcagcccagtctgtccgagacggtaaaggaactggagcaggagatcgggctgcagatttttatgcgctcgaaccggggaatcatcatcacaccggagggtgaggagtttctggggtacgccagacaggtgatcgaccagtacggaatccttaaggcgcgctatgtggagaagcagcgcaaggaaaagttcagtgtgtccatgcagcactatacgtttgcggtcaaagcgtttgtggagactgtaaagaaagcagggatggacagctatgaattcgcggcgaacgagacgaccacatacgacgttatggagaatgtacgcaactttaagagcgagatcggcgttctgtatctgaacgattttaatgagcaggtgctgatgaagatcatccgggagaaggggttggagttcgaggaactgtttgcctgcgatacctatgtctatctgtggtcgggacatccgcttgcagggcagagcgtgatctccatggaagaactggacgagtatccgtgcctgtcctttgaccagggacggaacagctcgctctacctcgcggaagagatgaagagcacctacgattataagcggctgattaaggcgaacgaccgggcaacactgctaaactttatgattgggctgaacgcgtacacgctgtgctcgggaattatctgcgaggagctaaacggcagcgattacatggcaattccactcaaggagacggaaaagatgcggattggctatgtgaagcgcaaaggggcatcaatcagtcacatcggacagatctatatcgaagaattgaaaaaatataaagagaaaattatgtagtggttggctataggtttcacctatagccaactatcggcttcctgtattaacactttcccaaactgcctgttataataggcaatgtaatcaaaaaacacatgcagataacagacagcatggagtggagaagcaggaaggaggaaacgggtatgagagacacagcgcggcagatgagatcagcgatgatgtgtgacaggatgcgccagatgtccatgtgtgatggcatggatgcagatgttgtgcggcttttcccggattcttcagatctttggaagaacagatagataccggcgctatggagcgtgggttggggcagccgcaggggctgctcttttttcgttctatattttgaaataacattttaggaggtggcagtgcatgccagcaattgcgatacgtcatttatcaaagaccttcgagcagaagggaaacagcgtggaagcgctgcgggatatctcgctcgacattgaggagggagacatctacggaatcattggaatgtccggtgccgggaaaagtaccctggtgcggtgtctgaattatctggagaggccgacgagcggtgaggttatcatcggcggaagagatctgggaacgctgaccgagaaagaactgcgggagcagcggagcgacatcgcaatgattttccagcatttcaaccttctcatgcaaaagagtgtgctggacaatgtatgtttcccgatgcagattgcgaagaaaaagaaggatgaggcgaagaaaagagcgcttgagctgctcgagactgtcggacttgccgacaaggcggacgcttatccggcacagctttccggcggacagaagcagagagtggcgatcgccagagctcttgcgacggatccgaagattctgctctgcgacgaggcaaccagtgccttagatccgcagacaacgcagtccattctggcactcttaaaggagatcaaccggaaattcggcatcacgattgtgattatcacgcatcagatgtccgtgatccgggaaatctgcagccatgtggcgattgtggaaaaaggaagcatcgtggaagtcggcctggtcgaggagattttcaaccatccgaaatcccgtgtggcgagaagcctgatcttgagcgaccgtgctgcggatgccgcgtcatattccggggcggaaggtgatactgcggatggagcggagctgaccggatggagcggtgagagcagacagcgggaccgcatcggcgacgataagaagcttcgtattgtattctcagagaattccgcatttgagcccgtcattgccaatatggtgttaaagttcggtacgccggtgaacatcctccgcgcagataccaagaatgtcggcggagtggcaaagggtgagatgattctgggacttccgtcagacgccgggctgcaggagcagatggaggcttatctggtggaaaagggacttgagattgaggaggtgaccggagatgtggaatagtcaggtaatcatcatgcttttggagggaatccgggacaccctgtatatgaccttagcgtccacattgtttggatatatcatcggacttccgatgggaattgtgctgactgtcacggacaaggacggcatccgtccgaatgcggcagtctacaaggtgctggatgtgatttccaacctgctgcgcagtattccgtttattattttgctgattgtgctgattccgttcaccagatttgtggtgggaagaagctacggatcgacggcgacgatcgtcccgctgacgattgcggcggcaccttacattgccagaatggtagaatcctcattaaaagaggtggatgcaggcgtcatcgaggcagcgcgctccatgggagcatccgattttcagattgtgaccaaggtcatgctggtggaggcgagaacgtctctgattgtcggagcaacgatttcccttggcacgattttaggatattccgcgatggcaggaaccgtcggcggaggcggactgggagatattgccatccgctatggttacaccagatggcagaccgatatcatggttgtcacagtggtgcttctggtaattttattccagattttccagacgatcggaatgaagattgcgaatcggctggatcgcagaaagtagcaataacaaatttgcatatatttttaagttttaaggaggacactattatgaaaaagaaagtattgtcaacgattctggcaggcgtgctcgcattatccgcattcgcaggatgcggaagcagcacggaggagagcacagacaccagtgcagcaacaaaggaagagacgcccgtagctgcaacggaggaggctgtgagtgctgagaacacagagagcaccgataccgcagcagaaggcggcaccatcaaagtggctgcatccgcaacaccgcacgcagagattcttgaggaagcaaagaagattcttgccgatgagggatgggatctggagatcaagattttcgacgactatgtaatgccgaacgaagtggtagaaagcggcgagtttgacgcaaactacttccagcacattccgtaccttgagagctttaacgaagagaagggaacccatctggtcaatgcaggcggcatccactatgagccgttcggcatttatccgggaacaaagtccgatctctccgagctggctgacggcgacaccatcgcagtgccgaacgataccacaaacgaggcgagagcacttcttctgttacaggataacggcatcattaccttaaaggaaggcgccggcttagaggcaactgttaatgatatcgcagagaacccgcacaatgtcaagatcgaggagctggcagcagagcaggttgcaagagtggctccggaggttgcattcgttgtattaaacggtaactatgcattacaggcaggcttctccgttgcaaaagatgcattggcttacgaggcatccgattccgaggcagcgaagacctacgtgaacatcattgcagtaaaagagggacatgagaatgaccctggcatccaggcacttgtaaaagtattaaagtctgatgagatcaagcagtacatcaacgacacctacgatggagccgttatcccgtttgaggactaagcaaatagaggaaagaattgtcgcaatcagcatatcgtgctttgctttgataagtaatattattagaagaccagcgaacaaaaaagttccagaataaacagacggcgggaaattctttgaagcaaaattcacgtatttcttccatgccgtggctggcatcccattccgtgtctcttccacgtttggacactcacggagtgtgtccgacaagccgcagacaatgagcggactttctggtgtccctaatggcacctcttcacagacaatataaaaccgcgcgaaccgaaactcgttgccatctgctattaaaaatatggcagatggcaattcaaacatcggcttcgcgcggttatgttttgttcgacataaagatggcatttatgccatctgttgtctggtgccgcaagggacacacaaaaaagtcctaaaattgtctgctggcttgcgcacacagtccgtagagtgctccaaacttggaaagacacggatcatcacggatgccagctgcggcatggttagaaataccggattttgcggtcagaatttgccgccgcatgtttatctggaacttttaagtatctattgctcatagtattacttatcatcccaaagcggcctatgctgattgcaacaatttcttttgcaatattttgtagaagaagagtttctttcggctgtatgttgtggtaaaataacagatataagctgggagtaaagtttcccggcaattacgaaggggaatggagagaagtaccatgaaagaggagcagaaagtatcgtttattcactcaatttcagcaaagatcatgctgctgaccgtgcttgcagtggttatgtcggtgttgatcgtcgcattccgggcggaagcgggagcaaagaaggttgtcggagacgtcagtgcagattatattttaagcatggcggagatgggagtggagattgtgaacaatcttccacaggaggcggatgcaggagcatatgagaatgccttagcggatatcagtatggagggaattgattcttcctacgcctatcttgttgacacggacggcaccatgttatatcacccgaccgcggaaaagatcggacagccggtggagaatgctgtcgtgcttggcgtcgttgcagagcttgccaagggacaggtaccggtgaatgagacagtgacgtatgattttaagggcgttaccaaatatgcggcttacgcgatcacggcgaaccgtcagattgttgtggtgacggcggatgaagacgagatcatggagccactgaatcagataataagtaagattatgctgctgtcattggggatactggttgcagcgattgttctggcatacgtagtaagccagtttatctgcagaccaattcagcagattacaacgattattgttgataccgcacagttggatttcagatcaaatccgaacggcgcaaagctgcgcagccgccgggatgagacgggagagatggcaaatgcggtacatgtgatgcgcaggaacctgcgttccatgattggcgatattgataccgcaagtaaccagatcacacagaatgtggatggcctgcaggagattaccaccacggtggaccatatgtgttccgacaactccgcgacaagccagcagcttgcggctggcatggaggagacggcggcaaccacagtaacaatcaacgaaaatatcgaggttatcaagaacggagcggatgatattaacagtatggcaacggagggcgcacggacctcggaagagatcatgatgcgggcaaatgatctacgcaccaagacagttgaggcaagcaccaagacaatgacgatgtacaacaacgtcaagacaaaggcccaggaagccatcgagggatcgaaggcggtcgataagatcaacgaactgaccggcacgatcatggagatctcatcccagaccggactgcttgcactcaatgcttccatcgaagcggcaagagccggggaggcaggacgtggatttgcggtggttgcaacggagatcggaagccttgcggatcagacatccaaggcgatcaaggatatcggcacgattgtggatgccgtcaacgcagcagtttccaatatggcggaatgcttagaagagaccaccggatttctggagaataccgtgctgacggagtataaggaatttgagcaggtcagcgagcagtaccaggaggatgcggataccttcaagaccagtatgaacgacgtgagcgatgcgatggcgggtcttgccaattctatcgacgcgattgcacaggcgcttagcggcatcaactctacagtgggcgaatcgtcgatcggcgtcagcgatattgcggagaagaccagcgacatggtggagaagacaggcaccacgcacgacatggtggaagagtgttatacctatgtggagaaactgcgtgagattgtgggacagtttgtattacagtaaataaaatatgatttgcagggaaaagggtatgcagatgttggagcgatgcagtacatcggaatcacgtcggcatacccttttttgggcacaggcaggcataaacccgtccacattttcataggatgagttaacggcaaagcggtggacgtgctgctttgcgggaaactcaatggatgggggcagcgcatatgcaggaatattatcgcggaaaaacggaagaacgagggagaaacgtgctcgaggatgaggagaaaaaatcctgggcggaaagttttctggaacagttaaacgatcctctgatctttatcctgtttgtggcggcggcgatctccctgctgctgcgggaatacggcgatatggcaattattctggctgtggtgctgttaaatgcgacggtgggagtgatacaggagggaaaagcgaaaaaatcgctggaggtgttaaaacagatgaccagcccgcatgcactgcttctggaaggggatgaagtgcggcagattccggctgccgatctgatcccgggcgatcttgtggtgctggaagccggctgtcaggttccggcggatcttgtgctgacagaagcggtgaacctgaaaatagaagaatccgcactgaccggcgagtctgttccggtcaacaaggatacggcgcagaaccgcatggcatatatgtcgacaaatgtgacctacgggcgcggcgtggggagagtatctgccatcggtatggatacagagatcgggaaaattgccgggatgctgaaggcggcgaaggtcgagctgacgccgctgcagaagcggttggcggacctcggcaaaattttgggcacggtgtccgtattcttatgtgtgctcctttttggcatggcaatcctgcaaaaacgggatgtgggagagatgctgattacggcgatctctcttgcggtggcggcggtgccggagggacttcccgccattgtgacgatggtgctggcactttccgtctcgcggatggtgaaggtaaatgccattgtaaagcgcctgccgagcgtggagacattgggatgtgtcagcgttgtgtgctcggataagacgggaacactgacacagaaccgcatgactgtaaaaaaatgttacgtgaacggcagagtgcatgcggtaaaagaactgcatccggccggcgaccggtattttttgcagggattttctctctgcaacgacgcatccctccacggaggggaacgccgcggcgatccgacagaattagcgctcttggatatggcggcagcgttcggcatacagcgggagacattggaggacaccatgccgcggatcgacgagattgccttcgattcagagcggaaacggatgacgacactgcatgagacgttggacggcagaatctctttcacgaagggatcgccggatgaaatcctggagcggtgccggtatgtgtggagcaacggcaagacggcggcgttttctgcggcggcgagagaacaggcaaaacggggacttgccgagatgacggaagcgggacttcgcgtgctggcgattggcatgcatcctaaagcggcacagatggaggagagcgggcttacgtttctggggatggcaggaatggaagacccggtacgccccgaggcggcggaggcggtggaacagtttgcacgtgccggagtccggacgatcatgattaccggggacagggcggacacggcgcttgcgattgcacgccagctcggcattgccgagcggagggatgaatgtgtgacgggcgaggagatggagcggatggacgaacagatgctggcggcgcggatcagtagaacccgggtgtttgcccatgtatccccggagcacaaggtcagaatcgtgtccgcatgcaaaaagaacggggagattgtcgctatgacaggggacggagtcaatgacgctccgtcgttaaaatctgcggacgtgggaattgccatgggaatggcgggaacggacgtcgccagaaatgcggcggatatggtgctggcggatgacaattttgcaacgattgcaggagcgattgcgcaggggcgcagcatctatgaaaatatccgcaagtcggtgctgtttttactttcatctaatttcggagaaattatcacaatgctggcggcagttgccatggggctggcatcgcccttaaagtcgagccatattctctggatcaatctgattacggattccctgccggcgctggcactcggagtagatgtggaagaacagaaggactacatgaaccgcccgccgagacgccgggatgagagcctgtttgcgggcggcggctggggatgcacctgtttttacggccttttaatcgcgggaatcagtatgcttgcctttttgcagggaccggtcggcacgatcaaaagcgccgggatgacgctgacgattccgcacctgcaggcggtgcttaaagatgcacaggtgttagcgcggtcgcaaacctacgcatttaccgtgctcggcatggcgcagttattccatgcgatcggcatgcgggatgtggagacctcggtgttttgcatgaaccatctggaaaaccgtctgatgctggcggcgttcgcggtgggaatcagtcttcagatgatggtcacggaagtgccgtattttgtacagctgtttggaacctgcagacttaccgccctggagtggacgaagctgcttggacttgcggcaatgccgctgctggcacatgagctgctggtgctgttttcctgtgcgggagaggtaaaggatacgttaaggttgcagggagaggattgacaggggcggcgtcggactgttatactccatacaatcttaaataacagaactgctaaaggggagtaattttaaattgcagcgtcaacatacgcggtcttggacctggcgctgtgtaccatgaagattacccgtggttatgagacttttagcgcggaaagtatcgcagagatacatttcgtgctggaagtctcttttttaattttaagaaaacaggaggcagaaatgaaagagtggtatcagatttcaacggaagatgtgaaaaagaagatggagacctcagaacatggactcacaacggaggaggcggcaaaacggctggcgcaatacggggagaatgtgctggtggagggaaagaaaaagagtgtttttgcggtttttttcggacagtttgcggatcttctcgtgggaattctgattgtggcagccgtgatttccgcctgttcggggaatccggagagcacctttgtcattctggttgtgatcgtgctcaatgcgctgcttggaacgatccagtatgtaaaggcggagaagtcgctggagagtctgaaggatttgacgtcgccgaacgcgaaagtgctgcgctccggcgtgaaggtggagataccggcgaaggaagtcgtgccgggagaccttctgctgctggaggcgggagacctggtggcggcggacggcagaatccggcgcagctattcactgcaggtgaatgagagctcgctgacgggagaatcgacgaatgttgagaaaagagaaggtgtgatcgaacaggaggcggcgcttggcgaccgcgtgaacatggtgtattcgggaagtctggtgacttacggaagggcagaggtttttgtgacggagactgcgatgaacacggagatcggtaagattgcaggacttttaagcaatgcgaaggaaaaaaagacgccgctgcagattgcattggatgattttggaaaaaagctgtcatatctgattctggctgtctgtgcgctggtgttcggtctgtcaatgtaccgggatatgccgcttctggacgcgatgatgtttgcggtcgcgcttgcagttgcggcgattccggaagccctcggctcgatcgtgacaatcgtgcaggcgatgggaacccagaaaatggcgagggagcatgcgatcatcaaagatctgaaggcggtggagagtctgggctgtgtgtcggtgatctgttcggataagacgggcacgcttacacagaacaaaatgaccgtgcagaagatttatctggatcatacggcgatcatgccggaggcgctgcagatcaacgatcagcttcatcgttatctgatgtatgatgcgattttaaataacgatgcgcgcatggatgacgggaaagtgattggcgacccgacggagtcagcactgctcgagatggtgcgtaaatgtggcgtggatgatgatttcttacggggagcaatggaacgacagcaggaactgccgtttgattcggaccgcaagctgatgagcacggtctatgcgctgcacggtgtaccgacactgctgaccaaaggggcgccggacgtccttttgaagcgcgcggtctatcttagggagaagcagggcatccggcggatgacggaggaagaccgtacggagattttagagcagaatcaaagattttccggggaggggcttcgtgtgctggcgtttgcttaccgggaactgaaagagagcgaggagctgacgctttccggggagtgtgattacatttttcttggacttgtggcgatgatcgacccgccgcgcgcggagtctgcggcggctgtggcagatgcgaagagagcgggaatccgaccggtcatgattacgggggaccataaagtgacggcgacggcgatcgcaaagcagattggcattttcggggagggggatatcgcactggtcgggcccgagttggacgccatgccggataaggagctggaccatctgatcggacacatcgccgtgtttgcccgcgtctccccggaaaataagatccgcattgtggaagcgtggcagcgcagggggcgtgtggtcgccatgacgggagacggcgtcaatgatgcaccggcactgaaggcggcggacattggcgtggcgatgggaatcaccggaaccgaggtgtccaaagacgcggcagccatgatcctgaccgacgacaattttgccacgattatcaaggcggtcgcgaacggaagaaatgtctacaagaatattaaaaatgcaatcctgtttttactttccggaaatatggcgggaatactggcagtgctctatacttcgcttgctgcacttccggttccgttccagccggtgcatcttttgtttatcaatctgctgactgattctctcccggcacttgccatcggcatggaaccggcggagagcgatgtcctcagcgagaaaccgcgtaaccctaagggcggaattctctcccggcgcttcatggcgctgcttctggggcagggggcgctgattgccgtctgtaccatgatttcctttgaggtgggattgaaagagagtgcggcgctggcgagcaccatggcgtttgcgacactgacacttgcacgcttgttccacgggtttaactgcagaagccgtcactccattgtaaagatcggattccggagaaactggtacagtctgggagcctttgcgctcggtgtgctgcttttggcacttgttctgtttgtgccggcactcgaaactctttttgtggtggagaagatgaatggcatgcagctgggctgtgtcggtgtgatggcggtgctgccgacgtttgtgatccagagcttcaaggtggtgggtgaagtgtctggcagagaaaagtaggaagaaacagcttgtgaaaacgttaccagtcctgtatgataaggaaaaaggatacagaaaatctgacagaaagaggggcgtttggatgagacgaagaggaaagagagaactggcggcactgctggcagtggcgttgcttgctggaagtgcggcgtgcggagcggatgccggggagaaagacgcggcaacaggtacggcggaagcggcagccgggcaggacacggagacggcagccgggcagggcacggatgcgcaggcgggagcacaggagaacctggaagagacggcgctgtctctgatgcgggaggtaaacccggcagaagctgcaggaacggatgatctctaccggagctggtacgaggtgttcgtttacagcttctatgacggcgatggggatggcatcggagatcttccgggactgacggagaagctggactatatcaatgacggtaatccggcaacggatacagatctgggatgtgatgggatctggctgatgccggtgatgccggcgacgacttaccacaaatatgatgtgacggactactgtgcgatcgatgagcagtatggcacaatggaggatttcgagacattcgtgaacgcatgccatgagcggggaatccgcgtcatgattgattttgtgatgaatcatacttcgtcgcagcatccgtggtttcagacggcggcagagtatctgaaggatctgccggagggaatggagccggatacagaggcatgcccgtatgtggattattatcatttttccagggagaaaggcagcggatactgccagctggcagggacggactggtattatgaggcacagttctggagcgagatgccggatctgaatctggagagtgaagcggtgcggcaggagtttgatgagattacagatttctggctggaaaagggcatagatggtttccgtctggatgcggcaaaagagtatgagaccggaagcatcgactcgaacatagaaattctatcctggtttaataatatggtaaaagaaaagaagagcgatgcgtatatcgtggcagaggtgtggtcggatctggagacatacgcacagtattaccagagcggaattgacagcagctttgactttacgtttgcagacaaggacggtgtgattgcgaaggcggtcaagggaacgagcggtgcctcttcttacggaaaagcgatcgtgcggctgcaggacgcgctgggaacttacagtgacagctatatcgatgcgccgttttacaccaaccatgatatgggaaggggcgcagggtattactccggcgatactatggaggcgcagaccaaactggcgcaggcgatgaatcttctgatgtccggaagcagcttcttatattatggagaagaactgggaatgaaaggcgccggaaaagatgagaacaagcgtgcgccgatgtactggagcaaggatgccggtgcagaggggatgtgcctcggaccgcaggatatggatgtgatcacgatgatctatgacagtcttgcggagcagcaggacgacggcaattccatctactggtatgtgaaggaggcgctgcgtctgcggaatgcctatccggagatctcgcatggaacggcagagtttcttgaaaatctgtcggatgacgcagtgtgcgtgctgcgcaagaactggcaggattcctcggtgatcgtcgtgtttaactgcacgaaggacgagcgcaccgtggatctgtcacagatatccgcagacagtgaaagcggggatttgaagctggcaggagaactgctgaccggaacccgtgcggcttcctggcaggatggaacgctgacgcttccggcgtacggtgttgccatcctgaagtagagatctgaaaaaacaaatcagccgctctgctgccggcagcatcaggagagaaaacgatcagtcgttataattcagaagaaagtccgcaaactgtaaggcggcgtctaagttctgattctgatagagaatgccgaaatagcaggaatcataatagttgtacttgtgaagccaggcattgtcggtgagctcgatcgcacagggataggaagcgacggcaccgtcctcggtcgtgtagatgagatgatcctggtagcggtccagcagttcgtcggataatacggtggacagatccataagagctccctggtcggcgtaatcgagatattcatcgccggttccgaaaaagagatcctgcccgccggctgccagcatcagcgtcagcacctgcgtgtcgttgtaggacgtggaatactcgccgtccgagaactgtaaggacgatgtgagggagacggaatcttccttcgggtcgtagccgcaggcttcgagaaattcatcgaagcccttgctgtcggcggttatggaatcgttgcagttcatcatgatgacgtttaacagcgggtcgcggtaggtcgcgtaatgatagatgaggtaaatgacaaagcagagcgcagcgatcgcagcggcgatcggccacttgtaataatcccagacatactgcactttcgccttgcgggaaagtgaatgaaaatcagcctttttctccataatggtactccgtttctaaaatgaactagtacaagaataacatagaaacggaaggttaaaaaggaaaaaagaatgaaaaaattataaaaaaacagagcagtgagagaatctctccatctgctctgttctttttcgctctccaattaagaaaagcgggtgatgggaatcgaacccacgtatccagcttggaaggctggtgttctaccattgaactacacccg

SEQ ID NO: 11596 - DNA, 15521 bp, Unknown
  gut microbiota DNA sequence
gtctgtgaagaggcgccattagggacaccagaaagtccgcccattgtctccggtgtgtcggacatgcacccgccggattgtccaaacgtggaagagacacggaatccgatgcaaacattcagccggaagaaatgctcgcatttttttccaacgaatattctatctgcatttccacatgaaatcccgaagagtgtttctgataatattacttatcactcccaagagatctatgcttatcgcggcaattccttttttaatcgaggcttacagcagctggattccgctcttttcgcatgcctgcatcatctcatccggccacagggaggactgcacctcgccgatgtgcgccttgcgcaggaaaaacatacagatacgggactgaccgataccgccgccgatggtgtaaggaagctcgccgtcgatgatcgccttctggaacggaagcttcgcgcggtcttcacagcctgcctttttaagctgggacagcagggcttttttgtccacgcggattcccatggaagaaagctcaagggcaatgtcaagtaccggatagtatacaagaatgtccgcgtttaacgcccagtcgtcgtaatccggcgcgcgtccgtcgtgcggctcgccgttttccagcgtatcgccgatctttaagatgcacacggcgcctttggtcttggtgatatagtattcgcgctccttcggcgtgttgtccgggaacatctccgcaagctcttccgtcgtgacgaaaaagatgtcgtgcggcaggatctcctcgatgtaatcgtactggatcgccatgtatttttcggtcttgcgcaggcatttgtatacggtgttcaccgtttcctttaaggtgtcgagcgtgcgctcctcctgcttgatgactttctcccaatcccactgatccacgaagatggagtggatattgtcggtgatctcatcgcgccggatggcgttcatgtcggtgtaaagaccttccccgtaagaaaagccgtattttttgagcgcgtagcgcttccatttggcaagtgactgaacaacctccgcggttctgccgttctgctccttgatgtcgaaggtgaccgggcgctccacaccgtttaagttgtcgttgagaccggacagcgggtctacaaacagaggggcggatacacgggacagattcaggcgaagtgcaagcagtccctgaaaaaagtccttgaccgtcttgatcgcgatctgtgtatcatgcaaattcaattctgaatgataatcttttggaatgattaaattgtccatctggggttctcctctcttgtgtacgcaaaagcgtagacattaacctaaataattatagcacagggcagttcattttcaagaaaagatacaggtatttgaaaaataatacgtgtatacaatttggatcggcagcgcatttgggaatggcagaaacgtgcaacttcagggcgggaatccgtcgatagatgttgacagtaatatgcaaaaatgagaaaatattggcaagattattatgcaattatcatagaatctggggtatcacaagagaaaaggagttgaggcacatgcaaaaggaaaaaggaatcgtatcgattaaagttaagcttttaggtgtgatcgttccggttgtcattgtcagcattctggtgctcgtactgatcgcctaccgcacgtcggcagggctgattgagagctattccgagaatctgctggagtcatcggtggagaatcaggcgtcgcagattgagagctggctggaacagaatatcggggcgttccagatagtgaagacaacgatagagaacacgaagccggacgacaaggaattacagaccatgctggattcctactataattataactcaaattatccggagggactttacatcgcggatgagaccggaaagctctggaaagcgtcggattcggcgatgagtgagtcggatccggtcaacagtgtctggtatcaggagggactgaccagagtcaatatggcgatcggatcttcctatgttaattcagaaggcgtcagtgtcatcagtgcatccggtattttaaatgacggcagcggcaagatgaaagtcatctctgcggatatgacgctcgaccgcatttccgtcattgtaaacgcgtttatcgagatgaagaatgcggaggctatcctcgtggacaaggatacggcaacgattctggcaagccgtgattccgcgaagatttccacgacgctcggcagcgacggcagcagtgcattcgagcagagtgtagcggcgaagattgcggatcgtgattacagcttttccacattggacggcaatatgaccgtgtttgaggaggtatccggaactaactggattctggtttcctatattccgaccagcactgtactggcagaccttgcgaacctcaggaatctgatgattctgatcagtgtgatctccattctgattctgtgtgtagtgattgagcgcacaacgcacgttgtgatcgcacctgtccggaagctgacgaacgtcatcaaggcgctgacggacggcgactttaccgtatcggtcaagagcagcggcaatgatgagattgcgcttatgagccgcagcgtggagcgctttatcgcatccatgaagcagatgattgcgtccatgggagacatttccggaaaactgggaacgcaggcagatgcgagcgacagtgtgtccagagagatgcagtcggcggcaaatgtccagtcccagtccatgagtgagctgaatatgacggtggatcagctgtccgtttccgtcaatgagattgcagacaacgcgaccaagcttgccggtgtggttgcagacacgaaggacgacagcgtgaatgtcggcaacaagatgcgcgagaccgttgaggtatcccagaagggacgcgaggatatggagcatgttggcgaggcgcttgagaatatccgcacctctatccagaatctggaagcggcggtaaataaagtgggtacggcatccggtgagattgttgagattgtacagctgatcggaaatattgcggaggagaccaacctcctgtccttaaacgcttccattgaggcagcgagagcgggcgaggcaggaagaggattcgcagtcgtcgcttctgagatcggaacgcttgcaagcaacagtaccgcatcggtagagcacatttcaaagctcatccatgaggtcaatgaacttgtggcggatgcagtacgtcaggcaggcgacagcgccgacaatatcaatgagagcagcggattgattcatacggcaatcgatacctttgataagatttatgacaacattcagcagacaagcgcgctgatcgaccagatggtggacaagatcaacaaggtagatgaagtagcgaccaacgtggcggcaatttccgaggagcaggcggcaagctcagatgagattcttgcaacatcagagtccatgctgacgcaagcaaaaggaattgcagagaatagtgagaacgtggcaaaagaatccagaagcctgacagagtcgtccatacagctggcggatcaggttaagctgtttcgcatttaaggggggtatcagatatgaagagattgatgagtgcggtactggtagctgctctgggagtgacatgcctcggaggctgccaggccggcagcagtggaggagataccgcggtaaacggcaagggcgtccggatttatgtctcgctgtcacaggcggatacattccgtaatacattgatcgatgcggcgaagaagacggctgaggcgagcggagctgagattgcggtgtacgatgcggagaattccatcgagaatcaggtggcgcagatcaaacaggcggttgcggaagattacgatgtgatcatgtgcggtccggtcgatgcggacactgcgctggaactggaagcgctggcgggaaatattccgattgtattttacaacagctgtccggatgcatcggtgctggaaccggacaaatacatttatgtaggatcggatgagggagttgccggacaataccaggcagaatatattctggatcagatgagtgacaaggatgagatcaatgtggcactcttaaagggaccgaagaatcattccgcaaccaagggaagatccgaggagttcaaaaatacgcttaaagcatccggcaagaagatcaacgtcgtgtttgaggataacgcagactgggagcagggaattgcagaagattatttcgatctgttcctgcagacaggcaagcagtttgatgcggtggtatgcaacaatgataccatggcgcttggagtcatcgattcctgcaagaagaatggcatatcgggagtaccggttcttggaattgacgcgacagcagatggctgtgcggcaatccaggcgggggatatggcatttaccgtataccagtcgggaagcggacagggtgaggcggctgtcaaggcggcaatcgcactcggttccggaggaacgacgcagggaatggaaggcctgtcggacgacggactttacgtctgggtaccgttcgagaaggtggacagttccaatgtggcagattatcagtaatagagagggaagagggcatcagtgcggtctgcactgatgccgttttggtgtaagagaatggaatatacgcatgtgacacatacgtttggacctgtttatgacgatgcatcccggattctgattctgggatcctttccgtctgtaaagtcgagagaacagcagttttattacggtcatccgcagaaccgtttctggaaagtgctggcagcggtctttgaggatacgctgccggagacgattccgcagaaaaaggcgtttttgttagagcaccatattgcgctgtgggatgtcattgcctcctgtgacattgcaggatcatcggacagttcgatccgcaatgtgacggcgaatgacatggaagtgatcttaaagacggcggacatccggcgcatctgtgccaacggggatacggcgtaccgcctgttttctaaatattgtctgaccgcggagatgccggaagtaaaaaagctgccgtctacgagtcctgccaatgccgcatggaatttagagcggctgacacagtgctgggcgcaggaacttttgctgtaagaaaaagagagggaaaaggaggtgtgagacatatgaaaaagaacgagatgacatggcaggtgatgctcattgaggcagtcggtatcgtatcggcgatcgcctatctcgggttacagatctattacgggatcgcgttccacgtcaatccggtgaacctgatgatgaatcttgtgtttatgattctggtatatgtgggtctgaccctccttgccgtctacccggaacgtgtgaacggattgacaagggaggtatgcagcggtaagatcagacagtatacgcttcggatggttcggatggtcaagcttgtctttgtggagggacttttatttactagcgtctgtgatgcactcggaaaagaattaaaacagggatacagcctgattatcgtggtattgattgcagcgattgcggtgtattatgagggaaggatcatacacatcctgaagcagaacaacaaaagatagaaaggcatctgcaatgacaaaggatatgacggaaggagcgataccgcctcttctggtaggttttacaattccacttgttatcggaaatctgtttcagcttctctacaatgcggtcgacagtatgattgtcggaaaatttgtgggggagacggcgcttgccgcggtcggtacgagcagtccgctgatgaccctcgcgattctgtttatcagcgggatgtgcatgggagcaggcgttctgatgggaatgcactacggcgcaaaggattatgatgtcctggagcggcagatcagttcgaccatgatcggcgggctgatgttttccgtcctgctttcagccgtctgcgtttttctgacgccgtggctgcttcggctgataaggacgcaggaggaagtgcttccgattgctacggggtacctccgcattattttctgcggactgatctttacgtttatttacaacttttatgcgagcacattgcgggcactcggcgacagcagatcgccgctttattttctaatgatcagcgctgcactcaatgtggcgggagacctgtttttcgtggtggtgctaggctggggcagcaacggatgtgccttttcgacggtgctaagcgaggcactctgctgtctgctgtgcgggctatatattaagaaaaaggtaaagattctctgcctggggcgcaagtggcgcgtgtttgaccggaggttattttataagacggtgcagtttggctgggtgagcgccatgcagcaggcgacggtacagctcggcaagatcggaatccaggcgatcgtcaatacgatgggaatctctgtcatggcggcgtttgcagtcgtaaaccgcattgatgattttgcctacactccggagcagaatatcgcccatgcgatgaccgcgctgctggcacagaacaaaggtgccggcaaaaaggagcggatccgggagggattccgctgcgggctgtggatcgagatgatctatgcgctctttatctgtgtggtctgctttgtatttgcgcgtccgttgatgaagctgtttgtgacggatgaggaggtgatctccctgggagtgatctatctgcatgcgattgcggcgatgtattttctgccggcggccacaaacgggattcagggatattttcgcggaatgggcgacctcaaggtgacgctcatcagcagttttatcaacatgggagtgcgggtggcggcagccgttccgctggtattttccataaagcttggaattgtggcactgccggttgcctacctgatcggatggctggcaatgctggcggcggagacaccactgcttttccgccggaaagagtgaacgggaagcggttgctttttcctgctttacaaagaaaaatgataatgatagaatacccataggtgttttttgttcggaagacacaaagggaggaagcgtttatggcaaacctgtttcagcttttactggcgcagattcaccccagacaaggaagacctgcaggagagccggaacgggcggagggatataagacacacccgaagcgcgagagcaataataaggttcgggagaccagggttttagagaccggggagagcacgcaggaacgggaaaggatacagacagaagtggaaaaggaagatttcttattaagtcagatcgacgagtttcgtgagaaggcgaaacagctgcaggatctgcttgcagcgaaggagaataaagtacaggaactgcagtcgattgtcaacgagcgggaaggcaaggccgaggaatggcagcacattctggtggagcgccaggaggaagctgacaagattgtgacagagttcacgaagaaggtcgatgatctggcagaccgtgtgacagcgaagatgaccgagattgagacaagcatctcggggcaggttgcggaggtaaagcgtgcgagcgaggagcagcttgcatcgaaccgcaagctgaatgaggatcagattgctgcaaataaaaagctttccgaggagcagcttgcgacaaacaagcagtttttggaggagcaggcaatcgcgaacaagaagctttccgagggacagatcgccgaggtcaaggcgctgcttgagaatgcgacagcacagctggaatccatcaagacagatctctccgagaaggtacattcggagaacgtgaagtgctaccgcaacattcaggatctgttcaacgaatttgattccaagatcgagaagatggacgagatggagcagggagtcggatcggtaaagggatatgtcaaatgtctttcctggtttgcaattctgaactttgttgttctgatcggattcatcctgtattctctcggtgtgtttaatttttagctttaaggaatagaagatcatatgagtacagaatcaaagaaagtgtgggtcgtggggcataagaatccggatacggattcgatatgcgccgcgatttcttatgcatatctgaaaaaccagagcggggacaagaagacttatgtggcaaagcgtgcgggcgcggtgaatgaggagacccgctatgtgttagagcgctttggcgtggaggaaccgccgcttgtgagctatgccggtgcacagatcaaggatatcaatatccgcaagacggccggtgtcagcaatcagatttcgctgaaacgggcatgggagctgatgaaaaagctggaggttgtaacgcttccggtcaccaatcagttcggcaagctggaaggtgtgatcgtcaccaaggatattgcgacgtcctacatggacgtgctggacaactgcgtgctctcaaaagcgcgcacacagtacaagacgattgcggagacgatcgacggtgaggtctacgccgggaatgagcatgcacattttgtgcgcggaaaagttgtgattgcaacctccaacccggaatacatggcggattatatcgaggacgacgatctggtgatcttaggcgaccgcgaggaggcgcagatgcaggcgatccggtcgaacgcgagctgcatcatcatcggcggcggtctcgaggtggcggaagaagtcaaaaagcttgcggagaagcgggactgcgtgattatcacaacgccgttcgacacattttccgtggcgcgtctgatcaatcagagtatgccgatcaagcagtacatgaccagacgggagctcgtcacgtttgacattgacgattatgtggacgacgtcaaggatgtcatgtcgcgggtgcgccacagagatttcccggtgctcggttcaaacggcaactacgtcggaatgatttccagacgtaatctcatgaatatgcagaaaaaacagatcattcttgtcgaccacaacgagaagtcacaggcggtggacggaatcggagaggcggagatcttagagatcatcgaccatcacagactgggaagcttagagaccgtatcgccggtttatttccgtaatcagccgctcggctgtacgtcgacgattatctatcagatgtatcaggaacagggtgtggagattccgaaggagatcgcgggacttctgctctcagcgatcatttccgacacgctgatgttccgctcgccaacttgcacgccgtttgacaagggcgttgcaaagcggctcgcagagattgcggacgtggatattgaggatcatgcaaagaaaatgttccgcgccggaagtgatttcaagaacaagacgaccgaagagattttctatcaggatttcaagattttccacacggaagactgtgatttcggtgttgcccagatcagcgccatgagcggagaggaattagaacagatcggagaacagctccgcccgttcctgccgcaggtgctcggcgagaagcgtttaaatatggtatatgtcatgctgacggatattttggaggaatcttccaagattatatttgcgggggaggatgccggaaaaattctggcgcatgcgttcaagaagcaggaggatgcggatggcatcctgttggacggcattatctcacgtaagaaacagatgatacctacactcatgaatgagatgtcagagcgagcgtagctcgctctgtgagcatagcccgctctgtgaacatagcccgctctgcgggcatagcttaaaggctttggcggtaatccctcggggattccccaaagctttttttgtatgctctcgagaaggtcgagtaattctgaaagccgcaggaatagcatacttccgtgatcggcgtgccggcggcgatcagctctttggcgagaaacagccgcttagtgagcagatagccgccgatggtgtagccggtctgctccttgaacgtgtgcattaggtaggagcggcttaagtaaaagcgggaagccaaatcatcaatcgagagatcttcggtcagatgagcgtttagataggtaagaatcgagagaatcttctcgttggaagcggagtctcccacgaattcaatgtggtggtgcagggcggcgcggttgagctgaatcataaattccaggaataaaagccggtggtgcagcgccgccgcatagtcgtcgtcgtttaaggaggcatccagcgcgcggatggaggcgccgagcctgccgcccttggaatcctgcagacggaggatgtgtgcctgctcgcggtatgcctgcttaaagcagaaggagagatcgcagtcttctccggcgtactgcgtaagaaaatccggggagacatataaaatgatgcgctcgtagggaaggttcgagtggatctcaggtttgtgcacttccccggcattgaccaggacgatgtcgcccggggcaagctggtaggtgcgcccctcgatacagtaggtcacgtcgccgccgagaagaatcaggatcttgtgaaaatcgtgatagtggtagtgaaactcccggcgggaagtatcttttaaatgaaacatcttaaagctggtggttaagtatccgacctttttgtattccggcatcgcgtgcgtcctcctttttctattactgtattataaaaaagcactttttgcaatataaaaagcactttgagactatatattataaaaagtgttttgtataatagatgtatatgaggaaacgcatgtccaaacagatggagggaaataacatgaaaaatttcagtaattataccgattttgatacaaaggaaaatctgcatttcgagtccaaggccgtgcacggcgcactgggaacggaaccgctcaccggagcagtcagcatgccgatcttccaggcggcgacattccgccatccggagcttggcgagtcgaccggctttgcatacagccgtctcgagaatccgaccagacaggaattggagcgcacgatggcaattcttgagggcggaatcaagggattcgcattttccagcggacaggcggcaaacatggctgtcttttccctgttgaatccgggcgagcacgtcattttatcggatgatatttacggcggaaccttccgcattatcggggacgtttttggaaaatacggtattgagcatacctatgtagacatgtcggatctggatgaggtgaaggcggcgatccggccgaacacgaagatgtttttcattgagacaccgacgaacccgatgatgaaggtggcggacatccacgcagtctctgagatcgcaaagagcgtgaatgcactcacggtggtggataacacgtttctgaccccgtatttccagaagccgctcacgcttggcgcggatattgtcacacacagctccacaaaatatctgggaggacacaacgacaccatctctggcattgtggtaataaaagacaacgaggagatcgccgatcagatccatattcatatgaagtcccacggaagtcagctcgcgccgctggacagctggctggtgctgcgcggaatcaagacgctggcagtccgcatggatcgtcacaatgaaaatgcgatgaaggttgccgagtggctccgcacacagccgaaggtgaaaaaagtctactatgtcggctttgcggatcacaaggattatgaggtgacgagaaagcagaccacgggattcggcggtatgatttccttcaccgtggatagctttgagacagtgaagaagatcttaaagggcgtagacatgattatgttcgcggagagtcttggcggaacggagactctcatcacatatccgacgacacagacacatgaggacacgccggcagacatcaaggagaagctcggtatcaccgactgcttccttcgcatgtcagtgggaattgagaacgtagaggatatcattgccgatctggatcgcgcaatgaacggctgataaaggagattggtgagaagatgcgatttacaaagatgcaggcatttggcaatgactatgtgtatattgatgcgattcatcaggaattaaagaatctgccggaactggcgcggtttgtcagtgaccgccattttgcaatcggttcggacggaatggtattgatctgtccgtccgagaaaggggacttccgtatgcggatgttcaatccggatggcacggagggggaaatgtgcggcaacgctctgcgcagcgtcggaaaatatgtatacgatcacaggttgacggacaagacagatcttgtgatcgagacacttggcggaatgcagcatctgaccctcaccgtgactgacgggctggtatcgaatatccgcgcggacatcggtgagccgagactgtccaccgcagtgattccggtagtcacggagctgctcgagtttgtggagcagccggtgcaggtgcttgaccggacattccacatcacggcggtatcctgggggaatccgcactgcgctatgtatgtggattctgtggcagatctcgacgtggaaggctatggaaagacgattgaacatatgacatccattttcccgaataagacgaacgtgacgtttgtggaatttgtgcggaaggattatattaagatccgcgagtgggagagaggaaccggcgagacgatcggatgcgggacaggctgtgcgacggcggttgtggcaggcgtcctcaccggacggacagaccggaaagtgacggtcgagcagatcggcggaccgcttttcatcgagtgggatgagaagacgaataatctgttcatgacgggaccttcccacacggtattcgagtcggaaatcgacgcgtcacacatcatcggataagaggcgcagataagcagcagtgcataagatgcgcgattgtggcgcaggaatggagataaaatgaagttaagtgaactttgcagtgaattcaaatacgagtgtctctcgggaagcatggatgtcgatgtgcgggatgtcatctatgattcccggaagattacagaaggaacggtgtttgtctgcatggtgggagctgtgacggacggacataaatacatcccggatgcggtgaaaaagggggcgtcggcgatcgtcgtcgagcgcgccgatgaggtgcagcagattccggatcaaatcacggtcattcaagtggaatcagccagacgtgcgcttgcctacatgtcggcggcgttgttcggacatccggaccgcaagctggtcacgatcggcattacaggtacaaagggaaaaacgacgacgacttacatgatcaagagcgtgcttgagatggcggggaagaaggtcggactgatcggaacgatcggcgcgatgatcggtgatgagcacatcccgtcgaaaaatacgacgccggagtcctatgaacttcaccggatgtttgcggctatggtggaagccggatgcgagtatgtggttatggaggtgtcctcgcagggattgaaactggaccgcacggcgggcatcttgtttgattacggcgtatttaccaacctttccccggatcacatcggaccggcggagcatgagtcgttcgaggagtatctgtactgcaagagtcttctgttccggcagtgccgtgtcggcatcgtcaatgcggatgatcctcactgggaggagattttaaagggacacacctgtcaggtgcgcacattttccgcagagggaaatgatgtgaaagaccaggtggtggatctgtttgcgtcggacatcggttatatcaacgagggcggcagactcggcatgcattttaccgtgagcggctgcatggactgcaaggtaaaagtgcatattccgggcaggttttctgtgtacaatgcgatggtgacgatgctggtgtgcaaccttgccggtattccggaccgggcagtgctcgacggacttgagaaggttcaggtcaaagggcgtgtggagatccttccggtctcgaaggattattcgatgattatcgattatgcgcacaatgaggtgagcacgagaagcgttctgacgacactcttagagtaccatccgaagcgcctgatctgtgtctatggaggcggtggcaaccgctccaagttaagacgctacgatatgggcgaggtgaccggagaacttgcagatctgtgcgttctgacctgcgataatccgcgcgatgaagaaatccgcgacatcaatgccgacatcaaggtcggtctggcaaaaagcaacggaaaatatatcgagatcgacgaccgcaaggaggcaatcgcctactgcatgacacatgcaaagccgggagatatgatcgtgctgctcggcaaggggcatgaggattatcaggagatcaagggtgtaaaatatcattttgacgagcgcgaagccgtagcggaaatcctggacgagatcaagtcgggagagcgcacggtcgaagcgtagaataacatatacgtatcggaccttttgcaataagtaatatgataggaagcattacatgcagatttctggtggaatgcctatgaaacattctgttcaaaaaatgcggcatttctaaccagccggtgactgcatctgtgatgatccgtgtctttccaagtttggagcactccacggagggtgtccgcaaactgcagacaattttaggacttttgtgcgtgtcccttattggcaccactgaacaaaacataaccgcgcgaagccgatgtctgaattggcatctgccatgttttcaatagcagatgccaacgagtttcggttcgcgcggttttatattgtctgtgaagtggtgccattagggacaccaggaagtccgctcattgtctgtggcttgccggacaccctccgggagtgttcaaacgtggaagagacacggaatcagatgcagcccatccggctggaagaaatacacacatttttttcaacgaatgttccacatgcagttccacccgaaatcgcaggacatacttcctataatattacttatcacttataaaagaaatgtgtactttccttccgattagatataatacatattctgctcggtctcgtactcacgcacaaattcattcaccagatccgccagcgtaatgctctctaagatccgcttcgtctcctcgttcacgcgatcccacaacagcgtgtccatcacctttgacaccgtctcgcagagtgcatcctcgttcaccgattccggctcgatactgtagctgccctccagcgcgaggatcatctgtgcaaccgtaatattttccggcttatccgcaaggacgtagccgccctgcgcgcctttgacgctcttgacaataccaccgcgctttaagctggaaaacacatgctccagatagtgcacagaaatctgattcctgtttgcaatatttaccagcgacacatgaccattggtggaattcaccgccagatcaatcagcgcacggatcccatagcgtcctttcgtggaaatcttcatatcagttcctccctttatcccctatctccagatctttttcatagtaatcttatatgaatactatattatcatctgtcttctcggaagtcaaccgctttataaaaagaatacgcgctaagtaatattattagaagatcacaccgcgggatttcagatggaaatgcaggtggaaattcggatcaaaaaatgtggcatttctaaccagccggatgtttgcatcttcgatgatccgtgtctttccaagtttggag

SEQ ID NO: 11597 - DNA, 14156 bp, Unknown
  gut microbiota DNA sequence
aaatttgtaagttacatcgactggcaagctgcagggctgagccttacatgcacccacaggagctttcttggtcaatcattgtttgctgatgttgtgcataagatcaaaacgggtctacagaggactttttctctctgtagacccgtttttgcgtacaatcttctatttttttgacttacatggctgcattttggcttccgccgggtctggcgacactctttttctctcccagacccgaaatcagtttcttttcgggtctcacgggctggtttttcattcccagacccgcgaacagcccttttttcttcccacgcgcataataacaaggtcccggcgggtctggagagacgttttttctctctcagacccgccggaaccttgcacaagaccatttttcttcttaatatccggtcggacggtcttttttcccgaccttgaggcgcgacatcgcgcgcgccagcgatgctttagaacgataatactcctgaatgctctgtttctggcggagctgctcctgtgcacgctcttttgcctcctcggcacgccgcacatcgatctcctccggggactcacaggtgtcaacaatcaccattgcacggttattgatgatctgtgcaaatccggtgcctgtcacacccacgatctcctcgcctgtttcgtccgtgatgcggatctcgccgatctcaacggcaaacaccatattttcgtgatgcgcctggattgctttctctccgtcatgcagcggcagaacgacctgctcacatcttccgtcaaaaaagacacggtcacaggcaatcactttcagactaaatgtattcatgcccccatctccttcgcacgctcgatcacatcatcgatcgtacctacattgaagaacgctgcttccggatactcatccatctcaccgtcaataattgccttgaatcctcttaccgtctccttaagcggcacatacttgcccggcacgccggtaaagttctctgccacgtggaacggctgggataagaacttctggatctttcttgcacggtataccacgagcttatcctcctcggacagctcctccataccgagaattgcaatgatatcctgcagttctgtgtacttctgtaaaatctcctgtactcttctggcagtctcatagtgctcttttccaacgacgtcctcctcgaggatacgggagttggactcaagcggatctaccgccgggtaaataccctgctctacgatctttctggaaagtaccgtggtggcatccagatgtgcaaatgtcgtcgccggagccgggtctgtcaggtcatctgccggcacgtaaacagcctgtaccgaagtaacagatccgttctttgtggaagcaatccgctcctgcagttcgcccatctccgtcgccagggtcggctgataacctactgcggacggcatacgtccaagcagcgcggatacctcagatcctgcctgtgtaaaacggaaaatattatcgatgaacagaagtacattctgatgctcctcatcgcggaaatattctgccatcgtaagtcccgtctcagcaactctcatacgtgctcccggcggctcgttcatctgtccgaacactaacgccgtcttatccagtacgccggattccttcatctcagaccacaggtcatttccctctctggaacgctctccgacgccggtaaaaatggaatatccgccatgctctgtcgcaatgttgcggatcagctcctgaatcaataccgtcttaccgactccggcacctccgaagagaccgatcttaccgccctttgcatacggtgccaaaagatcgatgaccttaataccggtctcaagcacctcaacgaccgggctctggtcttcaaaagatggcggatctctgtgaatcacccagtgttcctcaccgtcaaggctttcgcctccgtcgagtgtatctccgagcacgttaaacagtctgcccagggtcttatttccaaccggaaccttgataccgccgccctcggcaataacctccatatccttgcataagccctcgcttgccgcgagcatgatgcagcggacggtattattgccgatgtgctgtgcaacctccatcacgcagcgctttccgttgttgtccacttcaagcgcatctttaatatatggaaggtcattatcttcaaattctacgtcaacgacaggtcccatgacctgtacaattttccctttcttcatacaagctcccttccgctttatttctttttcttgttcttctgcgctttcgcaccgccgctcacctctgtgatctgctgtgtgatcgccgcctgccgtacccggttgtattcgatcgacagcgtctgtatcatgtccttcgcgctgtccgttgccgcctgcattgccatcattctggaattatgctcgctggcaaacgactctaccagcgcacagtagatatatccggtgacatagttcggtactacatgctccagaatcgcctccatggatgactccacccggatctcctcctggtagatatccgccggggcaggatgcaggaagtcttcctttacaagcggaagaagtttcatcttctccgcattcatagaaaaagagttttccatctttgtgtagatgatatatacctcatcaagctcattttccgcgtacagatccatgacgtgatccgcaatgacacgcgcgcggtgaagcgacgggttctgcacggtatacttgaactccgcatccaccgcgagaccctctttcgcaaaatactggcgtccgagctcgccgacgacaaacagcttattgttctcgccctgcgtgaaaagctcatgcgccatcttgatgacgttgtggttgtatgctcctgccagacccttatccgcagtgatcacgatatatccacgccgcttttcttcctccgggatctccttcttctggtcaaaatagcggttctgcacctccggaatgtggcgcaggaatctggaaatggaaccctgaagtgcatagaaataaggttccgtctgctcaagcttctgcttggcactgcgcagtttggcagaggatatcatatacatggcgcttgtaatcttcatggtatcccggatacttttcattcgcttttgaatttccttggtatttgccatgctctatcacctgctcttatattctttgaccgcctctacaatctgctccgtaatcgcatcatccagcactttttcctcgttgatcttcgtcacaagctccgcgtgctgtacatggatgtaatctaacatacccagctggaattctttcgtctttgccgtgtctacgtccagcatcagacgcttgttggcagcgaccagcgtgatgacctgatccgccaggctcatcggatggcagagcggctgctttaacagctccatcaggcattttccgtgctgtaactgctcttttgtcatgtcgtccagatcggatgcaaactgtgtgaacacttccatctcacgatactgcgccagatcaatacgaatcgtaccggacgctttcttcatcgccttggtctgcgccgcaccgccgacacgggatacggagagaccgacgttgactgccggacgcatacctgagaaaaacagatcactctccaaaaagatctgaccgtctgtgatggagatcacgttggtcggaatgtatgcggatacatcgcccgcctgcgtctcaatgatcggcagcgccgtgatggaacctccgcccagctcatcggaaagcttgctggaacgctccagcagtctggaatgcagataaaatacgtctcccggataagcctcacgtcccggagaacgctccagcaaaagggacagtgcacgatatgccactgcgtgcttggagaggtcatcatatacgatgaggacatccttgccctgatgcatgaaatactctgccatagcggttcccgcatacggtgcaatgtactgtaacgatgccgactcgctggctgtcgatgataaaatgatggagtagtccatcgcatcattcttcgtcaatgtattcacaagctttgctacggtcgatgccttctgaccgatcgccacataaatacagatcacatcttttcccttctggttcaagatggtatctactgcgatcgacgtcttaccggtctgtctgtcgccgataatcagctcccgctgcccgcgtccgatcgggaacatggcgtcaatcgccagaataccggtctcgagcggctgcttgaccgactgacggtcaacaatgcccggcgcttcctgctcgatcgggcggtaatcgtccgccggaatatctcccttgccgtcgatcggcgctcccagtgcatttacaattcttccaagataggcatttccgactggaacacccgccttcttcttcgtgcgtgtgacctttgtgccctctttgatgccagtgtcttttccgagaatgatacagccgatctgatcgcgcttgatatcctgcaccatacctctgacgccattctcgaagatcacgatctcaccatacatggcatgctcaatgccatagatggtcgcaattccgtctcctacccagatgacagagccgacttcctgctcaccggtcaccatatcataattttctatctctgttttcagtatggagataatctcctctgaatttatggaacccacgtcatcacctccatgtcaatttttgttctaagttcttgatccgcccccggacgctgtaatcttccaccagatctcccgtctccagcacaaatccgccgatcagttccggctgtgtgcagatggtaagctccaccgtctctctgtggtgctttgcggcgagatatgctttgatctgtgcaagctgctcctcatccggtgtacccgcgcagtacataacggtctttaaaattccatttgcctcatcgtagcagcgcgtatacgctttaaagacatcctccatctccgatacgtttccgtggtcgcacatttcttttaagaaattccagacctctttcggaaacagctgctcaatcagcctgtgtttttccctgccggataccaccggacagtccagcacgcgcggcaattcgccagtcagtgagaaaatccgcttcatctcttccacagtctctttctccacgcccagctcaaaaagaaccgttccgtaattatttgctgtttgtgtcatttaaaccacccgttttcgccaaaaactgttcatacataagcttgttctgcgctgcctgatccgtgtcgcccaataccttggcggttgccgccatggcaagtcccgcaatctgcgactgcagctcctgcacggttttctcacgctcaaggtcaatcgacttgtgtgcattggcgataattttctgcgcctctgcatccgctgcatccatacggctctcatactccgcctgtgcgctctttctcgccttctcaacgatctgcgccgattcctcatgcgcctgctttaaggcgtcctcatactgcgctttcagctcgtttgcctgctcatttacatggcgtgcgtccgccatctgcccttcgatcagctgcttgcgctgatccatcactttcgtgaccggtccgatcaaaaatttgcggagccccagatataatacgatcagattgacgatggtaaagatgacattccagtcgattctaagtaactgcatactctaccataacctttccttagcctaagaataagatgattaagattgctactaccataccgaaaattgcagtaccctctgccagtgcacatccaagtaacagtgcctttgtgatctttccgtcagcctccggctgtcttgcgatagcgtctgttgccttggaagttgcaagtccgataccgatacctgctccaatacctgtaagtgctgcgattcctgctccgattgcgattaaagatgtcataataatgttctccttttctttttcgatttgattactcgatggtttccttaataaaaagtgatgttaaaaatacaaatacatatgcctgaatgaatccgtcaaacaggtcaaagtagaggctgagcggtaccggcacaagtaacggtgccacgatcttgatcagctccatgataacgaatgcgcctaagatattaccgaaaagtcgcatacacagtgataacggccggataaatatttccaaaatattcatcggcagcataagcgggatcggttccgcaaagctttttagaaagcctttgacgccttttttatgtacgcccgaaaattcaatcaggacgatactcatcagtgcaagagcaccagtgacgcccacatccttggttggagacttgagaccgaacagaccgatcatattggccacgccgatatacagccctacggtcatcagatatgggatatacccctttccatcctcccccaggagatcataaaagaagttgtataagcctcccactaccgtttccagtacaacctgtttcttgccgacattctctactttcaggttgcgcacaagaatgatcgagccgagcagcagcactgccatgatgatccatgtgaccacgaccgactccgccacagggattccgccaaaaacggggatcgtgaacgcagtctcacagttcagctcttccatcagctgctttgatagttcctccgtattaccacttcctttctctttttttgtgttcctattttatgaagtttcccattaaatgtcaatttcgtcaaaagttctaattttacgttctgtttttgtgcaacatgcacggagagattgtgatttttttcacattttccgcctttttacaaattgaaaattgcaaaaatatacattcagtcaaaaatgtcttccaatgtttgtaaaaaatatcggtttccatagatagaactttctatctatttgaacggacttcctacctattttgacctttccttaacaaatacgcccaaaaagaggcagccgtcccttttcgtgaagctggattttgacaagtagcattataaggaactcgcactttgcggtttccgttggaaatgcagatggaaattcggtcaaaaaatatggcatttctaaccagccagatgtttgcatcttcgatgatccgtgtctttccaagtttggaacaatccgcgggtcaggtccgcaccccgtgagacaatttgtagggttttcgtgctgcacttacctgcactcccgcagtaaaacataaccgcgcgaagcagatgtttgagttgccatctgcccggactttcatagcaggtggcaacgagtttctgttcgcgcggttttatgatgtctacgagggagtgcagttagtgcagctagaaagcccgcccattgtctccggtgtgccggacatgcacccgtcggatagtcaaaacgtggaagagacacggaatctgatgcaaacatccaactggtagaaatgctcacatttttctccaacgaatattccatctgcatttccaacggaaatctgcatatgtgcttcttataatgctgcttatcacatgagctgcacgaaaaaggggctgcacgcttaatgtgcagccccttaacaagcctatattattttcttctggactcaagttcttttacgtttgcctctaccttcgccttagaaagcggatatataagtaacagtgccagtccgcataatgcatagatgattgccgggaagaaggtggacagattgtagattccatttgcaacttcctgcgtctggcttgttgccagctcatcataaccgatccagccaagtgcccatccggaaagtccgcccgcaattgcctgaccgatctttcttgcgaaagagtacataccgtatacggtaccatcatctctggtgtgattcttcacttccatgtcatcgataacgtccgttaccagtgcccagcactgcatctggaagaaatacataccgatcatggcaaggaatgccagtccgacgaacagccatacattctttacatgcagtacgccaataataaaatataatcctgcggagataaacattccgataagactgcactctttctttccgtacttcacggcaagctttgtggacactgcggaaagtacaagcacgcacggaagcatcagcagcgaatatacggataatgctgcagtgttcttaaagtaatctgcaaacagatactggttgatgccctgggacattaaagatgccaacaacaacagcactgccgagagaatcaggcccatcagcgatctgctggaaaacagtgcggaaaccgtctgtccgaacgtcttcttctggacatccggcttcggtacatacgcgacacgttctgttgtcagcgtatagcataacagatagcagataacggcaagtacggaaaagattcctgcgatcatggaaattttggacgcggatacgaccttgtttcctgcctcatcggtgtaatataccaccatcggtgcaagcataccgatcaggatacctgccagcgtaccgcccagagaacggaacacagataaggagcttcggtccttcggctcgctggaaataacagatgccatggatccatatggaatatttacggatgtatagaaaatggatccccataaaatgtaagtgatgaacatgtaagcaacttttgccgcatacggtgcatctaccagaaatgactggtacatcatgaacgatgccagtacaacaaatgcgcacatacgcagaatccacggacggatgcgtccgttcttggtcggcttgctgttatcaacaatgcgtcccattccgatgtcggtaaatgcatccagacatcttgcaagcaggaacatggtacctaccataccggcagagactcccatgacctttgtgtaaaataccattacatagctgctggcgaaaatgaatgtaaaatcattcgcaatatcaccgcacatgtaaccgattttgtcctttacgccaaacggcttggtgtttgtgtttcccataatgcgcctcctgtagcagaccgccccatgcggtctctttgatggttttattatagcaacttccctttccctgtactttgcctttttttgtttgacacggattatttttgtgttatatttattttgtactaaaattttttcacgttgttatttgcagctaacagttcctggatcaagcaaggaggattcttatggcattgccctatatttccgtggaggactgttttccggtcatccgccagaccatcttagacacctacaaagtcgactcttttctgatgcattatccctactccgatctggagcggctggacatggggcttcgcaaaatggtctggggaacctactccacaaattctgccatcttctccctgtctcccgaacaggatgcctggcagattatcgtgttaaaaagtgttctgggcttttacaatctgattatcacagttacaaacgaggagcatcccgatatgtttggcttcatgccgttccgtaccgaacctgcaactccggctgtcatcaaccgcatcatgaaggagaacggcattccgccacagtatacatccagcatgcagcaggtctactacaatcttcccgtcgtagaaatgcagagtctgatcaccacactgcagcatctgatcactgcatttatccccgggtttgcagccaatcacgtcgagtatatcaattatacctccgaacagcacgaagttgactttaacgaggaacggattcacaaatttacttccgattatatggcaaacctcgccgaacacataaaatcctgtggcgatgctgtcatcaccggtgatcagacagcctcctccgaaagcatgaaatccctgttgaattttgcggtttctttttccgagacaccactctcccagttaaaggaatatctctcctacatcaacacttttctgtctgccaaaatgatggacacacaggtgcatcccgcctatatctttaagcagatgcatacctttcagcttaaaattaacgaaaccgtgcaggcgcaggaactgcagcatcttccttatgaaatggtacgcaaatactgcctgctcgtgaaaaactttacctatgacaattattcctatctgatacgaagcgtggtcaattatatcaaccagcacctgtcctcggaattatcgctcgccgcgcttgcttcggaatttggcaaaaatgcttcttacctctccagcgaatttaaaaaggaagtcggcgacacactcacaacttatatcaacaagcaccgcattctcgcctcgctgcgttactttaacaccacggacatgagcgttgcggaagtatccaacgccgtcggctacaccgatatgggctatttttcacgcctcttccggaaatatgtaggacagagtcctcgcgaatataaaaagatgctggataaatgacattttatgccccactatctgcgctcttccagataccactccgcctcccgcaccgtatccaccagaacctccatcgcctccagcggatattctcccgcagcggtctcgcccgtcagcatcacagatgccgcgccctgctgcaccgcgcggaatatatcggacacttccgcccgcgtcggcaccgcccgatgctccatggaggcgagcatctgcgtgacaaccataaacgcgcgcccgtgctttctacactgagccgcaatctcctcctgcgcgcacggaagctttgccagagacatcgcattccccagatctcctctggcgatcacgatctcatcgcagtgtggcaacagctcccccagatgctccattccctgcagattctcaatctttgcgaaaatgcggatgtccccggcatcctcatttattaaagcttcttttaagttctttaagtcttcttgatttctcacgaatggaagcatgacccctgtgatcctgcactgctttactctggcaagattcctgtaatcacgctccgtcagcgtcggtgtctgtatctccacaccgggcgccgcgatacttttcccgctttttaagacgccgccccgcacaacggtacattccaccgcgacagacgatccgcagcggaattgttcttctacttttaatgcaatcctgccgtcgtccagcaaaatctcctgtccgggcgcaagcgccacaagcagcgttcccggcaccggaatctccgtcggatcaaacagattgttttgtccgtccgccacaaggctcagaccgtctccctcttttaaaagacgctctgccccaagcgtaccgatgcggagctccggtccccgcaagtcaatcagaatctctggcgttccgtcatgcagccggctccatgcgctgtggatgccggagatccacgcatccgcttcttccagatccgcatgggacagattgattctgattcctgtcattcctttttcaaacaaatgaaccagcatctctgtatcacagcatgctggtccgatggttccgtaaatttttgtcttcattatactcttctctccgcgcagctgctctgctgcgccgcccgtgattcgatcgtgcggcagattctcccgccgcttgttctatagcatctttttcttacgcagtatcagcatcgtgataatgcagatcaacagagtcagcacacagatcagcaaaaatccgtgcggcgtattggcaaacggcatccaccgctcatccacgttcattccataaataccggaaatgaccgtcggaatcgccataacaatcgtgattgaggtcagatacttcatgacgttattcaggcggttgtcgatcacggaggacatcaactctctggtaccgttgatgatgtcacggtagatggaagtcatctcgatcgcctgctggttctcgactataacatcccccagaagctccgtatcctccgggtactgctccagtctcttatagcgcgtcagccggtctaacaccacgccgtttgcacgcagggatgtggcaaaatagaccagcgtggactccagttcgtgcagatcaatcagatccacgtcctcggtgtgttgtccgatccgctcctcaatctccgtacggcgcttatcaatgatgcgcagattggtctggtagatcgtcgcggtgcggtacagaatctggtacacaaagcgcaggcgctttttcgtgctgaactccttcacgcggttgatcacaaaattcttgagcaccggcgtatcctccgtgcacaccgtcacgatcacatcctgcgttaagataatgccgagagggattgtcgtgtaggactgcttatcgtgccggatctctgtcgtcggaacgtccaccagaatcagcgtatatccgtcctgcagctcgatacgggagctttcctcctcatcgagtgctgccttgatatcgtcgatatccacattcagcacatcggcaatctcctcacattcctcctgcgtgggactgatcatccgcacccacacgccgtcctgcagcttctcctcctcatgtatcacctgattatcggtcataaaatatttcatcatagcttttgccctatatcctctctacctgtcatatagaatctgatatgcattcagactgagttttcttccaaactttgtccctgcatttttaatctgaccgcaatactcaaatccatacacctcatgcagatgaatgctcgccgcattctcactggtgattaaagagatgaccgtgtcaatctcgtcacactctgctgcataggcaagcactttctccatcaggctgcggccgatgccacgccctcgataatccttgtgtacataaattgaaatctccaccgcagggtcaaatgccttgcggtccctgtaacgggaaagcgacgcatatcccgccaccttgccgtcctccacatcaacataaatgacatagcgcccgttatgctccgcaaaccatgccttccggttctccatgtttttgacttccgtatcaaacgttgccgtcgtgtgaagaatcgcttcattatatatatccatcaatgcaggaatatcctgcagtaccgctctgcgtatcattctcttaccagctttcgtgtcctaaaatgtctctgtaacagaaaacgccttcggaatccgaaggcgttttcccttttttatcatatcacagtttttctggcacttctacgctaaatttgcaaaatcacaggaaatcacgcgccacgtttccgctccggaagctgcgccagaatgattgcagcaaacatcagcacacagccggaaagctcacgtaccgagagcgcctgccctaatattacccagcctgcaatcaatgaaattaccgactccaggctgaggattaaggacgccaccgttgggttcatgccacgctgtccgacaatctggagtgtgtacgccacgccacaggaaaaaacacctgcgtacagcacaggaacccacgcctgcagaaccgctcccatatccggtttctcaaacagccacatgcagaccgccgacagcagtgcacacacaaaaaactggatgcacgacatttttacaccgtccgccagcggcgcaaaataatcaataacaagaatgtgcgccgaaaatgcaaatgccgacagcagaacgaacagatctcccttctgcagggaaaagctgccatctgtcatacataaaatgtataaccccgcgacagccagcgccacagcggcccagattttgattcccgccttttttcctaaaaaaatacttaatatcggcaccagcacaatgtacatcgctgtgataaatcccgccttgcctactgttgtatactgtattccgatctgttgcagattgcctgccacaaaaagcatgaccccgcagcagattccgccaagcagcagatttttccggcttcccggtgtctttccggcatcctcttcctttgcacctgttctatgaaacactgcaatacatgggatcagcactagcccgccaatcacattccgcactacgttaaaggtaaacggtccgatataatccattccaacactctgcgccacaaacgcaacgccccagatcgttgccgtcaaaagcagcagcaaagattgtctcatcacaaatttattcatcaccctactacagaacgctccgcaggaactgtcttgcctctggcgtcttcggattggaaaaaatctcctccggctttccttcctcaagaattcttccatccgccataaagacaaccttgtccgcaagtccgacttttccgatccgttcttttgcaagagcttctgtccttcctttctccatcttttttacatgaacaggcgccagcattacattctcaagtacagtcttgtgt

SEQ ID NO: 11598 - DNA, 7389 bp, Unknown
  gut microbiota DNA sequence
ctcccgcaaagaacatctgcgcaaaaacagccacctcaagcagaaccgtccccgcggacagatccccgggccgccggaattccagcagcgccagaactgcaatgccaaataccagtaagagcagcgccgctccggtaaaccggttcaaaaacagtccgctgaaaatgaagatacacagtgcccccacgataccgccaagcagttttccattctcatccatttctgccaagatgcagccaagcagtaccggaaccgccgcaagcacaagaagcaataccgctgaagccgtacccgctgcggagccttccgtataggaagcagctgctccaaacaccagaatgagcagcccgatgctccacgacacaagattcaccgcattgcggtaatattctctccgcaggtgggacacgaaaaagatggtctgcgttaccgcataatatatagaaagaatcagaaacctttccgcatcctccgtccagttacacatgagcacgccgagaatcaatgagatgcccacaccaatctgccctatgataaggaagagattcgaccgcagacgtgacagcacacacagaaccaccgcccacaccagcagtcccagataaagtatgccgtcgtttattgcatggaaataaaaatcacttaaaaacagcgagagataccacgctcccatgccgcagcccagcagcccaagaaatgctttattcctgcggtcatgtgccacaagaattcctcctgccagcgtgatcgcggcactgacggtatacatcagaaccatctttactccctggctaagatacggcagcaccagcatcgcaaaaaacaccagactcaggaagatcagtcctgcagcgcagaccggcagaatcgccctgccgatcgttttttccagatcctgcttcccggatgcctgctgatatcccgcctgtgctgccaccggccgcggcggtgtctgctgatacgcctgctgcgggtttcccggctcccgcgctgactgtaacattgcgccctgcgccggcggtatcggatttcccggctccgctgtctgcactgccggctgcggcggtgtctgctgatacgcctgttgcggatttcccggctccgctgtctgcgctgccggccgcggcattgtctgatcccacggctgtgccgctgcccccggctgtccatacgccggccatccatacgccgccttcggcatcgccccctgacggtatcccgcccgttcacggtctgcctgtgccgcgatcactgtgcgcagcgccgtcagctgtcgtcccagcgcatccacttccctctgcatctgatcaatcttcatccgtgtaagatcgtcccccagatccccggaccgccaggcaagcagtaactcattgaaccgtctctgttcctctaaaagccggttctcacactccactaattgttccagcataaactcctctttcctctcctgtcatttagttctctgtcactcattgtaacgtaccctcatttaaaacacaagaactgtccgcgcgggcgtttccttgaaaaaattgtttttatcattaagattttgccaatttctacgctttttttcccaaaaacaatttgtatatgctataatgtctttgattattctttaaggagatttctatggacattattatcgtaggctgtggaaaagttggttttacgcttgtcgaacagctcagcaacgaagatcacaatattgttgtcattgatgaaaagccggaaaaggttcaatatattaccgaccgtctggatgtgatgggcatcgtggggaacggcatcaaccataagacactgctggaggcaggcatcgccactgccgatcttttaatcgcagttaccggagatgatgagaaaaaccttctgtgctgcgtgattgccaagaagaccggccactgccagaccatcgcgcgcgtgcgcaatccgatctacaacggcgagatcgccttcctgaaaaaggaattcgggctcgccatgattatcaatcctgagttgacggcagccaacgagatttcaagagtatttcagtttccttccgccatccgtgtggattcttttgcaaaggggcatgtagagctgcttcactttaaagtcagcgagaattccccgctgattcatttaaagctgttcaatctgcaccagaccctgcacagcaacgtgctggtgtgtaccgtcatccgcggcagcgaggtcatcatcccgaacggtgattttgaattccgcgccggagataccgtcgcaatcgcttccgagcgccgcaacgccattgactttttccgtaagatcggcatcgtcaagaaccgcgtcggcaatgccattctcgctggcggcggtaaggtttccttttacctcgcaaagattctcatccagtcgggcatccgtgtgacgatcatcgagatcaatccgtcccgctgcgacgttttaagcgagctgcttccggaggcgacaatcatctgcggtgatgccaccgatcaggatctgctgtccgaggagggcttagagcaggcgcagggttttgcagctctcaccggtcttgacgaggaaaacatcctgctgtcgctgtacgccaacgatgtctccaatgcaaaaacggtgaccaagatcaaccggagcagttttaactccgtcatcaacgagatgaatctgggaagtattatttatccgcgtgtcattaccgctgattacattttaaaatatgtgcgctccacagtgaattccatcaacagcaacgtggagacactttacaagcttgccggcggaaaagccgaggctctggaattcatcatcaaggagaattctgccgtcgcaggcattccgctgcaggatctgaatttccgcaagaatactttaatctgctgcatctaccgcaacggtaaggtcattctgccgggtggacaggatatgatgctcgccggagactccgttctggtcgtcatttccggataccgcatctccgacatcaaagagattctggaggattaacctgcaatgaattattccatggttttatatattctgggctatattttacaatttgagagcgcgtttctgatgctcccggcgctggtctcgctgatctatcaggaggaggccggcattccatttgtcattaccgctgcaatctgtctggttttagggattgttttcacacataaaaaaccgtcttcctcgaccgtgtatacaagggaggggtttgttactgtcgccttgagctggatcgttatgagtattttcggcgctatccccttcgtgtggaacggcgacattccatattatgtagacgccctgtttgaaacggtctccggttttaccacgaccggttcaagtattctctccgatgtcgagtccctgtcgcatgccagccttttctggcgcagtttcagccactggatcggcggcatgggtgtgttcgtctttattatgtcgatcctgcctctgatgggcggctctacgatcaacctcatgaaggcggagagcccgggaccttccgtcagccgtctggttccgcacatcaaggataccgcgaaaatattatacggcatttaccttgccatcacgctccttgagattgtcattctgtgtgcgctcggcatgccgctgtttgagtctcttctgacgagtttcggcacgaccggcaccggtggtttcggtttccgtaacgacagctttgcaagcttttcgcctgctatccagaacacggtcacaacttttatgatcttaagcggtatcaattacacattttatttttgtattttatcgcgcagaatcaaggatgcattccgcatcgaggaagtgcgctggtatctctttttgatctttgcttctgtcggaatgattacctataatatacgcccgctttacgcaaataccagggacgcgctgcggaatgcctttttccaggtcggtgcgatcatcaccaccaccggatattccactgccgacttcgacatgtggcctgcactctcccagacgattcttgtgacgctgatgttcgtcggcgcatgtgcgggaagcacaggcggcggtatgaaagtatcccggctggtgattttattcaaaaccatccgcaaagagctttccctgattatccacccccgcgagatccgcaagatccgcatggacggacatgtcgtagaacacagcaccctgcgctctaccaatgtttttctggtcatttactttattttgctcatgctgtcaacgcttatcatcagcctggacgagttcgattttaccacgaactttacagcagtcgtctcgtgtctgaacaacatcggtcctggcttaaaccgtgtcggaccggcgcagaatttttcgatcttctcgccgctctccaaggttgtgctgatttttgacatgctcgccggcagactggagcttttcccgctcatgattctgttcatgccgtccacctggcgtaaaaaataacgtgcagccggcaatttgggctgcgcagctttgaaccggtagatatttttctaccggttttttattggctttttatgggctttttcctgctccggatgctgtatccgcatccgttaatgcctgcgccgcgccgtggcgaaggctttttctctgcccgcaggcagacgtttttactttttccttgccctctgctggcttgtggtatatatttgttatagttttaaattagaagtacacaggaatggagattgctatgtggattgcagataactggaaagattacgaagtcattgactgctcaaaaggagaaaagctcgagcgctggggagattatcttctcgtccgtcccgacccgcaggtcatctgggacacgccgaagaccgagcgcggctggcgcaaaatgaacggccattaccaccgcagcgccaagggcggcggggagtgggaattttttgatcttccccagcagtggaccatccattacggcaagctgactttcaacttaaagccgttcagttttaagcacaccggactgtttccggagcaggctgccaactgggactggttttccgaaaagatccgcagcgccggacgtccgatcaaggtgttaaatctgttcgcctacactggcggtgccacgattgccgccgctgctgccggtgccagcgtcacgcatgtggatgcctccaagggaatggtgacctgggcgaaggaaaacgccgtctcttccggtcttggtgatgccccgatccgctggattgtggacgactgcgtaaagtttgttgagcgcgagatccgccgcggcaaccactatgatgcgatcattatggacccgccttcctacggaagaggacccaagggtgagatctggaaaatcgaggacgccatctatccgctggtgcagctctgtgagcagttgctgtcggacgatcctctgtttttcctgatcaactcctacaccactggtcttcagccggcagtgctcagctatatgatgaataccgtcttaaaaaaacacggtggtcatatcgccgcagatgaaatcggtctgccggtttccagcaacggtctggtgcttccgtgcggggcaagcggcagatttgagcgctaagggcgggaacgattttgtcctgtttttgcacaatttttgtaaatagttgttttcctgcatacacaatacaatttttgtggtacgctgtttttatgcaaaggtgatacggggatccggatcaccggcaaataaaaacgaacaggagaatgatttctatggcacagtttgtaaaattagttcccgagaatttaaaggcgctgcgcgaagtaaatccgcgcctgatgtcttataatgtagaattcgccgaggtaaccggcggcaccttctggaaagcgtacacaccggagcaggttgcaggaaccgaggaattccatgtcgctccgagcgcagacggcattgctgcaatgtacaaggatctgatgcaggtatacgcaccgatcgatctgtacaacgagaagctccgctccctcgcaaaggagctcggaaccgcatgggtgcgtgtgtccggcacctgggcaaccaagacttactatgattttgacaatgcaacaggcggtattgctccggagggctacttaaatgtcctgacaaaggagcagtggattggtgtgctcgacttcgtaaaagcgatcgatgcgaaactgatgatttccgttgcgaactgcccgggtctgcattccgcagaggaaccgtggaatccgagtgaggcggagaagatttttcgtctgagcaaagaacacggcgtaccgatcgacggcgccgagttcgcaaacgaaccgaacatgatggaggataccggcttcccggctggttatacaccggctgattaccaccgcgatcaggatctgtttttcgcgtgggtacgcgccaactatccggaatgtatctgtatcggaccgagcagtgttggcgagggtcttaccatcaatggcggtgatgacaacagcaagagtggtggtatcgagcagcttgtaagagagaactgctccacaaccgacctgttagaggacaccaaagagccgttggacgtattcagctaccattattacaacggtgtatccgagcgtcttgcttccgtgatgccaagcggacactggctggcagataccgcccataccgaggcgtatctggacgttgcattaaactgtgcgcgcacctatgctccactccgcgacaaatactgcccgggcggcgagatgtgggtaacagagtccggcgacgcaggcggtggcggtgatacatgggcttccacgtatctggatgttttccgtaccttaaacgagctcgctggattcgcagcgatcacagacggcgttattttccacaatacactggcttcttccgactacggcttcctggcccgcgaagtatttgatccgcgcccgaactattttgccgtattgttgtggaaccgcctgatgggtacgaccgtttacgataccgcagagccaatccgcgagggcgcacatgtcttcgcacattcccgcaaagatggaaaagagggcgttgtatatcttgtgatcaacaactcgctgacagaggcaaccaccgtagagcttccgaagagcgcagagcgctacacactcgccggcgagggcggcaacgtgcgtgccgctgtcatgactttaaatggcaagccacttgttctgggtgccggcaattcgcttccggaactcactccggcagcacaggaagccggaacagtgactcttgcaccggcaacctgtacattcttcgtactgtaagcagcgcggggaagcaatctgcaccgatgagtaagccgtataagctggctagtaagttgcattactggctacagtggggcttaagtaagttgcaacggcatgtgcgttaatacttgtatcggctggctggcaatataccggtatgtaatctgtaat

SEQ ID NO: 11599 - DNA, 153 bp, Unknown
  gut microbiota DNA sequence
atttcataggaaataccgtgatacattcatgtgtgaaagtggaactttcctatgaaataaaaaacgctccgcgaggatgcgcagctcgcggtaaggaaaatatcgctttgcgaaccgctcgcgcgcggagaatctcgcaagcgagattctttt

SEQ ID NO: 11600 - DNA, 8133 bp, Unknown
  gut microbiota DNA sequence
tatggcttatagtaagacaacatttttttgaaatttttactcattttcacactccttatctctttttcaaaagactcttctattttatctgctacgcgaaaaatgtcaagcgacacgccgcacgaactgtgctatactatacatagttacgattaccatttaaggaggcatcattatgaacccaagacaaatgcattatgaaacgcttgccggtaccatcatcaaaaatcttgccagacgccgcatggaaggctactactgcgccaccgtcgaggacgctgaaaagatggcattctctttccttaccccgggctgcacagtatctttcggcggctccatgaccctggaggataccggaatgctgaccgccctgcgccacgatccgggaatcaccctgctcgaccgcgcccaggcaaagacaccggaggagacaaaaaagatctatcacgatgctctttcttccgatttttattttatgagcaccaacgcgatcaccaaagacggcgaacttgtcaatatcgacggcaccggcaaccgtgtggcagccttaatctacggtccggaacacgtgatcgtcatggcaggcatgaataaagtggctgcaaacgtagacgaggcattaagccgtgttcatggtaccgccacaccgatgaactgcaagcgtctcggtaaaaatacgccttgttccgctaccggcgtctgttccgactgcctgtcccctgactgtatctgcaatcaggtcgtcatcacaagacgaagcggcatcgagggacgcatcaaagtcattctgatcggcgaggaacttggatactaaaatccaggtttccacccgacaaggcagaaaaaatcctgcttgccggatttccacgccgcgcatggctgcttgcgacctgaattctattacgaaaaaaagagttaccgcgaaacggtaactctttttgcatacattagttgtactttctttttcttgctgcttcagatttcttcttgcgttttacgcttggcttctcgtagtgttctctcttacgaatctcctgctgaatacctgcctttgcgcagtttcttttaaaacgacgtaaagcgctgtctaaagtctcgttttcttttacaattacactagacattatctcacacctaacctccctccagttgcgtattgtgcatattcaactgtttgggtcatattcattgcactatataagattataacacatatttttttcccgtcaactgtttttctaaaaaagcgaaaaattcagacaatttactcttcccgcagtttgaatttggtaatcagaccatccagggaatctgcctccgccgaaagttcctcactggtagcagatgtctcctcggaagctgcggaattgctttgaataacatccccaatatccttcacgccgtttgcaattctcttaacggactctgcctgctgatcggaagacacacggatatttgccacttcctgaataatatcgtcaagttccgtcaataccttgttcagggattctgccgtctgctgtgtcacggtgttgccacggtcaacctcactctgatttgcctccagaagatgtctggacgtctcagccgcctgcgcactgttctccgcaagcatacggatctgttctgcaacaaccgcaaatcctcttcctgcctctccggctctcgccgcctcgatggatgcgtttaaggaaagcaggttcgtctgggaagcaatgctctcgatctggccgatcacacttacaagctcctgggaggtgccggaaatacgctccatggcctccgtcagttcctgcatcttctgctggctgacattcgcctccatgccgacttcctttgccttgtcatgcaccacatcggtggatttactgttcgcctctacctgctcagatacggttgcgacactctccacaagatcgtcaaccgcacttgcctgctccgttgctcccttcgcaagatcctgagagctgatagctagctgctctgcgccggctgccacctgatcggaagactcgcggatctgcttaaacgtgccgctcacatcggtcaccatgctgatcagatgtgtcatgacattctcaaattcgccgacataagattccttgcaattggatcttaccgcataattgccctgtgcaaactcttccagaatatatccaagatcctcaataatcttgttcaatgtagtgaccgtcactcggaaactgtccgccagctttcccagctcatcatccgagctgtactgcacttctacatccagatttcctttggagatctcttccgctacttttgtcagctccgtcaccggatccaccactgcatccacgatcttctggctgttcctctggatcagtctcgtatcattgactgccgtaataagaaatacaataagaaccagaatcgtgtaagcgagtgaaaactgcttcggcacataagccgccgcaaaaactgcaatcgctgcaatcacaagcgtcacatacattaccacactgactctccggtaacttccttttaccttatcactcagactaccttgtcccctatctctttcgtccatccctgtcctcctgttttatcagatatgcccatatcccgatacataaaaacggcatattgccgatacctacgtaccattatacaccgtttttactatttgtagcaacaaattataaaatatttttttgaattctaaattttataaatatacgcaatcgtgtatttctgtcgagtttttatgcaagctgtgcctcaagtgccgttttcgcctcggcaatggcatccggaatgcctgccggattcttaccgcctgcctgcgccatgttcggacgtccaccaccgcctccgccgactttacccgcaatgctcttgatgagattgccggcatgtgcgccgtgcgccatcgcatcgtctgtcgccatggcaaccagattgacttttccgtctgatgcagatgcaagaactatcacgccttctcccagctttccctttaactggtcgcccagatctctcagaccgttcatatcgacgccgtccacgctgacagcgaggagcttcacacccttcacttccacaacctgatccatgacatctccaagtgcttccttggctgccttgctctttaaggattcgttctcactctgaagtgcctttaactccgccatcagatgaccgatcttctcgacgagagttgctggtgttgcctttgcagccttggctgcagcctcgagttcttcctcttccttcttataatatgcaaatacattgtctccggtcagagcctcgatacggcgcacgcccgcagccacaccgctctcagagataatcttaaatacaacaatatcgccggtgttcgccacatgagtaccaccacagaactcctttgaaaaatctcccatggacacgactcttaccgtctcaccgtacttttcaccgaagagtgccatcgcgcctgtcttcttcgcttcctcgaccgtcatgacgtcggttctgacatcaatcttctcagcgatcttctcgttgacgattgcttccaccttcttaagttcttccggtgtcatcgctgcaaaatggctgaagtcaaatctggtgcgctcaccgtcctgataggaacctgcctgctctacatgtgtgccgagcacttcgcgcagcgctttctgtaacaggtgggttgcagagtggttcctgcaggtatccctgcgcagctttgcatccacactgagatctgctacatctcccgccttaatcataccgtttgtcatcttgccgatatggccgaccttaccaccacgcagcttgatggtctcttccacctgaaagataccggaggcggtgcggatctcgcccttatctccctgctgaccacccatcgtcgcatagaacggcgtcttctccacgatgatcgtgccgacctctccgtcggaaagcgcctccaccagctctgtctcggtggtgagcactgtgatctttgaagatgctgtaaggctgtcgtagcctgtgaactccgtcgtgatcgaaggatcaatctcatcgtataccgtagcatctgcgcccatgtaattcgttgctttgtgtgcatcatgtgcttttttcttctggatctccatggctttcttaaatccgtcctcgtcaatggaaaatcccttctcctccaggatctcctgcgtcagatcgagcgggaagccatacgtatcatagagcttgaatgcgttctctccggacagcgtcttctctccagctgtctgcatttccttctccatcttctctaagatggcaagaccctgatcgatggtcttggcaaacttctcctcttcctgcgtaagcactttgaagataaagtccttcttctcctcgagttccggataaccatccttgctctcatcgattaccgtcgctgcaagcttcgccatgaaagtaccaccgatgccaagcattcttccgtgtctcgctgcacggcgtatgatacggcggagcacatagccgcgaccctcatttgacggcatgataccatcggaaatcatgaatgttgcggaacggatgtgatcggtaatcagacggatggacacatcatcgagcgcatccttctggtaagactttccggacagttcacagaccttgtcgcggattgctttcatcgtatcaatgtcgaatacggaatccacatcctgcatgacaaccgcaagacgctcaagtcccataccggtatcgatattcttctgggaaagttcagtataaccacccttgccatcaccctcaaactgggtaaatacgttgttccatacttccataaagcggtcacagtcacagccgaccttgcagtccggcttaccgcagccgtatttttctccgcggtcataatagatctcggagcacggaccgcatggacctgcgccatgctcccagaaattgtcacactctccggtcttggggtcacggtagaatcttgtgatacgctctgccggcacaccgacttccttcgtccagatgtcgaacgcctcgtcatcctccccgtagatcgacggataaagtctgtcctcctccagtccgagcacctttgtcaaaaactcccaggaccatgcgatcgcttcatgcttaaaataatcaccaaaggaaaagttgccgagcatctcaaaaaaggtcagatgtcttgcagtctttcctacattctcaatatcaccggtacggatacacttctggcaggtcgtcactcttcttctcggcgggatctcctgtcctgtaaaatacggctttaacggtgccatacctgcattgattaagagcagactgttgtcattgtgcggcaccagtgaaaaactgttcattttcagatgtcccttgctctcgaaaaattccaggtacatcctgcgcaattcgttttctccgtaaaacttcttcacgacttcttcctccaacatgtttctttctattttaaatctattttgtctcttcgacgtttccggtctcaccggcattcttagcatccttgcggtcgctcaacttctttcccgcaaaaattccaagtcccgccaccacgaccaaaaccacgaaaatcagtacataatgtacaaaccatcccaaaaatgccatagtcaagtcctgcctttccccaattcttcacaccccgtgtgaaatcttctataactaaatcagtatagcgcaaccgttttatgatcgtcaagtaccgcttttttgaaattcctctcattcctcaaggatctcaaaaatctggttttcatgctttatttccacaacccgctccgccatcgcagcgttcgagatcctcttccggtaatccggaagcgcgctgtaatcctgccacatatgcatcggaaatacgtaatccgcatccgtgtgctccaggaaataattcatgccgtcaaactggtgctccatcagcctcggatctgccggcacaaacgccagatgaatcttcctgccggaaagcctgcggatctggctgcggtaatttgtacgcatggatccgttgatcagatcgccggctccgtcccagtgccagtcattcagatcgccggcatggtaaaatgccgcgccgttcgtctccacgtaaaatgccacgcccgcgtccgtcgagcgcagagtctcaatattcaagtcgtcgaccctgcatttttcatccgcccccacatagtgaatccgcttcgctacctccggcgcgaatccatgctttgtcagaaagtgcgggctcatcttacagtcttttgaaaaaataaaccggatcttcggatatttttctgcgagatgcaacacatccatatcaaaatgatcccggtgcttgtggcttgcgaacacgtagacgggcgtatccggctcgtactccggcagcacaccgccaaagtgatacccctccacccggtctccatcaaaccagtcaaaaatcagcaccttctcatccacctcgaccagaaaacaactgtgatgaataaaaataacctgcataattctcctcgtttctccgcaatgtcagaagttctgccctgcaaatctaatgatttctatttcatgcggccgatgatcgcattcgcacgctgatagatctctttcggatcaaacccgatctcgaaatgattgtcttcatagagaactttgccgttaatcatcgtcatcttgacattctgcttgctgccgctgtataccagattcttcacgatattgttttccggctgcatgttcggctggttcaggtcaatcatgacaatatccgcctttttgcccaccgccagacggtcacagtcctccagctgcattgcatgcgcaccgccggctgttgccatgtaaaggatctcatctgcacccacgcactcggcatccatctcccgcacctttgccaatgcggaggtaaggaacatctcgcggaacatatccaggcagttgttgctcgccggtccgtccgtaccgatcgccatggcaatgccctcatccacgaaacgcttcgtcgggcagatgccggaagcgagcttcagattggaagccgggttcgtcactgccgtcaggtgacgctttttaaagatctcaaaatccggctcctcaaaccatacgcaatggtatccgccgccgccgtactcatacatgccaagcgaatccgtaagctgtgtcggtgtcatgccccagcgctctttgcactctgccacctcaagctttgtctcggaattgtgcagccaaaccggagatttcaacttctgtgccagcgcagccacgccttccatcagttcttttgaggtggtgtactccgcatggaatccgacgatgaaagaagtcagatcactcatctcgttgacgatatgatagttttcctccatcagctctaccgtgccgccgaaattgttcagtccgctggtctgcactgtacggaatcccgtatctgcggatgcttttgcatcgaccggcgggaagaaatacatatcaaagttggacgtaatgccgctggtcaggtattccatgatgcccagaatgtttaaccagtatacatcgtcctcggtaagctgtccctcgcgcgggaacacctgctgattcagccagtcctgcagtggcagatcatccgcataggaacgtaaaaatgtcatggctgtgtgtgtgtgcgcgttcttaaatcccggcattaacagattgccgcatgcatcaatctcgcgatcccacaccaacacttctccatccttgcacacatccgccgtgtccgtcccatcaccgatgtagcagatcgtattccccttgacccagagttctccctccgtgatcttgaacttgtggtcatctgcaagggttaagatctttgcattataaaaacgtgtattcatgtcactttctccttcttctgtctgctgttttcactctatgaagtctctctccagcccgaaatcttcaccgcgtctctgcggatattattttccgatgctcttgatcgtctccgtcacaagagccttgaacttcggtgccacacggtctgccgtctcctgtacttcctcatggcagaggggaaccgccgagataccgcatgccagattggaaatgcaggaaatacctacaacgcgcatgcccatatgacgcgctgcgatcgcctcgcatgccgtactcataccaacggcatcggctccgagtgtccggcacatcgccacttccttc

SEQ ID NO: 11601 - DNA, 1534 bp, Unknown
  gut microbiota DNA sequence
ctcccaatgcaggtaatagtttatctgcgcacaaaggctgaatattggctgtagggaagcccaaagtacgccctaccttacgaccgtcaaccaccgttccggtcaaataataatgataacctagataagaatttgccaattctatctttccctcacacaagcaagaacgaatcaaggtagaactgacagaaactccatcttccgttaaggccttagattgcatcactcgcataccaaattctttcccatattggcaatactcctgaaaaccttcattcttactatgaccaaaatgatggtcatggcctacaaaaagagtctgcacatgatattcttcatgcagaaccttcataaattcacgagcagatagcagcgacaactcctttgtgaaaggcaacaacacgcaatactctatcggtgactgttcaaaacgttctattttctgggaaagacacgtgagcagccgaggacgaaaactagtatccaaaacctgccgaggatgattagcaaaagttatcaaacaagaagcgataccttctgccttggcaatattatgaacttgctcaagcaaatattgatgtcctctatgtactccatcaaaacagcctatcgtcgctacacatgggggaagacttatacttgcagaacctgtaactatttccatttatttacttatgaaattttgaagttgtatttccagattatctcctggaacatagtgaaaaactttaatccctaataaagaagctgcctgacaattatctttggaatcatctacaaaaagagtttcttctgctttaatccctgcctctttcaatacggtccgaaaaatttcagcatcaggctttgctaaatgcatctgatatgaaagaaacactcgcgtaaagcaaccaagcatctgcattcctttataaacgaacttatcagcacaatgctcccaatgcaaatcatttgtattacttaataaatacaatttatagttctcttgaagtttcaataacaattcgaacttataatctggaatatctttcaacatagcattccatatctgatctatctcctcacccggaagttcacgccccacttctttgcaaatacgatcccgaaactggtccgtagtcagtgtgccacactcatactccttaaagaagcctttttcattcgttccggtcatccactgacgcacttcacgcagtccaacttcctccaaacgatccatacaacggtcaacatccaagtcaaggagcacaccgcctaaatcaaatataatatttttaatccggttcattttttcatcatccgtttaactcctcgccaaatctcaccaatccaaagtaccacagaagtaccggctatgatataagcccattccaatgcaggcaaaggctctgtacggaagaccttgccaccaaaagtaacaataatgaactgaccaaccagaataatcaatgccactcctaacatacccatcgcatgaccggcatctttaaagattgaatgattcgtaccaaatacgctggcattaaacaggttc

SEQ ID NO: 11602 - DNA, 5402 bp, Unknown
  gut microbiota DNA sequence
ccagagaaacccaagagtccgaaacagttgttttattgcgatgaaaggaaaaaggatcaaggataaagattctgtcaacagaacgcgaattgccttgtcaaagcccctggtgcagtgtataattgcactgatgatttgcgagtgaagaacacgggaggaagacatgggaaaagacgttattattgcatgtgattttaacagtaaggcagaagtcattgcgtttcttgagaagttcaaggacgagaagccgttcgtcaagattggaatggagcttttttatgcggaaggaccggacatcgtgcgtaccatcaaggggatgggacacaagatcttccttgatctgaagcttcatgacattccgaacacggtgaaaaaggcgatggcggttctctcgggactggatgtcgatatgtgcaatgtacatgcagcgggaacaaagggcatgatgcaggcggcactggagggactgacgagagcggacggcagcagaccgctgctgatcgcggtgacgcagcttacctccacgagcgaggaagtgatgcagcaggagctgtggattgacaagccgatcgatgagacggtcatgcactatgcgaaaaataccatggaagcaggactggacggagtcgtatgctcgccgcttgaggcgggtaaggtacatgcagtctgcggggaaaagtttttgacgatcacaccgggcgtgcgttttgcggacggcgatgtgggagatcagaagcgtgtgacgacacctgcaaaggcaaaggaactcggatcggattacatcgtagtcggaagaccgatcacacaggcggcggatccggtagcggcataccgcagatgtgtggaagaatttgtaggttaggacgacatacacgaagaggagatggacgaaacagcctggtctcctctttttttcataggaagaaaaggacggtggggaagatgcctcaaaaaggattgagcggaagcacattgaagttgatcgcgatcatcacgatgctgatcgaccatatcggagcggcggtcattgccagactgctgattgccgggcaggggagtgagatgctctataagatctattatgcgatgcgcgccgtcggcagagtggcattccctattttctgttttctgcttgtggagggatttttttacacgggcagccggaaaaaatatgcacttcggctgtttggatttgccctgctgtcggagataccgttcgatctggcattttccgggaaaatactggaattcggctatcagaatgtatttttcacgctgttgatcgggcttcttacgatcatgctgtttgatgcggtggtgaaaaagcaggagtggcatccggttttgcgcagtgcgctgcttgtcatcatcacattcgggggaatgggtgcggcctatctgctgcacacagattatgatgcaaaaggcgtgctcgcaattctggtgttttatatgacgagacagatgcggggattacagatcgtggcaggctgcctggcgttctgctgggaacttccggcgatcgtggcgtttatcccgattgcgttctataacgggaagcgcggatggaacataaagtacctgttctatgcgttctacccggtgcatctattggttctttatctgatctgtgtagggatgggaaccgcgcagattgcggtggtgtaggagagaaagagaggaagagagtaagtatggagatatcaaaggagacgcggaaacggatgatgcagatcattgcatttgggattctgctctattgcgggatggagcattttgacgtggtgatcggagcggtggattttgtgctggggattgtgatgccgtttctggttggaggcgcgatcgcattcgtgatcaatgttccgatgaagagtatcgagcggcatctatttgcgaagaacgggaagtttgcaaaatggagaagacccgttgcctatctgctgacgcttgcgcttgtgatcggtattatcacgctggcacttgtggtcgtgataccggagcttggaaatacgatttccatgattgtacagcaggttccggttgcggtaaaagccgtacagaagtggctgacagatcttccggacagctatccggcacttgcccctgcggtggcggagcttaatattgactggtcatcgcttgccgactcgattgtgacgtttgtgcagaattttgcggcgggggttgtgagctccggcgttggtattttttccgggatcgtgagcggtgtggtgacgtttgtgattgcgtttacgttctccatctatgtgctgttccagaaggagcgtctggcgagacaggcaaaacagattctgtacgccgtctttccggagaagaccacagagaagattctctcggtggcagccctgtccaatcaggtgttttccagtttcctgtccgggcagtgcgtggaggcggtgattctcggcaccttgtttgtcattaccatgtcgattctggggatgccgtatgcaatgctgaccggaatcgtgattgcgataacggcgctgattccgattttcggcgcatttatcggctgtgtcatcggaatgcttctgatcgtgatggtagatccggtgcaggcggtgtggtttctggtgctgtttttggtgttgcagcagattgagggaaacctgatctacccgcacgtggtgggaaactccgtcggactgccctccatctgggtgctggtggcagtgaccgtcggcggcaacatgttcggcatcctgggtattctggtgttcattccgctttgctccgtgctgtacgcactgtttgccatgtttgtgaaaaaaagactgcgggagcgggagattcccgagagccgctggaacgcgccgtcaggcggcgctgcggcggccgagcccgcagaagagcagtcttgtggataaatgacaaaaagcctttcggaagtgtaggagggacttccgaaaggctttttgaaatagtgtaatatggtatatggaatatatataaaacccgccggcagtgccggtgagagagtttttaggcggaactgacagaaccccaacccccgcgtcgaaactcaacagctccttttgatgattctatcttatcgggaaaatgtgtcggaagcttgacggcaaaatgaagaatgtcttaatatagtgtaagaaatttctaaaaagtggaaaatatttataaaatgacgttggaaaaaggggaagcattacttggaagcatacgaatatctggaaaaaataagagcggcggcgccgcgggtacactgtatcacgaattatgtgacggcgcatgacgtggcaaacatgatcctggcgtgtggagcgaacccggtcatggcggacgagccgcaggagatgggagagatcacggcgcatgcgggggcgctcgcccttaatatgggaactcctggcgagcgcagagagcaggcaatgcttgcggcgggaaaggcggcaaacgggaacgggattccggtagtgcttgacccggtcggcgtcggtgcgagcgcatttcgccggaagatggcagaagagctgttggaggcggtgacgtttaccgccatacgcggcaacatgtcggagatccggacgctttctgaactggcagaaaagaaggtgaccggctcatccggcggcgtggatgtatgtccggtggatgtggtcacggaggagacgcttgcggaagcggtcacctttgtaaaggcggtctctaagcaccttggtgcggtgcttgcggtgaccggtgcgatcgatcttgtctcggacggacagcagtgtgtggtgatccgcggaggaagagaggagatgagccgggtgaccggaaccgggtgccagctctccggacttgcggcggcgttcctcgcggtggcgcggaatatggaagcgccagctggaagcaccggcgggaatactgcgggaggagcagcatgcgcggagcgcggtatggaggcggtcgcggcggcagtctgcgtgatgaatgcagcaggagagattgcatgggagcagcgcggtttatgcggcggaaatgcctcctacgggaccggtatcattgatgctgtgtaccggatggaccagaaaatgctggagggaaggattcgttatgaagtgcggtaaaagagatctgctgctttatgcagtgactgatcgaagctggagtgaaggaacaacgctgggggcgcaggtggaagaagcgctccggggaggcgcgacatttgtccagctacgggaaaaaaagctgaccggggaagcactccgtgcggaggcgcttgagatccaggcagtgtgccggcggtacggcgtgccgtttgtgattaacgacgacgtggcgcttgcgaaagagattgacgcggacggggtgcatgtcgggcaggatgatatggaagccggcgatgtgcgtgccattctgggcgctgacaaaatcatcggcgtatccgcgcataatgtggaagaagcgctccgcgcagaacgtcatggtgcggattatctgggcgtcggcgctgcgtttacgaccagctccaaaccggaggcgggacacattgacgcggagacgatacgtgccatctgcgagacggtaaagattccggtcattgcgatcggcggcatcaaggaggagaatcttctgcggctgcgcggaaacggtctgtgcggtgttgccgtgatcagcgccatttttgcacagaaggatatcgaggcggcgacgaggcgtctgcacgctctggcagaggaaatggcgggggatcaggaatgaagggtgcaatttttgatatggacggcacgctgctagactccatgcaggtgtgggttcacgtcggcgagcagtatttgcggaaccggggaatcgaaccggaagaagggctcggagatgtgctttttcccatgagcatgcgggacggagctgtgtatgtgaaggaaaggtacggtttgccggatccccccgatacgattgtgacggacatggacgcgattgtgtttgcggcataccgggatgaggttctgccgaagccgggcgttgcggcatatctggaatcgctcaaaaagcagggaataccgatggcggtcgccaccgcgacgaaccggccgatggtggaggcggcgctcgcgcggacaggacttgccggctattttaaacagatttttacctgcacggagatcggcgcgggaaaagaaaggccggacatctatctggcagcggcaaaggcacttggcacgcacccggcggacacctgggtgttcgaggatgcgctctatgcgattaagacggcaaaggcagccgggttttatacggtggggctttacgatgagacgagcagaaatgatcaggaggcgattgccggcctggcggactgctatgtgcgggagattcaatctgttcccacacaagactgtacttgagaatgtaatgctggcgcctgttcatgt

SEQ ID NO: 11603 - DNA, 1047 bp, Unknown
  gut microbiota DNA sequence
ctggcagtaggcacagttaaaaatacactcgttggtgaacaggatcttgagcagggagatgcatcttccgtctgtagcaaatgcatggcacacgccgggagccagacaattccccatgtgcctgccatctcctctgcggtcggcgccgcttgaggtacatgccacgtcgtacttcgcggcatcggtaaggatggcaagcttctccatgagggagagattctgctgaatgttcatgtgaaagcacctcctgacgaaacaaatgttcggttaaagaatagcacatatgttcgataaaagcaagataaaatcgaatatttgttcgagaaagattatggttcacttggacagtgggtatatgatataatgtacgcgaaggcaaaagtgaacatggagcagagacggacgccatgcttgcatgtggcggacggatatgatccatgtgaacgcgcccgcgagtccgggaaaccggaggttttccggacatttgccggagcgggcatcggagactttagacggatgatagggcgaatgcccgttagtccgggaaatctatgatttcctggacgagcactgcgaagacgtgacttttgccagagcggagtcgtacagatagaagccccgggcgggctttggaatggagaaagatggatacagatatttttgagcagttcccggatcgggaaacatttgacaaatactggaacgagaattatcagccggtgacatatgaggatgtgcgcgaggcgttcacggattttgtgaagtctgcggacggtcacatctacctctcggattacgaggagaaggggctgatctcccgggaagattttaaggaaaacctctcgcaggaggcacagtttacatttgaggacggactgacggaagttttttacgataagaatccggagctttacgagacggcgttcgcgctctacgaggagtcaaagcttaccggaaaaggagatgcatcggtggcgcagacgtttcacgagacgtttcgcgcgctctatgcagagtttctggacagactgtatgatgaggtgctgg

SEQ ID NO: 11604 - DNA, 2255 bp, Unknown
  gut microbiota DNA sequence
tatcattttaattttcagaaaaagttcggacagaattttctcattgatacccatgtgctcgagcgcattattgaggcggcgggcattacgaaggatgactttgtgctggagatcggaccgggcatcggcacgatgacccagtatctgtgtgaaaatgccagagaggtgacggcggtggagatcgatcagaacctgatcccgattctggcggacacgcttagcgcttatgacaatgtgacggttatcaatgaggacattttgaagctggatattgtaaagctcgcggaggagaagaatgccgggaaaccgatcaaggtggtggcaaatcttccgtattatattaccacgccgattatcatggggctgtttgagagccatgtgccgattgacagcattacgattatggtgcagaaggaagttgcagacaggatgcaggtcggaccggggacgaaggattacggtgcgctctcgctggcggtgcagtattatgcaaagccggagattatcgcaaacgtgccgccgaactgctttatgccgcggccgaatgtcggcagcgcggtgataaggctgacgcgtcatgagaccgtgccggtgcaggtggaggatgaaaagctgatgttccggctgatccgggcatcttttaaccagaggcgcaagacgcttgcgaacggtctgaataattcgccggagattcatctctccaaggaagtgattcaggaaagtattgaggagcttggcgtgccggtgactatccgtggagaggcgcttacattggaacagtttgcggcgctctcgaatattatcggacgtagaatgaagcagcaggcatagagagaacagggggaaacagacaatggatggacaacagaacaatcagagtggatggaacaggaacgagacacccagaacatacggtgaagatacgaaaatgtatcagaaccggcagaacgcgtcgcagcagccgaattacggaaatgtgcaggacatgagtcagcagccgaattacggaaacggccagaacgcatatcagcagccgaattacggaaacggccagaacccgtatcagcagccgaattacggaaacggccagaacccgtatcagcagccgaattatggaaactggcaggggaatccctacccgcaggagcagcatggtccggtatccgatgttctgtgcaatattcttctggtgatctttatggcgcagattatcatcaattttgtggtatttggtgtgacatggaacgcgatggcgggggaaggaatagacgcttatctcgacggatccgtgagtcttggcagcccggtgcagatgctttccatgttttccaatctgctgtttgtggcgatgcttgtgctgttgattctggatattgtaaaaatcagcaatcagaaatacaagatcaccggtctggtgctgtttgcgattttcttaagaccgggctattacgtctggagagcacatgtgctcaagagaaaaatgacgtttccgatcatctataccatcgtttacagcggagtgaccgtggcatattttttctattcgttttataaagttttttcactgacattcgggattatgcagagtctgaactagtgccgcggctttgtgggaatggaagatctccttggttcatataataatggacagggagatttttttatgcggaaaaaatggaaacactatattgatagaatgcttacattcgcgttgatcggcatattattgccgctttttatcacgataatatgtcagcgtatgcgactggaggaagtgatatacggcacgtacgacgcgataacggaggcggcagaaagagagggcggggaggaactggaagaacagctgccttttattctggcgaaggagatccgtgcggacgcggaggatgcggcgcttatggcgcagtgcgtgattgcgcggacaacactgtatgatgccgcggcgagaggggaggaacagccggctgctttttcggaggaagaattaaggcaggtgctgggggaaacatatgaaaaggccatggaacggcttgagacgtgcgtggaggagacgagcgggcaggtgctctcctggaacggcggctatgcgtatgctgcatatcacgcgatcagtgcgggaagtacgagagatatgagccggtctgcggaagcggcggtgccatatcttcccgcggtggagtgcccggcggatctgacggcggagggtacgctctcggtcatttattgtgaggaaacggacattttaaagcggt

SEQ ID NO: 11605 - DNA, 148 bp, Unknown
  gut microbiota DNA sequence
caatgttagctgattacatcggatcacttgatggagaaattcgtattgtaatggaatcaacagggcattatcatcttccggttgcacaatttctgtatcaaaaaggcttttttgtatgtgttgaaaatgcatatattatacgacaatt

SEQ ID NO: 11606 - DNA, 1168 bp, Unknown
  gut microbiota DNA sequence
gataatgtgtagtctccgtatctacactctctttttatcagaaagcctcgatttaatcaaagatacggctgaggtaaaacaaagagcgagacatccttgcctcgctcctgcttcatttcctatttgttattactgtgctgcatcccagcttgcaaacgcacagttcattgatctgaccagctcatctggtctgttgtacttaacctttgcataaatgtccatggtaatcttgctgctttcatggcctgccaggtattgaaccgttttgggatctaccgatgcatgaatgagattggtaatgtaagtatgccgcagctgatggggtgttacttcaaagtccagactgtaaaccacttttccgttatgagcagccttttctcccaagacaggtgtgacagtatgctttactctttttccatcttcataccgataatagctccgctccttgaccgtcctcgtaacaatatactgccaaagtcgcttaaactgcgtgtaggacagcggttcgctatccctgtttgaaaccacatactccgaagtcgaagtttcctttgctgctttcaaacactcagccaagcaaacaggaagggggatatttctctccgcagccttggttttcaattcatccgaaatcaccggtctgttatgttcggtgtgccatgcccgtcttaccgtcagatatggagtatctgtatccagatatactgaatcccattgcagagcaagaatttcttcccggcgtagccctgcatataaaccaatcatgacaaagacataaggcggcaaatctcggatagcatccaaaaggcgctccacctgttcatctgtcaaagcctgacgatcctcttgtggaacaccgccaccttttgttgtcagataaatcgttgggttgtggtcaataatcctgctttccatcgctgcgcgaaagatagatttgtaaaggattaccacagatttataaaccgatgcagattttttggaaaccggaacaagggcaagctgaatatcatccaggctaacctcacccatccgtttatctcccaattccgctataatatgccgcctaacctttgaggtgtaatccgtcaaagtagtagctcgtacatgaaccgactgcatcagcagccacttttcacaatactctgcaactgtgggcgttttccgatga

SEQ ID NO: 11607 - DNA, 11993 bp, Unknown
  gut microbiota DNA sequence
acttataaaagaatttgttatgggaaaaataataggcaatggttgcagcagagactgcggtacagtgaggattttatatgaaaaatcagcgaaaggttttccagtctttgacactgattctgcagtttggactgaacatgatcgtgccgatcgtgatgtgcacgctgctcggtgcgtggcttgggaaaaaatacggaatgcccatcataacagtgccgttgtttatcatgggcgcacttgccggatttaataatatatataagatggctaagaagatctacggacagggaaatgaggggaagcgggatcatgttgagaagactaaatgatgcattgcccggtcttgttctgggaattattgcatatggggcggcggtttttctggcgggaatctggttcgtgccggacaagctgcgatttactaccggacttgccataggcattgcccttgcctgcgggatggcggtcaatatggcggtggttctgcgggatgcggttgagatctacggggaggcgaaagcccggtcgaagattatcgcccggtccattaccaggtatctggtggtcgtcattgtgtttttcgtgatgatgaagtggaagtttggcagtctgccggcagcatttattggtgttttgggattgaagatatcagcgtatctgcagccccttgcacatagattcatttcaaagcttggaggaagaggtgatgtgccttcggacagcagagaaaatgaagctctataaggaggtgaaattgtgaataacgcaattttgatgtcttctggtgccgataatattgacttcatgatacatgggattttttcctatgagatctttggtcatacggtctggattacaacatcgcacgtctgcatcctgattgtgatgctgctgatgttggggctggcgatcgcggcaaatcggacgatgaaacatgcaaaggaaattccggagggctttcaaaatgttctggagatcatggtagagaaactggatgcgatggtatatggaacaatgggaaaagttgcggcgccgaaattcgtgaactacatcagcacgatttttgtgtttatacttatgagcaatatttccggtttgttcgggttgagaccgccgactgccgactacggcacaacgctggcgttaggtctcatcacatttgctctcatccatatcacgcagttcaagaatctgccgcctaagcagatctggaaagatatgtgttctccactgccgccgtggctgccgatctggttcccaatcaacctgatcagcgagatcgcagtaccgatctctctttccttacgtatgtttgcgaacgtactgtcaggaacggtcatgatggcgcttgtatacggactgcttggcaagatagcgattatctggccggcggcgcttcatgtatactttgatttgttctcgggagcaattcagacatacgtattctgtatgttgacgatgacttacatcagtcagaactatgagacggaatagacgtcgaaaccaaaaagattattttaggagggtatcagtatgaatatcacaggagaagatttaattttagcatgctcagcaatcggtgcaggtctggcggttatcgccggtatcggacctggtattggacagggtatcgcagcaggacatgcagctgcagcagtaggaagaaacccgggcgcaaagggtgacatcatgtctaccatgttacttggccaggcggttgcggagacgacaggtctctatggtcttttgatcgcaatgctcctgcttttcgtaaaaccgttggtataggaagagacggagagaacgaatataacggaaaggaggccggaccttggaagagatgaccagactctttaatctggatttccagctgctccacgatgtcgtgctcatggcgattgcagtatttttcctgttcatgatgatgtcgaagctgctgtttaatcctgtcagaaagatgctcgccgacagacgggaaaagattgccggagagttgtcggatgccgcgaatgacaaaaaagatgcagcggcgttgaaggcggattatgaagccagattgaagaacatcgacaaagaagctgaacagattttaagtgaggccagacagaaggcgcagaagaatgcagcgcgtatcgagtccgaagcgaaggaagaggctgcccgcattatccagagagcgaacgaggaagcagagctttccaagaagcgcgcgatggatgatgtcaaacaggagatgatcacggttgcatccatgatggctgcaaaagtggttgcggcaaatatcgatgcgtcggtacaggatgcgcttgtggaagagacattaaaggaaatgggtgattcgacatggcaaagctagtatcaaaggtatacggtgatgcactgttcgaggtcgcagtggagagcgggaggctggatgagatctgggagcagaccagagccatgcagaccgcgctggaggaaaatccggagctcttcgcgctgatgcgtcacccgaagatcgtaaaagaagaaaaagtaaagatcatcgaatcgatttttaccggtgaggtgtgtgcagaactggtgggacttttgcgcatgattgtggaaaaggatcattttgcacagatcgggaaggttttggcgtattttgatgatcaggtcaaagaatataagagtatcgggactgcatatgtgacgactgcaatggaattatcggatgcgcagaaggcagcagtggtgaaacgcttattagagaccacaaagtatgtaacatttgaaatgcattatgaagtggattccgcgatcataggcggaatgatgattcgcatcggcgatcgtgtcgttgactcaacggtcaggacgaagctgtacgatctgacacgcgaattatccaaaatacagttgaaagcaggtgaatgcgctccatgaatttaaaaccagaagaaataagttccgtcatcaaagaacagatcaaacggtatgcagcgcagttggaagtagctgacgttggcaccgtaattcaggtggctgatggaatcgcacgtattcacggtcttgacaatgcaatgcagggagaacttctggagttcccgggcgaagtatacggaatggtattgaacctcgaggaagataacgtgggtgccgtacttctcggttcccagaagaacatcaacgagggagatacggtaaagacaacggggcgtgtggttgaggtcccggttggcgatgccatgttaggccgtgtcgtaaatgcattgggacagccgattgacggcaagggaccgattcagacatcgaaatatcgtcagattgaacgtgtggcatcgggagttatctccagaaaatccgtagacacaccgttacagaccggtatcaaggcaatcgattccatggttccgatcggaagaggacagcgagagctgatcatcggagaccgtcagaccggaaagacagcgattgcgctcgataccatcatcaatcagaagggacagaacgtaaagtgtatctatgttgccattggacagaaggcatcaacagttgcatcgatcgttaagaccctcgaagaattcggcgctatgtcttacacgaccatcgttgcatcgacggcgagtgagcttgcaccgttacagtatattgcaccgtacgccggatgtgcgatcggtgaggaatggatggagaacggacaggatgttctcgttgtgtacgatgatttaagtaagcacgcagcggcataccgtacactctccttgctcctcaagagaccaccaggacgtgaggcatatccaggagatgtcttctacttacactcaagacttcttgagcgtgcagcaagactttccgataagctgggcggcggttccctgaccgcgcttccgatcatcgagacgcaggcgggcgatgtatctgcctatatcccgaccaatgtgatctccatcacggacggtcagatctaccttgagacagagatgtttaacgcaggtttccggccggctatcaacgcaggtctctccgtttcacgagtaggcggttctgcacagatcaaggcgatgaagaagattgcagcgccgatccgtaccgagctggcacagtacagagagcttgcagctttcgcacagttcggttccgagctggatgcggatacgacggagaagttgacgcagggtgagcgcatcaaggagatcttaaagcagccgcagtatcagccgatgccggttgagaagcaggttatgattatctacgcggcaaccaacaaatatctgatggatattccggttgcggacattcttccgtttgagaaggcactgttcgagtatgtggatacgaagtatccggaggttccggaagcaatccgcactgagaaggtaatcagcgaagagacagaagcaaagctcataaaggcaatcacagagtgcaaggcagagttcacaaagtagacggcagaaaggcggtgtgcgtattatggcctcgatgagagacataaagagacgtaagagcagtatacagagtacacagcagatcacaaaagccatgaagctggtgtctaccgtgaagctgcagaaagccaagaaccgtgcagagcagacgaacccgtatttccagtatatgtaccggacagtgacatccatgctggcgaagtccggcacgatcaatcacccgtatctcaagaagggtgagagtgacaaaaaagcggttgtggtcattacttccaaccgtggacttgccggaggttacaactccaacattgtaaagctggtgaccggaagcgaggacatcacgacagagaatgcgaaagtctacgccatcggtaataagggaagagaagctctggagcgaaagggctatgagattgcagcagatggatcttcgattatggagtccccgtcctatgaggatgcggcggagctctgtaaacagattttaaaagcctatacggacggagagatcggagagatctatcttgcgtatacgcattttaagaatacggtgagccatgagccgaagctgatcaagcttcttccggtggagttcgacgaggacgagatgcgggaagcggcggatgagaaggtgctcatgaactacgagccgaacgaggaagaagcgctggatatgatcattccgaagtatgtcaccagcctgttttacggggcactggtggaggcggttgcgagtgagaacggagccagaatgcaggcgatggattctgcgaccagcaatgcggaagatatgatcagtgatctgacactcaaattcaatagagcacgtcagggctctattacgcaggaactcacggagattattgcgggagcttctgcgatatcctaggaggcagcagtgcaaaaagttccggcgccggatggcggtggaagcgcgaagctgcatagcaggatttggtgatagaaaataacagacaaggagaaatagcgatggcaaataatagaggcagtcaggattgcccgggtaagattacccagattattggtgccgttctggatatcaagtttccggaaggcgcgctgccggagatcaacgatgcaatccgcgttccgttaaagaacggtggtgagcttgtcgttgaggcttcccagcatctgggtgatgatacggtcagatgtatcgccatgggaccgacggacggacttgtgcgcggtatggaggcaatcgccacgggcggaccgatcagcgtgccggtcggagagaatacgctcggacgcatgttcaacgttctgggtaatccgatcgatgagatcgacgcgccgaaggatgtcgagcactggccgatccacagaccggcaccggcattcgaggatcaggcaacgtcgcaggaaatgcttgagaccggtatcaaggtcgtagatcttctctgcccgtatcagaagggtggtaagatcggacttttcggcggtgcaggagtaggcaagacggtattgatccaggagctgatccacaacatagcgacagagcatggcggatattccgtattcaccggtgtaggtgagcgtacccgtgagggtaacgatctctactacgagatgaaggaatccggcgttatcgataagacgaccatggtgttcggacagatgaacgagccgccgggagcgcgtatgcgggtggcacttacgggacttaccatggcagagtatttccgtgacaaaggtggaaaggatgtcctccttttcatcgacaacattttccgttttacacaggcaggttccgaggtgtccgcactcttaggacgtatgccttctgccgttggttatcagccgacgttacagacggagatgggtgcgctccaggagcgtattacatccacgaagaacggttccatcacatctgtacaggcagtctatgtaccggcggatgatcttacggatccggcaccggcgacgacattcgcacatctggatgcaacgacggttctggatcgttcgatcgtagagcttggtatttaccctgcagtggatccgcttggatctacatcgcgtattctggatccgcgtatcgtgggtcaggagcattttgaggtggcgcgcggtgtgcaggagattttacagaagtacaaggaattgcaggacattatcgcaatcctgggtatggacgagttgtctgaggacgataagcttgtcgtaaaccgtgccagaaagattcagagatttttatcccagccgttctctgttgcaacacagttcaccggtctggaaggaaaatacgttccgatcacggagacggttcgcggattcaaggagattctggaaggaaagcatgatgacattccggagagttacttcttaaatgcaggaaccattgatgaagtgcgcgaaaagtataacaacgcacagtagcggaaatgaggataagctatggcagacgagaacaaagtatttgacgtggagatcattacgccggatcgtgtctttttcacgggaacggcgacgatgatcgaatttaatacggctgccggagagcttggagtgtatgcgcggcatattcctctcacaacggttcttgcaccgggggttgtaacgatccacaagcagggcgaggaggatatcattgctgcggtccattccgggtttgcagagatcctgccggaaaaggtaacacttcttgcagagattgctgagtggccgaacgagattgacaaggcgagagcggaggcggcaaaagcccgcgccgaggagcgtcttgccaatcggacagaggcgattgatgtcaagcgtgccgagtttgcgctgcgcaaggcgttggtgcgtatcgatattgccagataataaaaacggaaagtcagggaaaccggactttccgtttttttctgtgtatttgctcttggaaaagacatcggtcctggtatatacttaggacagaaacagtaaaaacaatgcaggaaccacgaatggagaggcatatgaatttttactttacacgccatggcgagacggaatggaatgtaaaaaagaagatacagggaacgacggacattccgctggatgagaagggaatacagcaggcgaagcggctcgcagagacactcttagagaagcagcgaaacggtgagcttcatctggacagagtctacacgtcgccgcagcttcgggcagcggagaccgcccgtttttccgcggaggcgctgggcatcgagtgtatccggctctgggatctgcgtgagatggatctcggagactgggaaggcaggaactgggatgagataagggaaacggaagcagaacggcatcatatctgggatacccacaggagattctgccatacgccgggcggagagtgctataacgaggtgctgcggcgcacgctggctgcgctggaacagattctggcgcgcgagaaggatgatgtgcttgtcgtgacgcacagtgcggtgctgatggcactgcggtgctatctggcaaaccggccgtttgacgtgatgcgcgagtaccggacacgcaacaccgaacttgtgtgggtgacagaggaggagatccgggaggcgatccgccgctatgagaaggcgatgtgacggaggaagtgctccgggaggcggtctgccgttgcaagagggtgatacgggatatttttttgtgagggaggatgatttcgtgaagaagtcagccttcttttttgtgtgttttatacaaatttcgatgacgatttttgtgaacgattttgacggaaaatgattgactgtgactggaaacggaaatataatgcaactatagagatgaacgattttgaacgaatatgacggaaaacggagaataaattatgctgacagaggaaagatttgcaaagattttgtccatactggaacgtatggggagtgtgacggttcagcagctgatgacggaacttgacgcttctgaatccactgtgcgaagagacctgaatacgctggatgcaaacggccagcttgtcaaggtacacggcggagcgattttaaagaatacggtctacagtaccatcgatgatgaagtggttcaccgcaaggagcagaaccgggaggcaaaggataagatcgcacgctatgcggcgggactgattactgccgaagattttgtttatatcgatgcaggtacgacaacggaacggatgattgattacgttgcaaaccgtcaggcggtgtttgtgacgaacgccatcggccatgcgaaaaagctggcggagcatggatgcaaggtctatatcctgggcggtgagttcaaggcggtgacagaggctatcgtcggtgaggaagccgtttttacactggataaatacaattttacgaaaggcttctggggagccaatggtgtcagccggcagaggggattttccacaccggagttaaaagaggcgatggtaaaacggaaatccatggagaattgcagagactgttacattctggcggatgagagcaagttttcccagatatcgagcgtgacgttcgcgccgtttgagaaggcgaccgtgattacgacagagttaaaacaggaaatatacaaggattgttccaatatcatcaatatcgagtgagaggagatcttaggtgatgatctatacgttaacatttaatccgtctttagattacattgtgactgttccgaagtttacctgcggggtggttaaccgcaccacggaagagattattttccccggtggaaagggaatcaacgtatccatggtgctgaagaaccttggctttgagaatacagcactaggcttttatgcgggatttaccggcatggagctgaagcggctggtggctgataagggaattcatgctgaatttatcccggttgacaagggaatgacgcggatcaatgtcaagctccggtcagagcaggagagcgagattaacggacaggggccggcgatcgctgcttctgatattgataaattatatgaaaagctggatgcactggaggatggcgacatacttgtcatggcgggaagtattccggatgtgatgccgcagacgatgtacatggatatcatgaagcatctgcagggcaggaacttaaaaattgtagtggatgccacgagagatcttctggtaaatgtacttccgttccacccgtttttaattaaaccgaacaatcacgaactgggagagatttttggtgtggagatccgcgggaaagaggatgttgtgacttacgcgaagaaactgcaggagaggggggccagaaacgtgcttatttcgatggcaggagacggagcggtacttgttgccgaggacggctcggtgtatcaggcacaggcaccgaagggaaagctgatcaattccgtcggagccggtgattccatggtggcaggcttccttgcaggatatttggagcatggaacctatgacaaggcatttcagatgggggtatgtacaggaagtgcatcggctttttctgaagagcttgcaacaaaggcagaggtacttgatctgctggagaagaaccaaaacttgttttaattttgcggcaaatgagaattgtaaaatgtgcgcagattaaatagaaaccatttaatattatggaggaaggatcatgagaattagggaattgttagcggtagagagcattgacctgaatgcaaaagctgcaagcaaaaaagaagccctcgatcacgcagtggatctgatggcgagaagtggtaagatcggcgacgtcgagacttatcgaaacggggtatacgcaagagaggaagagggcacaaccggtattggtgagggaattgccattcctcactgcaaatcagatgttgtaaaggcaccgggacttgcggcaatgcgtgttgcaggcggtgtggatttccagtcgctggacggtgagaaggcagacctgatctttttgatcgctgcgccgaacaccaaagacaatgtgcatctggatgtactcagcaaactttctgtactgctgatggatgagaagttcacaaatgatcttcggaatgcaaagagcgtggaagagtttttgcatgtcatcgatgtggctgagagcgcaaaggatgcggaggaatccaaagaggtaccggcaaaggcagagacaaagggcggcaggctgatccttgcagtaacaggatgtccgaccggtatcgcacatacgtatatggcggctgagagccttgagaagaaagcagcagagttgggatgccgcatcaaggttgagaccagaggttccggtggagccaagaatgtgctgaccagagcggagatcgctgaggcggattgcattatcgtggctgcagatacacaggttccgatggagcgttttgacggcaagcctgtcattgagtgtaaggttgcagacggtatcagcaagtctgaggaactgattaagagagcaatcaatggagatgccgctacataccacgcatctaataaagaagcggcaaatagaaacgatgatgagaaggacagcgtcggacatcagatttataagcatctgatgaacggtgtatcccatatgcttccgttcgttgtcggcggcggtatcctgatcgcactggcattcctgatcgatggattttccgtagatctgaattctcttccgatggatcagagaagtaacttcggtacgatcacaccggtagcggcaatgtttaagtcgatcggcggcgcagcattcggattcatgcttccgattcttgccggttttatcgcaatgagtattgcagaccgtcctggtcttgctgttggttttgtcggcggagcgatcgcggcaaatggaacctccggtttcctcggagctctggtagccggtttcctggcaggctatgtagtgcttctgcttaagaagatctgctcaaagatgccggaaagcctggaaggcatgaagccgatgctgatttatccggtgcttggtatttttattaccggtgtgattatgacttacgtggttgagccgccaatcggagcattaaacactctgatcaacaacggactcaacggcttaaacggcgcaagtgcaattctgctgggcgcactgctcggcggtatgatgtctgtggatatgggcggtcctgtgaacaaggctgcttatgtattcggtacagcatccatcgcagccggaaactataacatcatggcagcagttatggtcggaggtatggttccgccaatcgcaatcgctattgcaacattagtattcaagaacaagttcaccgcagaggagagaaaggcaggaccgacaaactttgttatgggactttccttcatcacagagggcgctatcccgtttgcagcttctgacccgttacatgtacttccgtcctgtatcgtaggatcggcagtcgcaggagcactctccatggcatttaactgtactctgatggcaccgcacggcggaatcttcgtattcccgaccgtcggtaatccattcatgtatctggtggcactggcaatcggatctgtggtatctgcggtactgttaggcgttctgaaaaagaacgtggcataaataaagctccttcttatattatttgatgatatacccatatacaaaaaccaccgggcggcatgcgaaagtgtgccgccccggtggtttttgtat

SEQ ID NO: 11608 - DNA, 1599 bp, Unknown
  gut microbiota DNA sequence
agatgtgcttttcttttatgcttacggattctgactgcgatatgaagctgtgtaagcactgtggcagggcatttatcgcaagccgtaagggaaatgagttctgctctccgaaatgcaagaatcagtataatgtctataagacaagggctaagaaaaataaaacagatgaataatgaataaatgacatatctggaggaaatactatggacaatatgattagaattgataaagattatatcgaatggctgaaacatgttaaaaaaagatttaaaaatacacaaataaaagcatctatcaaggttaatgacgagttgcttaggttctactggtcaatcggcaaggatatcgttaacatgcaggctgaaagcaaatggggcggtgctttttttgaaactttaagtgaagatttaaaaaagatgttcccaggtgcaaaaggattttcaaccactaatttgagatacatgaaaagatactacaatttatttggtgaaattctgccccaacttggggcagaattaccggaggctacaaatctgcctcaagttggggcagaaatatatgccattccatggggacatataaaattaattgttgataaatgcaaagatgaacccgaaaaagcaatgttcttcgttgatgaagtaataaagaataactggtcaagagctgttcttctaaacttccttgacactaatctatatgaacgccaaggcaaggcaataagtaattttcaaacaacactaccggcttacaccggtgatttagctcaggaaataacaaaagatccttacaattttgattttattgctttaaatcgtgactataacgaaaaagaattaaaagatgccctgaccgaaaaggttatgaatcttttaattgaaatgggaaaagggttcgcctttgtcggtcgagaataccctttacctatagaaggcacagaggaatatattgatttgttattctaccacctaaacctacattgttatgtcgtagtagaggtcaaaataaaagaattcaaatctcgtgatattggtcagataggtacttatataaacattgttgagagaccgtttcaagttttgtgtaaactacaaaagctgatataagatttgtgaatagttgcaaatgggcagagccgattttccgggttctgcccatatctgcattatacaggagtttttgggcatgtcaataagacctgcctaaaacaagcttgttttacaggtttcgtccagccagacgttcttcaaaatagatctcaagctgggaatggatctgtccccagtcctgccggtgtcctgtccatttcttggtgatatccatagtcgcaagatacagcatttttaaaaggctgtcatccgatggaaaaacggtcttgcttttggttactttccgaagctgacggttgaagccttcaatcgcattggtggtataaatcagccgccttactgcctccggatacttgaaatatgtggataatgtagcccagttatcatgccaggatttatagatcttggggtacttggaatcccatttatctttgaataattccaattcatttaatgccgtttcttccgttggagctgcatatacaagctt

SEQ ID NO: 11609 - DNA, 405 bp, Unknown
  gut microbiota DNA sequence
gtacttgaaatatgtggataatgtagcccagttatcatgccaggatttatagatcttggggtacttgggatcccatttatctttgaataattccaattcatttaatgccgtttcttccgttggagctgcatatacaagcttcagatcagccatcagttttttgatatctttgtaggaaacaaacttcgttgaattacggatctgatgaatgatacactgctggatttctgtttttggataaacagcttcaattgcttgtggaaatccatttagtccatccacacatgcaatcaggatatcctcaactccgcggttctttagtccattcatgatggagagccagaacttggcgctttcgttttctccaacatacataccaagaacgtccttttttccgttcatatc

SEQ ID NO: 11610 - DNA, 9465 bp, Unknown
  gut microbiota DNA sequence
ggaattatgtcatttattctcaatcgaaacttcaaagtttctgttccttacaaacttcgatttgttagactgttttaccataccatatctgactggctattacaataactgcccagcctccgcctaccgtatgccacctgttgtctaacaaaacataaccgcgcgaagccgatgtctgagtcggcatctgccctgttttcaatagcagatgccggcgagttcggttcgcgcggttttatattgtctgtgaaacggagagccatcaggggctctcttcccatagccgcagagacggcgcgctagttctgcttcctcctgcgctccatacgtgtctctgcaacgtaaagtacaagatatgccaccgccgcatacaaaagcgtaagtaccatcacagcaatattcggtccgatggcagctggatctgaaagagaatgaagtaatgccggaaccatgatgaccatagccaccagaccggcgggcagcactgttttccttaagaaatgaaccacctcatattttgtccggcagccactgaaaagcacgcacgccgcacagatacatactataaggatgatggacgggcaatccacataccacccgatcttcgcctgcgacaaaccaaatgtcagaaagactgccactgcgagcaatgcgattcccaccagcccctgccatctgcctgcatttttattattctgattctcctgcattaaatgtttcatattttcttccgcctttccaagatattcttcggaaggaagcttctcacccgacagaagttcgtttacattgatgtccagcacctcacagagcggcgacagatatgctatgtccggcatcccgttcccggtctcccacttggataccgtcttgtcactgatgccaatctgttctgccagttctttctgcgtcagacctttttcctttctcaatactgcgataaatgttccgatcctcgtctgatccatatacttcctccattttccgaacaggtcgctgtccaccgttccgagggacctgtcatgcttttgtaaagctgcagctttatagctacaccttagttcaccgacccgtaaagtgcaatccctttaccgtagaatacgctctataaagcaaagaaagccgcgtagattatctccctgcgcggctttttctcctactccatatattcctgcaccagcgtcttatactgctgcaccttattggcaatcccgccctgattgtagcggtcgacttccgccgtcaccgtaatctgcatcttgcggtcttttccaagcatcttattgccggaaagatcctgtgtgatctccggcataatcagcgtaatctgatattcaatgcttcgcagaatctgattctcatcgatcacataggttgccgtcatatcctcgtaatgcgcctgcttgtgctgctcgacggagagtgccgccgtcttcaccgcattctcgtccgccccgcttttttcataaaaagcataggacttctccacctgtgccacctgattctcccatgcctcctctaaatattcctgcgtaaaagagcaggtaatctccacagccccgtcctctgtgacacgctccaggtcttccacatctgtcccgtcgtaacccagatctgtcaccatttcataatcaggaatgacggtgttctcccgctgctgtggcagtatctgctcccactcaccactccagtcaatgtaatgatacagattcctcccgtcacagaactgctttaaatagagtcttgtcccgtcctcatccgtcgtgtagtgttcgcttatccagtcacctgtcagcatatccgcccaggcatgcatcgtctctcctccggcgcttccgttctgcttccagcgatattcataggaaagctgcagattgtccacttttcccaaattccacatggcaacctgaatctctccgagttctcctcttcccgtactgttctgacgcagtgcgccaaatatcagcacaccggcaaatacaacgactgtcagtatccgcagctttcttttttccatagcactatcctctatgccagcaatcccaatgtttcaaatgcccgataaattccatcgtcgtcgatggacgatgtaaccatgtccgcccgttccttgacttcttctcgcgcgttgcccatcgcaataccgattcctgcgtattccatcatctgaagatcattcggaccgtctcccacggcaatggaatcctctctcgcaatgccggccgccttcagatatcgctccatgccggttgccttattgattccgttgatgccgatctcgcccgcatattctcccataccttccaggctgatcgccaccgtgtcaaagtaaggctccagatctgcatgtaccttcgccaccggaaacggcgcattataatatagaagcttttcatttctcggattcttccaaggctcttctgtcagatgcatatttccggtcagacgcacaaggcgctcctcgctcatccccatctttcggtagatctctaagattccttcactgctgcggcggttcaacaccacaccgtcgtccgcctgatagcaaaacaggaatccgttgccctccagataatcgtaaacgctcttcctgtgctcttcatcaatatatgcgtgataaatttccttcccatcggcgatcacaaacacgcctgccgcgccgacaatcccggaaaacccaagttccagcagctcatcataaatctggaaacggcttcttcccgtacagacgaccatcttgtgaccgttcgccttcgccctgcggaccgcctctttggtagattccggtatctctccccggtcattgaccatcgtgccgtccacatccagaaacaccacttttttatggttatttatcatttctgcgctcatattttcctgtcctcttcacgattgcttttatgtacatgatatgttgttttggggatggaatcaagctattttaaacgttatatggaaaaaaagtatctttattttttcgactcccaccttacctgtccttcatatagccgccggatcggctgctgttcttgcacccgatcgtatatttatcaatgatcgtggcatcatagaaactctgctgtgcttcctgtatcaatttatctgctataattattttttctatatttcagcggtgataccgcatatgccttctggaaacttctgataaaatagcttacattctgatacccgctctgcatggctacatccgtaaccgggatatcggtgtcctgtaacagctgctttgcatgctccaaccgcaggtatgttacatattgtgacagtgtaatatgaaaatgttccttaaaatacctcgatatatatttttccgagagatgaaactgttccccaaattccctcagcgatatctttcctgtaaaattctgctgtatataggaaaccatctctttttctactgtatttctgccacttgtatcattttctattacaaatcctttcttccacatttcaagaataaattgtaaaagaattatttttgtcctgacctgtgtcgttattttcgattcactttcatccttttttgcctcatatatctcaatcagctgttcacacagttcttttgctgtatcctttactcttggacatatcatcaagtgaccgctatttaatggttcaagcaatttttcatctaacatgtcatctgtacgaaaagatatatactttaacggaaataggaaggtataataatccacagtaccggtctgtgatcccataagatgcagattgcccggcgacaccacaaacgcatctcctgtttttccaatatagctctctccggatatacttaccgccagaaaaccgcttcttacatatataatttcaaattcatcatgccaatgtaccggtatctgaaatgagcgccccgcattctctatatgatatgtgctaaatggatcgtcctttgtgccatgtggtttgttttccttcaattcaaagtacatattctctcctacagttctacaagactcttacttttccattttccgcttttccatctaaacaccattccaacagctctcgcacactcatccgctgccatggcaatatatgctcctacagcctgaagtcccatatgtattccaagaaaatacgttccgccaactgcaaacaggtacataaatatcgcacccataataaccgggaaaattgcatctccactggtttttaacgcctgtccatatacaagatttgtcacccttccaaactcaagaaatatatctactatcaacagctttaccacaagatttatcatttgtgtgtcatccgtaaatatatgaatgataaaatgtccggacattgcaaatgccgcagagaagcacgttgctgttataagaccatatatcacagcttttcgtgtccccctgtcacattcttcaaactcctttgccccaattctccagccagtcataatagcattggcctgtgcaagtgcagctcctatacagtacgagaaatttgctatctgcatagtatacgaacgtgctgtaacattcattccgtccgcatccatctgattcataaatcgtactatcagtgtcattgccacattataaagcgctgtttctaatgcagaaggaaaacctatcttaacgatctgcgcaagtatcttccgggacggaattcgctccgggctctgctttgcttttataagtaccgcgcccatgcctgctacaatcagtagatttacaacccttgaaataactgtggcagcggcaactcccattactccccagttaaacacaaacaaaaataccgaattaagtattatattaatgagatttccaacaaccgttcctatcagtgagtgctttgtatatccaaacactctcagataactggaataaataggaatcagtgcatttaaaaaacatgcgcctccaacaattttaagatatgtttccgccggttcaaacaaagccggggcaatacttactattctaagtattccaccagaaaaaacagcaagaataacagacatcaggatgcccatcactgcattaaacatcagtccaagctgtctggcctgatatgcaactccaggtcttcccgctccgatattttgtgacataaccgctaccatacctgatgatattacgccgaacatgatgataaaaacgcctatatatgtatttgctgttccaacagctcccacagcctggtcacttacagatgataacataagtgtatcaaccatgcctgaaagcatataaaataaagtctctacacatattggcacaaatagctgtgtcaatgtttttctttcagctgccatattttctcctcagatgctccttatacgctaacgtaatctatattatcaataatacgatatatttgcatatatttcttgtataatatcatacaaaaattgcactatttctactatacagtctgtgagaaatctacggaccgtctgacaccgccctcaaacctgctgctttaacctcttcatcacagttttttcgtcaccaaatgtaatctgcaataattttcatcttcaaaaatgacaccttcatcctgaaatccattgctgataaaaaagtccaaatccccatttggaaagacgcctttttcatcggatattgcaaggattcttttatattcgcccgctaaatatttttccagttccataaggggagcacttttataatcataggctgcatccgtcatgtatacacaagtcagaaacgctatatcatcatcgtgtggaatgtcgtatggaatgaccttcgcaggcaggtattccacaccgccaacgagctctcccttcccgtttttatgaataaaaccatagttatccagctcgtactgtttcagaaattctattttctttttatagttttcagacgttttgtccccacagcactcacaggcgatgtcgaacttgtctaaggagagcggctctatgatccctttggtaaaatttctggatattgttggtaaaaaaggtttctcctccggatatattccgtttgctgcctgctccagaaaagacttcctgagcggactatagtacctttttttcttatccagaacaatcagtgtgggaaaaaacatcttcatttcccccgccaataaatgattgttggaaatgtcatatagattgatatctattttatcccgatattcatttaacagccggatcatgttgtcattcaacggacattgatatgaaaaatagtaaaaatcaagtaccatacacccttccatcatctctggttatagaaattttcccacgtcatcacatactccttttcaccggtagcttcatccaacccttcacaccggatcgcaaagccttcccgctgataaaaatggatcgcccgtatgttcttttgatacacatttaagcttagctttgcttttctgtttttcacaaaatccagtaaaagttttccgattccctgcgaccgcatctcatcagaaacgaaaataccctcaatatattcatcatttaatccgatgaatccctgtatcttccgggcatcctcatatacgtaaacctctgcctgtcccaacagttcctttaccagttcaaagttatccctccagtattgagccggaataaaacaatgggcgtttaaattaccttctaaccatatctgggcaaccctgcctgtgtattcactctgtaatctgctgatcataataaatcccctaaataaacggtctactttttcttatagccgcagtcacaataaggcccgccggaggcaagcgtgtattccctgacaaaatccgtcacaccgcctgcttcgctcattgtataatccagacggcacatcgcaggtatcagactggtaagccccaactctcccataagtctgcagattccgcagcttgtaaatcttgcctcgtatccgcttccgtcttcatactcataaaagtccatattccacgaatacggatttctgtcgcccgctttgagttttgccgtatccttcattgccttgatatccgactccgaatattttttcttcccgctcatcctgcaaaaccgctgcatcatccccgtcatcatggactttttataatactccgtcgcgtccgaaagctccggctgtgttggcatattcaggaaaaatgcagacagcatggcacaattcacgatattcatcttgaatctgtccgccttctcaaattccggaagtctctctatgagctctctgtactttttctttgctaaagcagtaattttcctgctttcctcttcatcatacttcaaaacctctgtgagatttctttgaaaagatttgtgaaaaatcatccacatgcccatcggcatacctgcatatttcatataaactcaacctcctgttaaaatttccgctttccacactattcccctaaaagccctgcccgctccagataccacgcccgaaatccgtcgaacgtcaatcggttgtccagattttcaatcggtctggaagcggattcgatgatctcccggcagctcttcgttctgcgcagcatatcaaacgttggacccagcggatctccgtatttcgccgctgttgcggcataaatataatcagctgacactctttttcaaattcatccatcttctgctatccttccgctgccgtatgtgcctgtttttccatacactgctgctctcccctttatcttagcataaaacaagcggtaacacacgaatctttcatcccgtgataccgcctattgtttctacattgacttcatgctgccgatcatctgtcagatcttgcaaccgaacaaatccattcctttacaccatctgcaccagccatacattgctccgcaccatgcggtatccgatcaccaccttaatcagctcggtcgcctgcaccagaaagtacacgctcacaatgccaagtcctgtaaaacgtgccagtacaaacgcggccggcacgacaacgatccacgtgaaaacagagtcaaacaggaacgtaaccatcgtttttccgcccgatcgcagcgtaaagtacgacgcatggctgaatgaacagaacggcatgatcatcgccgatacggcgatgaagcttgtcgcaagcgccttgatctcctccgttgtattgtagatctgtgggaaaaatcctccgaccaccagcataagacctgccacgatcacgcagcagaacacactgaacacgatcatcttgttgtctgcgtcctttgcttcttccagctcgccggcgcccagatactgtccgaccacgatactgatgcaggaaccaagctgcagatagatgatgttgaacaggtttgtgattgtcgtcgcgatattcagtcctgccacaacctccagtccgcggacggaatagcactgtgtgaccgctgtcatacccgccgcccacagaacctcgttgagcatcagcggaaatcccttcacgataatcgccttcaattcctctcccggaatgccaaatccggtataggcgccctttaaatacaggttctgtccggtatggctgtgcgcccagacaataatgatgaacgcctcaatgtagcgtgcaatcaccgtcgcaagcgcggcgccggcaacaccaagctccgggaacggtccgattccgaagatcagaagataatctaacagcgcattgcttcccacagcgacaaagctcgcaaccatcggcaccatcgtctgtcccgtctccttgatattcgtcgcatacgcctggttgaccgcaaacggaaccagtcccactaccatgatcccaagatactgcagtccatacccaagcgccacatccgtcgccccgtctccggcggtatccgtcagataaagcgagatcagattgtccccgcatgttagaaacagcagaatggtaagccccgtcacaagcaacgccgcatatagcttaaagcggaaggaatacatatgtcccttgtgattcctcttgccgtaatactgcgccccgaaaatactggctgccgaaaccgcgccgaaaatcgccagattgtatacaaaaatgagctggttcacgatggcaaccccggacatctgctccgtgccgagctgtcccaccatgatgttatccagaaagctgacaagattcgtgatcgcattctgtacaatcatgggcagcgccagatataaatatcttttataaaatgcccggtctccgatatatttttccttaaattctgctaacttcataagttcttttccttctataagatctcttgtgtgtttatctgatcatcttaacatcttcccgcaaaaaaagcactgtttttttgaaaaacagtgccatttcccgcctgccgcccattgctgccgctcagaacagatccagcatattgtccagatagattttttccctgacgtgcagctgatacccgggtttcgtcatatagtagagcaggaactccagaatcagcgcactgccaagtccccgcccctcgatcttgaactgggaaaatcccatgggcaggtagatattttttatggcgtccgtaccg

SEQ ID NO: 11611 - DNA, 1566 bp, Unknown
  gut microbiota DNA sequence
ccgcgccgctttctccgagatttttgcggctgacggcttcgtaacagcgcttcctgtccccgcagccaaaccagcagcattcattgcacagaaattccactttgtccctcttccatccggtcagcgtatcccactgcgcgaacgccttattcagccggaaatccggcacgacatagcggaaatcctcccggttgatctccccccgaagatcctcaaaatccgtcagaaccttggtggtcgaggagacaaagtagaaccccggatactgctgctttaaatacgccagcaacagatccgagtgaacgatcactccatttccttgatccccgccttcctcaaacaggacgcacagagcattacatttccggtccgaaagatgctcctcccgaagcagagagttgctgaaggtgagccgggcagagattccgtactcccgcagcaacgccagaacctccgcggagtcgtgatctccgaacccgacgcggcctccgccccagagacagtccgccggtgcaccatagatcgatccgatgtcgcaccagtcgtaaaaatattccctgtgctcatagaacagcggcagaaacacgcgatacaattcataaaattcaaacagccccggaaggtgatagtatgcggtatctttttttaatgaagccatatctgcctcgtcacctcgctgattcccgttctaggcaaccgtgatcagttcgtactcgcgggttccgaaacctaaggctgcggccgcctcgatggtgtgtacgccatgtctggattcgattcgctcgagcagatgatctctgcccggatcgtcactcgcatagaccagatcaaggcatgcctgatcaattgcaatcggatctgtcgaaatcaggatacccatatcctccatgcacggatcctccgccactgcacagcagtcacagtcaaccgacatatttttcatgacattgatgtaaactgcattccccttaaagtaatcgacaacggaagatgccgcatccgccatagactccaggaaagagtcgtggtctgccgtccagatatcttccggctttcctgcaccatgaatatatgccttgccggcggaagatgcaatgccgatcgaaagctgtttgagcgctccgccgtatcctcccatcggatgtcccttgaaatgggagagaaccagaagcgaatcataatccgcaaggtcttttcctacaaagttcttctgaatgactttgccgtccgggatcgcaagctccagatccggtccctccgcatccagaagatcgactttaaagtaccggctccatccatgtgcctccagcgtctttttgtgcttggcagttgtattacgctcgccttcgtatgcggtgttgcattccacaacggtaccaccaacgtaatcaatgaccggcttccagaattccggttttaaaaaattctggttccccgcctcaccggagtgaagcttgatcgccactttgccgtccagcttcttcccgagaagctgatacatctctaataccttctccggactgatttcttttgaaaagtatactttttccatccgttacttctatt

SEQ ID NO: 11612 - DNA, 2033 bp, Unknown
  gut microbiota DNA sequence
cccaaaagcgccggcaccgatgaacttcacccatcggtgccggcgctttttctattctacactctttaaagcttccaccggatcaatttcatccagggagcggttcgtcagcagatccaccaggatcgcaaacaaaaatgagaggccagccgccatggcatagcttttcccgtgaagggacaccgccagataaatcgacggcatgttcaaaacatacgttaaggtctgcgcaaacgcatatcccagcggggttccgcagacaatgccgatcgccgtgagtatcatggtttctttgttgacatacagatgcacctcacggtcaaaaaaacccagcaccttaatcgtcgccagttctctgctccgctcggaaatattcgttgtagacagcgtaaataaaaccacgaacgcgagtgccgccgccatgataatcacaatgtaaaccaccatattgatcagggtgaacgcatccgagaactcatccgaaagctcctgcttgctgctgtaggacacgaccccctcttttccgccaaggtcatctgcataggtaatttcatctgaacatgtttcagacagctttaaaaataccccgttcggttcataatcgccaaacagcgattcataggttttctctgtcatatagacattattgccgaggtaattgcggacgagaccgcttaccgtcacttcctgctgattcagatccagatcctgaatctccacctgatccccggccgcaaatccaagcacatttgctgcattctgcgtcaccagaatctcaccgtccagaagaccgatctcctcatccgtaagattgtacagaccaatgtactctgcaagaggctcatcccccggcacgacaatcatctgtgccttttcttcctttccggcagcattcttcagctttaccgtggaaatctgcacattcagcgcactttgcacattcggatccccatttacataggaaagaatcttgtcattatcggatgctgcccccgctgccatgacatcataccggtacacgttctcatactggcgcggcagcaggtctgttaccgaatccctcaccgcaaatccaaatagtaagagcgccatgcatcccataattcccgctacggtcatgaaaagacgctttttatagcggaacaggttgcgggcggtcactttattgagaaatgacaggcgcttccataccggtgtgatgcactcgagcagtacgcgggagcctgcgcgcggcgctttcggccgcatcagaactgccggcatatgtacaagttccgctttacatgcacaggcggtagcgatgacaattccagccacaaaaagcgcagctccgccacatccgagcagcggcgcaaagcgcagcaaataatccgggaacagatacatcgtgtcaaaaatccggaaaataatctccggcagcagaacaaatccgcacatatttcccagaattccgccggatacactcgccgcacatgcatacaccagatactttctgcgaatctcacgatccgtaaagccgagtgccttgtaggttccaatcagaccgcggtcttcctccaccatacgggttatcgtcgtcaggctgatcagaatagcaacaacgaaaaatacgatcgggaagaccgtaccgatcgcctcaatcgacgccgcatcgctcttcacgttggcatagccgctcagagacgtgcgatcctgtacataccactgtgtcatatcaatgtccgctatcttttgctcttcctccgcaatcgtctcattgaagtccgcaagatttttttcatattctgccttgccgtccgcgtattccgtttcgcctttgagcagtttttcccgtccttcggcgagatttgcctcaccgtcctttatctgcgccgcagtcttctgttcctttttcacaagctgcgcctcactttcggaaagcgcctctcttccgttctccagctctgctctcttatcggcaatctgcgattttccgaagatgacctgtgcttccccttcgttcagttcgttccatgccgcatcaaactgctgcc

SEQ ID NO: 11613 - DNA, 880 bp, Unknown
  gut microbiota DNA sequence
accgactgaatctgcggatttaacgccagcgtctgtgtcacactctcgtatttttcaaaaaatcccgccagactgttggacgctgattccgactccagggtgagctgcgcttgtttattgtaataaaccgtctgtcccatgataatcacaatgataacttccacgacaatatacgcgatcaacacgcttctgccgattcttttgcggatctcctccgcaatttttccctttttcctgttaccttccgctgcgttttttcccataaccattctccttctctggtgcccgtcaatacttccattatagtactatcctcccatgtgcgcaacgaaatttttcgtaatttccgcaatttacgaaaaagttttctgtcactttttattttctccatttaaaatccagtctttcagcgctttgaattcaaaaaataagacggaaaccatcgctgcgtttccatcttatcctttcttccgggcttctctggctttctgctcacgcccagccattgtctgcactctgatattttcccgctccagctctgctattgccgcaatgatagatataagcagtttaccggcttcttttgagctgtcaattccctcttccacgcagattaggttcacaccataatcctgcataagctgtaaagagctaagtacatccgccgcatttctgccaaatcgggataatttaaatacaaggacgaaatcaactccgtccttgccatcttcaatagcattcaacatccgcataaattcctgacgaccttttatattcttaccggaatgcccttcatcggaatattctcctacaatctccatctcctgaaattctgcatatttcctaagcttgtccttctgtgcatcaaggctatgcttaa

SEQ ID NO: 11614 - DNA, 55173 bp, Unknown
  gut microbiota DNA sequence
ctctttgcgggacttcgccttagtttataatatagtacattaacgtgctgatgacaagagagcccttgcaagttattagacgaaaatgttataatttctatgattatattttatcggcatttcagacgaaagaaggaatcattccatgaaaaaaaagatttccattatcattgctgtcatcgtcgttatcgcacttatcgcagcggctgtcattttccactatctctccaaccggactcattttaatgagggttacgtgaatggcaacaccgctggcaacctctacaacggcggtctcttctgcgaatacgacggcacggtatatttttccaacccgtccgacggcgggaagctgtattcgatgtctccggacggaagcaatctggcaaagctctgtgatgacacggtatcctacatcaatgcggacgaacattatctctactatgtgcgcaacaatccgggagcaacgggcgccgctctctcctttctctcggtcaacaccgacagtctctgccgcattgacagggaaggcggcgatgactccgttctgattctggattcggcgccgtgcctttacgcttccctctacgggaattatatttactatatccgctacgatgaatccgagggttccacgctttataaggtaaaaatcgacggttccgactgcaagcaggtcgacaccgctcccgactttacctgctcggccaacggcgaatatatgtattacaacggaaccgacagcgatcactatatctggcggctcaataccacggacgactcaaagggcatgctctacggcgggaactgctatatgccgactgtcatagacgataccaccgcctatttcatggactgcgacaacaactacgcgatcgcccgcacagatcttagcaccggcgagaagacgcttctgtccgaggaccgcgtggactggtacaacctctacggagattacatctacttccagaaaaatgattccgagcatccgtgtctcggattcatgcgcacggacggaagcggctacaccacactgtttgagggaaacttcaaggatattacaatcacttccgaatatgtatacttccgtgatttttccacagatcagagctactgcgttccgctcggctcctccgccgccccggtcgcctttgagccgggcatcgtcgaagactgatgcagcatagaattgccgcaataagcatagaccgcttttgaatgataagtaatattataggaaatagatacttaaaagttccagataaacatacggcgacaaattctgaccgcaaaatccggtatttctaaccatgccgcagctggcatccgtgatgatccgtgtctttccaagtttggagcactccacggactgtgtccgcaaaccggcagacaattttaggacttttgtgtgtgtcccttatggacacctctgaacaaaacataaccgcgcgaagccgatgtctgagtcggcatctgccttattttcaatagcagatgccggcgagtttcggttcgcgcggttttatattgtctgtgaagaggtgccattagggacaccagaaagtccgcccattgtctgcggcttgtcggacacactccgtgagtgtccaaacgtggcaaagacacggaatgggatgccagccgcggcatggaagaaatactcgaattttgcgtcaaagaatttgccgccgtctgtttattctggaacttttttgttctctggtattcctgtaatattacttatcaaaacaaagcacaatatacttattgcgacaattccttctcattatgcttgttttcgtcggaacagattcgtgtccgtccgctaacgctcctgctcttcgtctgcggagtcttcctccgccgcctcgatatatttggcaaacgtatgcttatagtacattccaaagaaatatcccatcagaccgattccatagatcagcgtcaggaaattggcaagcagcgtggttgtgttcacccagacaaacagaatcatcaagattgcaagctggatcgtcgtcttcatgttgcgcattgcgacaaaaaaggaataccggatcgtcgccttgaccggattcacaaactttgcctgcacgccgaacacatagaggagcgacagaaaatacggtacaaacagaattgccgccactccctgcatcagctgcccgaaggaattgccggcacggccgcccaaaaggaagtcgcccgccaggaatgcacccgctgccagataaataaaaaacagcgccgtcgcctgtttaaagttctccttaaacgacgagaaaaaattctgatgccagtacccttcattgtccgaaagcttcatgctggtgtaaatcagggcggtcgtcgatgccccgatcgtaaacaccggcagggaacagatcagccagagcagattcaataaaaatatctttccgattttatcaatggtacgccaaaccacgttgtcgagatcaaaaaatctatcccacatggcactcctcccacaatctctgaatgtattcgcgcgatgccacggcattttccggcacggtgttctctaaggttgcatggatatacggcttgcgctctttcataaaacggatgatcctgtcgtagttcatctctccggttccggctgccaccgataccaggctgttattctccaccttaaaatccttgatatgtaccatcgcaatatcctcgccaagcacatcgatcgcttctgctattatagcatccctgtccttgtaattgcaaacatcaagcagattgaccggatcgaaaatgatctgaaggtttggtgaaccgatcgcgtcaagcacctttctcgcccgcttcggattgcagacaatatgcttgtacaccggctcgatcgcaacgatcacgcccattttttccgcataggaaaccaccgggcgcaggttgttgataaagatttttagcgcttcctcggaatgattgcgctcctcaaaacggtattcctcattcaccgctccggtttccgtgccgaccacacccgcgccgagcagcgatgcgaaccggatatgtgccagatagcggtgcgtattctttgcaaggcttgccggattcggattggcgagattcaagtagcatccaagcactgccacatccagctgatttgccgcaaagatcttctttaaatacatggcgtatcccggcgtcagggcaccgtcatccaccggatactccgaaatcacctttgccagcgccagatgtccgcaggcaaatccctgctcatgtgcaatggcaagccgctcctcaagcggcgcctttttgatatcatgtaaacgtattccaagctgcatttttctatcctttccgggctcttcctcctgcccgcccaatgttccggccgtcttctaccgctcaacctcatccacgttgtgaagttcgatctcctctccctcgcatccctcaatggagacgttgtccagcacaagcttcttcacgttccgcgcatacaatccctttttgcagcatgcttccacaccgtttgacatgatcggcacgtcgcattttgcctgcccggcgaaagaaacggatacgttgcgcatggtaatctgttcgatcttctgctccggcagaccgtcaaagtaggatgctgccacatggcagtctttcgccgtgatattttcaaagcagaagcgcttcatggacggtgtgccgtcatccaccggatacggttctctcgactgcacaaactcggttcttccgtccgggtcgcagaaatagaaggcattcgcagtaaacggcgtcatgacctgctccatcataagatcccggaagataatattgtccagaatcgcatccttgccgcgtcccctgcgcgtcttgatacgcagaccgcggtcggtatgataaaaccggcatttctccacgatcaggttattgacgccgcccgccatctcactgccgacggtgaccgcgccgtgtccatgctccattaggcactgatagacgtgaatattggaggatggcgtcttgtatcttcttcccatgtagatctttccggatttcactgcgatacagtcatccccgagggagaagcgcacaccgcagatcgtcacatcgcggcaggattccggatcaagaccgtccgtattcggtgactttgccggattctccacgatcaggttgcagaacagcagctcgtcgctgaagtacggatgaatgacccatgccgggctgtcatggaagtaaagtccctgcacacggatgttccggcagcggtttaaggaaagcattctcgggcggaacgcccccaccatcaccttctcattcttccaccagttttcgtggttggcagctccgttgatgctgccctccccgtaaaggttcacatccgagacgtcgattccggagataattcccgcaaacatcggcagcggattcccctcccaggttccgagattatagtctcccgtctcatcatagctctcgatgagtcccggcaggatcgcatagtgcgaccggtcagtgtccgctaaaagttctgcccccttcgccagttcgacattgatcccgctctttaagaacaggctggtgatcttataggttcctgccgggatcagcacgcggctctccggcggacacaccatgatcgctgcctggataaacgtggtgtcatccgacacaccgtctccctttgcaccgaacttgcgcacattgagtgtgacgaactcgtaatccgtgcggaatgcaatctctccctgtctggttccatgggcatcctccacgccaatctcatagtcggtatccggcttcaagccatacagcgacgtgattacggtatcggttgtctttacctcatctccgtttacaagaatccggtacacttcttttgtcttatagatgccgccgtcatccagttccagcgagacgcttctcgccgttttcatcacaagacgaatttccattgtctcatcctccatttataccttacggtcattcgttacttcttacagtgcaacaaaagggtgacaagcctgccaccctttttctaagctttgtttttgattttagccttttacaccaccggctgaaataccatctacgaacttatcctgtgccataaagaataccacaagagaaggaatgatggagatcagggacagtgccagaattctgttccactggaatccggaatctgcatccatggacatttttacgaaaatagccagcggatattttgccggagtattcacgtaaagcaacggtcccataaagtcattagatgaccacatgaactggaacagtgcgatggatgtgatcgccggggaaagcatcggaacgataaccttcaccagagtctgtactgcgttacatccgtcaatcttagccgcctcatccaattccttcggcacgttgcgcaggaactgaatcagctggaatacgaacagcgtatccgtcgcgaacagggtcggcacaatgatcgggagatataacttggaatctacccagcccatcttggaaaacatgatgaactgcggtacgttcaatactacctgcggcaggaataatgtcgccatcaatacagagaagagaattcctctgcccttgaactcaaaacggccgaatccataagcggtaaccgtcgcagagatcatcgtaaatactaccttcggaattacgtaggagaaggtgtttaacattgccttccatacgttgattgctccgccgtagctctccattgcctttttgtaaccctcaagtgtcgggttcttcgggatgaaaccgatgctggagaaaatctccgcattggatttaaaagttgcaccaaccatccagaccagcggatagatcataatcaatccgacaaggatcaggacaaaatatcttaagaatacattgacataatgttttgttttactttctgctgccattcttcttagccctcctcatcagaatagaatacccagtatttctggctcaggaatgcaatcgtggtaaagatcatcaggatgacgaacattacccatgccatcgcacttgccatacccatgtcatactgtttgaacgcactgttgtaaatcaaaagtgaaatcagtgttgtagagtttctcggtccgccctgtgtgatgatgtacggtccgttgaactcctggaatgcctgacagagctgtgttactaggttgtagaaaataaccggtgtaatgatcggcactgtcacagagaagaactgacgccacttgcctgctccgtcgatcgaagctgcctcgtagagatcctgtggaacaccctttaacgctgcaaggaaaataatcattgcagaaccgaactgccatacacgaagcagacagattacgaacagggaatactttgtatcggacagccagctcgggcctgtaatacccaaaagaccgaggaatccgtttaaaagtccgtcatcgcggaatactgctttccagagtaccgcaatggcaaccgatccccctaagatagaaggtacatagtaagcggtacggaagaaattcacgcccttgatcttgaagttcagtatgtaagcgataaacaatgcaaatatcagttttaacggaactgtgataaatgcatacttgaatgtaaccgtcaacgctgtcgtaatcttcttggttgtgaagacattcacatagttctgaagtgttccgatcacattcatgcccttaaacagattgtagtctgtaaagctgtagaataatgaggaacccatcggccacagtttgaatacaaggaaaccaaacaaccatggcaaaataaagaagaagccgatattttctttgcaaatgtcaacaaacgtttttttcttctttggcactgcaacatttgcggtattacttttcttagccaaccttttgtacctcctacttatcttaaaatttcattcactcacgacttaaaatcagtctctgcgcataagccatcatggctatgcccatccgttcggaatcttttgaatcaaacggttcttttatcagaccatcgatcatggaaagtccaatttctgcatatttttcactatttaaaacgcccagattgcaagcctttataatagaatatcccatcattgcactttcttttttactgaaatcattattccagccggcggcaagaatatttctgatggtcttcttaaaaatctcttcgagagatttgtaatgttcgaaaatctcacgactcatgctatctatcacgtcgatcaccgtcataagataccaccccgtctgctccatatccgtctgttccgacggtgccagtgtcagaagctgtctgacgatctgtgcgtactccgccttgttgtgatatctggtctcatactccatatagaatggatacaccgcaaacatcacactgccggatatgttccgggaagaatcctccacgcatccgaatacgccgttttcggactgcgggctgttcttaagccactctgcatttctttctatccaggtgcgatactgttcttctcccgtctgatcatacagaaaaaatacgtacctgccaaaccggtgggcacctaccgccgcacgggcagctttctccatcacctcttgcagcttttgcttttccgcttccgcggccaggggataccatgctctgcatccctccaaaaccatgaccgaaagctgctcaaaatcatgatcctctgctatatattctgatacaaactgatcaaaatccatcatacaccttttttaaaaatggagctgctgtcgtaagaacagcagctccgaattcatgcagtcagattactgggaaataacggctgttacaccatcatataatgtctgtgctgcttcctctactgtgtaatcgccatagcttaaacctgccattacatcatagtatacaccatcgctgctctttaactgagaatcctcgaacttcggatcaaggctgttggatacccatgcaagaaccttaccgttagcctctactacctggccatttaataagcctgcatcgttagctgtctttaatgcgatctgagataccggaacacctctctcagagccaaggatctgtgctgcttcttcgttgttcattaagaagttaacaagtaatgcagcctccttcggatgctcgcatgttgcgctgattgcccagcacatggaaacctttgcgtatccgccctgatactcgccaagatctgttaagtagtcaccaacaacgatctcacgtccctcagctgcgcttgcgaatttgcttgcagaagaatcccactcgaagatacctgcatagtgtccgtcgatccagttctggttctgatccagagatgcagcaccgtcaccagcgattgttgctacagaaggaatcacatgagcatcctcaagatcctggatgaactgaagtccctctgcgatctggtctgttgtgtagttgatctgtccgtctgttacccagtcggttccgtatacagactcaaggtagtataccatgaggatcattctgtcgtactcacctaaagctaacggatagtaatcatctccgtatgctgcgaacttctcaccgcaagcctttaactcctctaatgtggtcgggatctcgcatccgatctcatcaaatgttgtcttgtcccagtagaaaattctacctgtcatggaaatcgggatacctgcctgggatccgtcagatgctgtacacatatcaagatatgtggaatcgatctggctgaaatcaattacgttagagtaatcattcaggttaaggaaagcggttccatcgttgtcatactgtgtaatccagttccagttgatctggtttacatcctgtgcggttcctgctgcgaatgcggtagccatcttagcttcccatccatcccatgcagcgtatgtaggttctacggtaattcccgggtaagctgcctcaaatgcctcgattgcctttaatgttgcctcgtgtctggtgtcaccaccccaccatgacattgttaatgtacaattctcataagaaccatcatcggtagctgctgcctctgtagctgccgctgcttctgttgccggagtctccggtgttgtggctgctgcgtctgtgtttgtctcctcagatgtggaacttccacaggctgcggtagaaagtgccatggctgctactaaaccggtagccattgtgcgtttcaggaaatcctttttcatagttttcttctcctttttctttattacttggcaatgtgccctttcatcgttttgcactctgaaaggttttagtcacattgcaataatgtaagtgcttacatgttgtattatagcacagtcctcataaaaatgcactactttttttcatattttagcttttttttgttagaaatgttttcatgggcaaatatgtgcggaatgtagtctattgtggctgttttccaatgtatgccagaataccgccgtctacatatacaacgtgtccgttgacaaagttggatgcatcggaagccaggaaaacagcggttccctgcagatcctcagctgtgccccatcttgctgcaggagtctttgcaatgatgaactggtcaaacggatgtctggagccgtccggctggatctcacggagcggagcggtctgcggtgttgcaatataacccggtccgataccgttgcactgaatgttgtgctcgccgtactcagacgcgatatttcttgtaagcattttcaatccgccctttgcagctgcgtatgcagatacggtctcacggccgagctcactcatcatagagcagatgttgatgatctttccgtgacccttcttaatcattcctggaatgactgccttggatacaataaacggcgcgttcaggtcaacatcgatgacctgtctgaactcagaagccttcatctcaagcatcgggatacgtttgatgattcctgcattgttgacaagaatgtcgatcgttccgacttccttctcgatctgtgccaccatggcttccacctgctcctcgtttgtcacgtcgcagacataaccgtgtgccttgatgcccttctcttcataggaagcaagtcccttgtccacaagttcctgcctgatgtcgttgaatacgattgttgcgcctgcctctgcgaatgcagttgcgattgcaaaaccgattccgtaagatgcacctgtaacaagtgcaactttaccctcgagtgaaaaattgtctaaaattcccatttttatgttctccttttctattattcatgtggcatcagccgcagtggccgaaagccgcatcgattgcttaactactgcttttcagctacagtgtcacgccctgtttgaagattgccatatcgtggaagcccgcttcctcgctgcagacttttctgccggacgccacgtcgatcacatagtcgaacagctgctgtcccactgtgtctaactccgcgtcttccaccagcacgcccgcattgaagtcgatccagtttttcttctttccggccagcgtactgttgctggaaatcttcacggtcggaaccggggacgcaaacggtgttccgcgccctgtcgtaaacagtacgatatgtgcgccgctcgccgcaagtgccgtcgccgccaccagatcattgcccggtgcagacaggaggtttaatcctgaggtttttacacactctccataggaaagcacgccgcacaccggtgcgcttccggacttctgtgtacagcccagtgatttatcttccagtgtcgagataccacccttcttatttccgggagacggattctcataaatcgtctgatgattgtccttgaaatactgcttgaagtcgttgatcagtgagactgtctcatcgaacagttccctgttggcgcagcggttcatcagaagcgtctccgcgccaaacatttccggcacttcggtaaggatcgtggtgccgccctttccgatcagaagatctgagaatctgcccaccagcggattggccgtaattccggagaatccatcgctgccgccgcacttcattccgacaatcagctttgaggcactgatcggctcgcgctcaaacgcggacgcataatcgatgagttcattcaggagtttttctccctcctccatctcgtcctcacattcctgacaaaccaggaattttacgcgattctcatcgtaatcgccgatgtattttttcaattcgccgatattgctgttctcacatcccagtccgagcacgagaacgccgcccgcattcggatgatttaccagatccgccagaatcgttctggtgtgctcctggtcgtctcccatctgggaacatccatacgggtgtgggaatgcgatgactttctcaacgcttcccttcactctggcgttggccgccttcgccattgcggttgcaatattgttgacacagccgacggtcgggatgatccagacttcgttgcggacgccaacttttccgttggcgcgggcgaagcccatgaatttgacatcctctgtctttttcacattcgtctccaccggctcataagtgtattccaacagatcgccgagtgccgtctttaaattatgtacatgcacccactgtcctgctgcaatgttctccttcgcattgccgatcctaaaaccgtatttaatcacctcggctccggccgcaatatcgcggattgccatcttgtgtcccgccgggatcgtttccctggcggtaacctcctttgttcccgccagaatggtctccccggctgtcagttccttcaatgccacgataacattatcattttcattgatcttgataaaatccttcatgaatcgtctcctgcctgtttttcacagtgtattatgcaaaaatcttctccattgccttacgcattccaagtgtgcggatctcttctgtataggaagcaactgcatcctccactcctgcaagagtgctcagatcctgtccccagaatgcctcgttggagagaactgcatgtgcatactctctcgcgcccttagaactgttggctgcgaagaactccaataccgcagcgtcgtctaaaatattgtactcctgtccgtcgcggtgtccgatcagtgccttgtcgcggatctctgttcctgtatagaatgccatcagggctgccagcgagaatgtcaggtgtaccggaagctttccttccttctcgatgtaccccaagaagctcggcatacatcttgctctccacttggatacagagttcagggagatggataacagtgcgtgctttacatacgggttgttgaatcttgtgattaccgcctctgcgaaatcgatcagatcctgcttcggaagtgtcagcgtcggaattacttcatcgaaaatggttgctttcatgaagttaaaaatcagttcatcctgcatggactctaatacgatgtcgttgccgcacagataggacgcaagtacaaaggatgtgtgcgctccgtttaaaattctgacctttctctgcttatacggcttctggttgtctgtaaagatcaccggaagtcctgcatccggaagcgggaactctttgctgatgtcctttgcgctctcgattacccagagtgcaaacggctcgcccgttacgattaagttgtcctgatagccgaactctttgcacagctcctccgcctcgtctctcggatatccggtaacgatacggtcaaccagtgtggaggtaaatacacatgcatcattcagccatgcggtaaatccttcctccaggttccagagttttgcaagctttaatacgcactcttttaaatgaataccattgtcatcaatgagctctaccggcagcatcacaagacccttgtcagccgcgccgttaaagtgtttgtatctctcatataagaacttggttaattttccaggatagctcttcggcgggttcatctccaggcgatcggtatcgtcatacacgattcctgcctctgttgtattggatacgatgtaacggagtgtatccagttttgcaaatgccgcatacttttcatactcgccatatgcatctaccgcatctgccacactggtcacaatacggttaatgcgcttcggttctccatctacaattccgcgcagctgtacggtatactgacattcctgctcgtggaaacgatccaggcttccgaactcgatcggctttaccaacacgatatcgccattgaatctgccctgctcgttcgctatatcaatcatataatccacaaaagcacgaaggaaatttccctctccaaactgtaatactctgacaggtctttcaacctttcctgttttttctctgcttaataagtccatgatatcctcctggtattctgatatatactgcattttgttgctttgtaagcgtttacaccatgtattcttacaccttttataggattagtcaatatgtaattttgcacaatttagtgatgttatctatattccattacttttttttcattcttttggcatttttgttattttttcctgtttctgttgttgctttctcaatttcaatattgtataataaatatggttgcaatgaaactgctttcacagctatacttgttttgtaccttatattatgtaactttacatgtaacgccctgggaagcatctcatttcttccatattaaggagtttcaaaaggaatcacaccatgacaatttacgacatttcgaagaaagccggtgtttccattgccaccgtctcccgtgttctaaacggaagcgataaagtccggccagctacccgaaaaaaggtaatggatattatagaaaaatacgactatactccgaatgcatttgcgcgcggcatgggacttcattccgtacagacggtcggtattctctgtgccgattcctcggatctttttctcgccaaggcagtgtattatctcgagcaggagcttcagtccaacggctatgaatcccttttatgctgtaccggttacaatctggacatcaagaagaattacttaaacctcattctttccaagaaagtggatggcattattctcgttggttccaacttcatcggtaccaatgaggaggaaaaccagtacatcaaggacgtttccgcacaggttcccattatgctgctcaacgcttcctttgactatccgaatgtgtacagcacactctgcgacgattacacatctatgttcgaggcaaccgtttccatgcttgacgcggggattgaggacattctctatctgtacaattccaattcctacagcggcgtcaaaaagctgggcggttttcgtgcagccatggaggcacactccgtcccggattatgagaaacggattctcttctacgagggagacccgcagcagatggacgacgtcgccaattatctggaacgcctttccaaaaagaagctgagttttcacggcgtgatcgcatcggaagatccgcttgccataggcgccatgaaatacgccagacgtcagggactttgcgtaccggaagatttgtcggtaattggatataataattccatgctcaccacctgctgtacaccggagcttacctccgttgacaaccgtcttgagacacaaacgcatcagctggtgcagactctgctcggagttctccagggtgaggaaatgccgaagaaatccattttttccggcaaacttatcaaacgaggcactacattattttaaggttttcaaatataccaagaacaacttatggaggaaaaaaagatgaaaacatttatggacaaagactttttactgcagacagagacagcgaaaaagctgtacaacgattatgcagcaaccacaccgattctggattaccactgccacatcaacccgcaggagatttatgaggaccgtcagttcgagaatatcacacaggtatggctcggcggcgaccattataaatggcgtttcatgcgttcctgcggcgtagacgagcgtttcattacaggagacgcttccgacaaagagaaattcttaaagtgggctgaggtgctcggcaaagccatcggcaatccgctcttccactggagccacctggagttgcagaaatatttcggctatcacggcgtgctcaacaaaaacaccgccgaggaagtatgggagctttgcaacaagcgcctcgcccagccggatatgactgtccgcaacatcatcaagcagtccaacgtcacactgatctgcaccaccgacgatccggttgattcactcgagtggcacaagaagatcgccgaggatgcttcctttgacgtaaaggttcttcctgcatggcgcccggacaaggccatgaacattgagaagccgacctatccggaatacctggatcagttatccactgtatccggcatcaaggttgcctccttcgcagatctgtgcaaggcactttccaaccgcatggatttcttcgcttccatgggatgctgtgtttccgaccacgcattagagtatgtaatgtacgctcctgcttccgcagaggagatcgagagcatcttcgcaaaacgtcttgcaggaaatgatgtcaccaaggaagaagaattaaagttcaagacggcattcatggtcaatgtcggcaaagagtatgcaaagcgcaactgggtaatgcagctgcactacggctgcaagcgcgacaacaacacaccgatgttcaacaagctcggaccggataccggatatgactgtatcaacaactacgctccttcttctgagatggcagatttcttaaatgccttaaatcagagtgacgaacttccgaaaacgatcatctacagcttgaacccgaacgacaaccaggccatcggcacgatcctcggctgcttccaggattccaccgcagttgcaaagattcagcagggttccgcatggtggttcaacgatcacaagacaggtatgcaggatcagatgatctctctcgccaaccttggaaacctttccggtttcgttggaatgctgacagactccagaagcttcttatcctatacccgtcacgattacttccgcagaattctctgcaatctgatcggcaactgggtagagaacggcgagttcccggcagactacgagacacttgaggagatcgtgaagggaatctgctacaacaatgccgtcaactacttcggatttgacttaaagacctgctaattggtttcccattgaaatgcccggttttccgggcatttcatgcaacaatacatagaaaggatattttatcatggaacttagaacagctgcatctccaagagatgtcaaacactacaccaccgaacgtttaagagaggaatttctgattgacgacctgtttttgccggatgtcatcaagcttgtatacagccatattgaccgtatcatcacaggttctgccgttccggtaaaagagaccttaaagctgaccgccggcgacgaactccgcgcacagtatttctgtgagcgccgtgagcttggcgtcatcaatatcggcggcgcaggcaccatcaccatcgacggaaaagcataccacgttgcacacaaggaaggcatgtacatcggcatgggctcccgcgacattacttttgcaagcgatgacgccgctgcaccggcaaagttctatttaaacagcgctcctgcacaccgcacatgtccgaccgttctcatcaagccggaaggcacaccggaagacggcgttgtcattgtgaaggattgcaacaaggtagaactcggttctctggagacggcaaaccacagaacaatctgcaaatatatccttccgggtcaggtagagagctgtcagctggagatgggcatgacgaagcttgagccgggaagcgtatggaacacgatgccttgccatacacacgacagacgcatggaggtctatctgtatttcgatatgccagaagatgcccttgtcatgcactatatgggtgaaccgacagagacacgccacattgtaatgcgcaacgagcaggccgtcatctccccgagctggtctatccactccggatgcggcacccaggcttacacttttatctggggcatggtcggtgagaatcaggattttgacgacatggacgatgtagccatgacagatttgttataaaacggaggtctaaaccattatgaaaatcgctttaatcaacgaaaacagccaggcagtcaagaatgaaatgatctgcaacacattaaagtccgttgtagagccgatgggtcacaccgtattcaattacggtatgtactctgccgaggatgagcatcagctcacctatgtccagaacggtattcttgccgcagtattattgaattccggtgcagccgatttcgttatcacaggatgcggtaccggcgagggtgctatgcttgcctgcaattccttcccgcaggtactctgcggacatgtagagtctcctctggatgcttatctcttctcacaggtcaatgacggcaactgtattgctctcccgttcgctgagaacttcggctggggtggcgagctaaacctcacatacatcttcgagaaattattctgtgcaccgggcggtggcggttatccgaaggagcgtgtcgtaccggagcagcgcaacaagaaaatcctcgatgaggtaaaaaaagtcacacaccgcgatctcgtctccatcttaaaagagcttgaccgtgatctcgtcgtcggtgcattgagcggcgaacattttgccgaatatttctatgccaactgcaaggacgacgccattgctgcatgcgtaaaggaattgctcgcataagccgttccaactaagtaattgccgcaataagcatggatctctttggagtgataagtaatattatatgaaacacacttggagatttcatgtggaaatggagatggaaattcggttcaaaaaatgtggaatttctaaccaaccgaatgtttgcatcttcgatgatccgtgtctttccaagtttggagcactccacggactgtgtccgcaagccagcagacaattttaggacttttgtgtgtgtcccttgcggcaccagacaacagatggcataaatgccatctgttgtcgaataaaacataaccgcgcgaagccgatgtttgagtcggcatctgccatattttcaatagcagatgccggcgagtttcggttcgcgcggttttatattgtctatgaagaggtgccattagggacaccagaaagtccgctcattgtctgcggcttgtcggacacactccgtgagtgtccaaacgtggaagagacacggaattcgatgcaaacatctcctttagcatggcagtgcgcttttccatctctcccggtcttgtctgattaaaatcatacagacgctccagacacgccgtctgctcccacaccagttcctcatctgacagcagataaagctctatattgtgcatcttctctcttaccagccattgccttccctctcctttgtgttcctgtccatctcccctctcctctgccgtgtgctctcagtcatcacagcagaacagatagtaaccggcgatcatgcataataccagaagaaggaacccaaagaaacggctgtggagcacaagcatcaccagcatccccatggaaaagcaaaacagtgcaaatcccatcatccgcttcataagatcccccaaacaatctgtctcttcatcatatgcatctgccggaagtttctctactgttttttagttttcttctttgttcacggaatcctttaagatgtcctccatctctttgccagccgcttctctcgccttcgtctcatcctcgtctgcagcggacgctgtatcggatgtgacctgattcctggaggtaaatttgttcacaaaatccggcaccatatccagaatctttgtgacgccgtcctggttcttgatgttcacgagcttcgtagtaccgttctggatcaccagcacagcgctcggcataatcttgccgcccataccgcctgctccattgttcttcttatcctgtgaaaatgctcctgcggcaacgccgaatgatacatccacgagcggaagaatgatggtatccccgatatgaatcgcatcgcccaccaccgtcttcgtcgtaataaaactgtccattcccttaaacagggattctactgttgtgtgaaaactgttatctgccataatgttacccctttcttatcctttatctgtgcatcagccatttcagccagatgcggaactcctttttgccaagcagccggactgccgatactgcgatatgcagtcctcttgcacgcccttttatatcaaatgtgcctgttacataggtattctccgcttcaaagtccggatatacctgcacctgataccgatacagaaacggaagcacacataagcccccgagcacctgcccggtcagcgccggatcccccatggaaaatgtcagatccgtccggatcctccggaatttaaaatgggtcagcaggtattttaattctgtaaaaatgagcggcagcacctctctgtgccgctcgtccgtcaaaaacgtacggacatcttttattttcttaagagcctcttttatgccggcacgaaactgccgcagttttctgacgagtcctgcaaagaatgcacggatacgctcccatatccgccgaaacagcccgccgcgctgctttctgcgcacagccggattcgcttgttccagttccttatgctccgcaggatccggcttcttcgccccggcgcagactttcttcgcctgcctctcgtcgaaccgttccgcctctccctgctcactgtctgccaggatgctgcctgttttctgctccccgtctgtcagggggacatctgccgcactgcgctcttcgggttcttctgcaccgtcctcccggtcatcctccccgggttctccatcgtccggcttttttcctttccgggtgatcccaaagatccacagctgtgaagaaaacccttcctcttcgtacgctgccctccagcttaccgcatgcaaaagccatgtcacagcaatccggacggtcgtcttctccccgatgctgccgctcacctgataccgcaccggaacaaaaagcaccactgccaaaatgagcaggatcagtccaagcaggatcagcaggatgattccaattatttttaatatcagcaatagaactgccattatccctccctgccgctccggtgctcatccagataactgcgcacaaaaaacgctcctgtgttccggtatacttcatccacaatcgacaccgccacttccagcgcctcatcataactcccggcaagtccggcaatcttaaggtctttcttcggataccctttctgcaaaagttcggcagccgggataatatccagaagatttttgtcattcgacgcaggcgcgatcacataaatgccgatctgtcccgcattgtggtcgattttccacttcacgcgctttgtcttatgtacaatactttcccctacatataactcgtcataccatgtcatgcatgctctccatatcacactgctctaaaagtatttgtgatttccccacaaattactcttcttaagctccagatattcattgtaagctttctccagaatctgtttttcgttcggaaacttcaagagatgatacgcttcgtgatacttataatatccggaatcaacaaaatattcttcccgctgcggcttgctgtaataactgtctgccatcataagataccagtggacgtccttctccaccgtgtcctccggtaccgtaaaggaatactggctcttgccgacatatttgataattgccgccttcaccccggtctcctccaacacctcacgcgttgccgtatccggatactcctccccggcttccaccgtccccttgggcagaacccagccttcatacttgttcttataattcttgtataaaagcaatatcttaccacggaatattaccacaccgccacagcttgttgcctctatcattgcaatacctcccgatgtggtcttttcataattatatccagtataatactttttcagacttcacgcaacctcgtatgcgcttagttttcccatgtataatacgcatcaaagatctgttttgcaatcgggaccgcatactcgcttcccacgccggaattctccacgatcaccgccaccgcgatgtccggttcctccccgttatgcgcatatcccacaaaccaggaatgtgtggcgtccgagctggatgagaactccgccgaacccgtctttccggctgcctcatagctgtcgctctttaacttggtcgctgttccttcctccacaacatagcgcatatattcctgcaaaacggacgcatcgctctccgagagcagtgttttgtactccgcaggctcatactgctccacaacctcgccctccgcatccgtgatgcggtcaatcacatacggcttcatcagcacaccgtcgttggcgatcgcagaagcgattaacgccatgtgaaacggtgtcacaagcgtcttaccctgtccgatggacgtctccatcaccgctgaatcgctgtctcccggctccagcacaaagctgctcttcgacgactcgaaatccgtcggaagcgcggtattaaacagcatctggtcacagagatcatcaaactgttccagatccagtgtgagtcctaaggacgcataggaggaattacacgaatttgcgaaggaggtctttaaattctccgatccgtgccgcttattgttatggcagtggatggtctttgtgcccacggtatactcgccgctgcagtcaaaatgatagtccgcatagtccgcattctcatgaatgtactcgagcgtggtaaagatcttaaacgtcgatcccggcggatacagcccctgggtggcacggtttagaagaaccgagctgtcactgtcgtccgacacaaaggtatcccagtcatccgcgatcgtgttcggatcgaaatccggctttgacaccatggcaaggatcctgcctgtctccggctccatcacaacgaccgccccgtcatagcttcccagtgcatcgtacgactgaagctgcagatcataattcaacgtcgttgtgacactgtcccccggatttttctctcccctgatctcactgaccgccttctccatatacagaatgttggagcgcagcagattgaaattcgccatcgcctcaatgccggaagtaccgtgtgtggaatatccgacaacatgcgcaaagatcctgcccgccggatactttctcgtctcatttccctctgcatccgtaaccgtctccgccagtgtgactccgtcggcggaatagatactgccgcgcacgacgctgcgcgtaaagagctcctgccgtttgttgtacggattattgataaactgttcgctctccacctgctcaaaatacacaaaatagcccatcaggcacagaaacaaccccagaaaagagtaggttactaccgcaaattcccggttttttgtattcttttttttctttccgtttttatgaaaaagtttccacatcttcgtcaaatcctgtttttcttcgtcttggcggtgctgcattttttctttcatttgctgccccctcatcctgccgtctgatgtataagccctgcacaacggcaaacatgatcatcgttgaaaatagcgagcttcctccgtagctgacaagcggaagcgtgactcctgtcgacggaataaattttgtgactcccccgacggtgaggaacacctgaaatccgtatacggttcccagtcccagcgcaatcagcttgtaaaactgctccttcatctgcatcgccacgttaaaaaacatcaaaaagcagctgatgcacaccatcaaaagacagattgcaaaaatgccgcccatctcctccgcaatggcggaaaagataaagtcctgctcgaccaccggaatcttttccggcatcccctggtatagtcccattccaaaccagccgccggtaccgatggcaaacagggactggcagatctggtagccctcattctcaattcttgagagcggatcctgccatgccaggacacgcacgcgcacgtgggaaaacagctgatatgccaccaccgcggcaatacatccggtcagaagtcctcccgcaaaatagaacagctttctggtcgccacatagagcatcaccaggtaggtcacaaagaagatcagtgctcctcccagatctctcgataacaccagaatcaggacatgcaccgctgccagcaccgtcgcgatgcacacatgcttcaaatccgtattctcgtaaagcatacatgccacaaaaaatacaaatatgatcttgacaaattcactcggctgaaccgatattccggcaatcgagattgatattttcgcaccgctgctcgtgattccgaacgccagaaccgccagaagaccgatgatcccggcagctgcgtaaagccacggcattttccgcaaaaagcgcactttctgaatcagcaccggtataatgagcgaacacaccatcgcccccaccgcaatggcaaactgccggatcgccttgtcaaaggaaagccttgtaatcataataaacccgatcattaacagcatgcacatattgttgatcaaaagcccggaagcccttccgtacaccaggcggtaactggaaattgtgacggcaataaacgccgcctgcaccacatagaacaaaatcatgcggatatcgtccgtcaccgcgtagattgccagaaacgcatccagatgaatgagatacatcaggcacatctgacgcttaaatatcttcgcccttttctccggggtaagcttcccgcggaatgaggaaaaacactcgtacgtatagaacgcgaacaaaagtgtcatgagatattttgataattctacaatcaaatctgtcattggttattcgacccctcgtttataatgtcccctcgtgtagccgtcgggaaacagttcctttacgctgtgttttccggaaaggaacgtccgctcaaaaagatccagtatgaaagccgcctgctcttcctcctcaatcgtaaacgatatccggtatgcggcaattcccatgcgtaaaaaatccgcgcgttcgtcaaaaagcatgagcggcgtggtattatagatcgtattataacactccgtgcagttatttttgaccgggaaatattttccataccgatccttcagatataagattccgcgcttcctatcacacttctccgtgttcgcatgcacgcactgcgcggatgtcatcagtggaagataaccgtacaccatcgcctcgctgtgatgattgtctctcgcaaacagttcgctccggttgagttcaagcggtacggtatcgcgctctggtgcaagctgcaaaaacacatcctgcgctgcactgttccagctatagagactgtgatctaaaattaacggcgtctccgcacccagctcctgccgcacaaatgcggcggcatcgtaactttttgccacaaatccgtccagcggcaatgcctttaagtgctctatattctccctgtaaaatgctgccgttctgctgcgaaataccgccggcagaatataatagaatttctttcccgccaggtgtgcctctcctgcatcttttaaaagtgccgtccataattcatccctggtatagcagctgctgtccgcataaatcccatgtacaaaggaagaacgaagcaccaccggcagcagacaccggttctccaacgaaacgatgaccgctttaccggcatcctctgcttctcttcgctcctcctgccgcgtccttttgtccgcgccacagcctaacttctccgcctccggggacgctgccccatccctgcggtatccctgcagaagcttctcctccagtgcaagaagtgcctccctacgcagcgcgtttagtgcctgcaccggcagaaaaacatcctcgtccatctcaatggccagctgttcaaatgcaaacggtgtatttcctgtttttctcatacagacgtccaccctgtcacgcgagagcggctgtttctgcgcctgcaatacctgctccccctcacacgtaatctcacatccttcacattgcagtttcagtgtagcagataaatctttttttaatcttaagaatccattgattctttctttgatttcctgctccggccgcactttgatatagtgttcccgcaccgtcttctgcagtgcctcgtctgtcttcgcatgtcccggggaatcaaaggtaatcatctccctgccatttctgcggaaatagtacccgtcggtaaaaccgctgcggttgccgagcgccagcagctttctgtgatcctcctccgttaccgcgtaagccttcttcgcccgccggcgtgcctcatcctcgctgcagccgcccgctctctcctcattcagccggtccagataacggtccatatactgccggtaaacggatacaacgcctgccgcatactccgcctgcttcatccgtccctcaatcttaaaggagaatatgccgctctctgcaagtgcgggaatggcatcaatcgtacacagatccttcgggcttaacacgtaattgccgcacgcgatacgggatttctgatcctttttgtagacctcatagggaagccggcacggctgtgcacagcgcccacggttgccgcttctgccgcccagcatactgctgagcagacattgcccggaataacagtaacacagtgcaccgtgcacaaaactctcgatctcgattcccaccttgtcatggatttctcttatctcggcaaacgacatctcccgcgccatgaccacccggctcgcaccgagctgcttcatgtacgccgcacccgccgcgccggtcacagtcatctgcgtgctggtgtgaatatccatcctagggaacatgcttcgtatccttgcaaacgcccccatatcctgcacgatcaccgcatcgagcccctgctcgtaatacggcagcagatactcatagagtccctgttccagttcctcctccttgaacagggtgttcaccgtcagatacacctgtctgccatggatatgtgcatagtcgatggcacgcagcaattcttcctcattaaaattattcgcatatgcgcgggctccaaaatggctgccgcccagatataccgcgtccgcccccgcccgtatgaccgcctcaaacgtctcgtatgatcccgccggagccagcagctccaattctcttttctgcatcatttttcttacctgttatatgaaaataagggacgaaagcaaatctcttacgtccccgtattgtctattcttctgttttatctttttccgttactttgccgagcagcgcatcctcgagactcgcctccagcttagccttgttgattaaaagctccttgttctgctcctcgagctcttttctggctttctcgtcgctctctgccttgatctgattggaaataagatcatgtttgagatcgtagatttccttttccttctgctcgatctcacgctcaagcttctccacctgtgtcttcgccttaaagtaatcatccgcgatatttaactgcaacagcgtcgccttcatgtcgccggatagatgtcttaactcttccatgccctgaaactcgcccagcttattgttgatataggtggcaaccttctgtaggtactcctcgccctcataaccgctcagtgtgtatacctttccaccgatgatcacttcggcgcttgtcttctctgccataccatttcctccaaactcgggtatccgctacaatatatagtatattatactgacatatttaaggaaaagcaactatttctatacggaatgttcgattcccagatgctggtatgccagctctgtcaccacccgtcccttcggcgtgcggttaatcagcccgttctttaccagatacggttcatatacgtcctcgatggttccggcatcctcaccgattgctgccgccagcgtgtccagcccgaccggtccgcccgcaaattttccgatcatcgtcatcaaaatgttcctgtcattctgatcgagccccatcttgtcaacctccagcagatccagtgcaaaggacgctacctcctttgaaatccggccgtcgtattttacctgcgcgaaatcgcgcacgcgctttaacagccggttcgccagacgcggggttccgcgcgagcgtctcgccatctcgtaagcaccctcctcatcgatctccaccccaagtgtcaatgccgaatgcaggatgatcgtttttaactcctccaccgtgtagaactccagatgatgcaccacgccaaaacggtctcttaacggtgccgacaaaagtcccgcgcgcgtggtcgctcccaccagggtaaacttcggcagatccagacggatggagcgcgctgtggctcccttgccaagcatgatatcaatggcataatcctccattgccgggtacagcacctcctccacctggcggttcagccggtggatctcgtcgacaaagaggacatctccctcctgcagattgcttaggatcgctgccatttcccccggttttccgatggcaggtcccgaagtgaccttcatatgtgttcccatctcattggcaatgattccggcgagcgtggtctttccaagtccgggcggtccgtagaacagcacatggtcgagggattcccccctcgcctttgccgcctcgatatatatttttaaattttcctttgccttctgctgtccgatataatcgtccagcgtctgcggccggagacttttctcgatcttaagatcttcctcctgcacctgcgtggatatgacccgcttctccatgtcccagctttcctttcttccgccttgccgcttcccttactacaggaatgccatattcttaagcgcggcttttaacagtgtttccacatccatatcatccgtgatctcaatgccgtttaacgcctttaacgcttccgaagaggcatagccgagcgccacaagcgcctgcaccgcctcattcttcacaccgctgcttccgttctcgttctgtctgctcacatgctcggatttgagttcaaacgcctcctcaagcgacagcttgtccttcagttctaaaatcacacgctgtgccgtctttgcaccgattccgggcgctttagcgatcgccttcgcgtcatcgccaagcaccgcaaaccgcagatcatcggttgtcatcacagacagcaccgccagcgcccccttcgggccgataccgttgacgccgattaacagcttgaagacacgcagatcatccttcgtcaaaaacccgtacagaatcatcgcatcttcgcgcacattcagatacgtatagagcttgacttcctctcccacagccggaagatagtcaaacgtctgcccggtcgtatagatccggtatccgattccgcctgcctccacaaccacgctctcttcttccacatccgcaaggacgccttttatatatgcgtacacacgtatttcctccttatcgtttcagccgtccgccaatccttagtatgatctcctgggctgccacaccgatcagcagtcccgtaacgatgcctgccacgaaaagcaccggcagatagtaaaaaatgttgatattctccaccacaaacgccgccacggcaatctgaccgatgttatgcgacattccgcccgcgacactgaccggcagcacaccgagctttccggtccgtttcaaaagatacatcaccagaaagctgaacattccgccggcaaggctgtataagatactgaacagattgccgaacagaaaacccgccagtacaatccggagcatcgagatggcaaacgcctccttagtgccgacacagtacagcatcagtaccaccacaatattggtgagccccagctttacccccggtattccgaaataaaacgggatcagggattccacatagctgcagattaaggcaagcgcaagaaaaactccgagatacgccaccttatctcgcaatggagtcgaatccgttttcttcacttcccgtcacctccacaaccactttgttcggcagacagacaatcatctcatgattcttagagattgccttctgatgaacacacagcttgtccgggcagtccgcctccgtcatgtccgccctgccatcgcggattgtcaggacattcgttgtcacgccgtcctgcacaatcggtatctcctgctcctccccgagcgcataggtcccgtacacactgccgtccacggtgacgcgcacacaggcacccgcatccgcgcgcgttcccgtccgctcatagaccacaagaaataccgtaaccacggcaagcagtattgcaagaaaaatcacatcgtttctgctgattcgctttttcataccgtctgaccttttccgtctgcccgctcgccaaggtaataaaagccccggcactcggtcagctttacatccagaatctttccgatcatgtccgctgtccccggcagatgtaccaccgagttattgctgagtcttcccgtcacaagcgaagcatcctgctcgttttgctcctcaatcagcaccggcagcgtctgtccggtcagtgcccccgctttttctgcggagatcttctgcacttccttaagcaggcggtcaaaacgcgccttgatcacatcctccggcacctgctcttccatggatgccgccggtgtcccggtacgtttggaatagataaacgtgaacgcgctgtcataacgcacttttcgcaccacgtccatcgtctcctcgaagtcctcctccgtctcccccgggaatcccacgataatatccgtcgtcagcgcaatgtccggcactgccgcgcggatcttgtccaccagctccagataatgttccttatcatatctgcggttcatgatctttaagatccggctgctcccggactgtaacggcaggtgcagatgtttgcagatctttttggatcgtcccatcacctcgatcagctcgtccgagagatccttcgggtgggaggtcataaaacggatacgctctaacccctcaatcttctccacttcctctaaaagctgcgcaaatgtcaccggctccttcagattcttgccgtaggaattgacattctgtccgagcagcatgacctcgacaacgccgtccgccacgagctgttcgatctcacggatgatctctttcggctccctgctgcgctcccttccgcgcacatacggtacgatacagtagctgcagaaattattgcatccgaacatgatattgacgccggatttaaacgaatacttccgctctaccgggaggtcctccacgatctggtccgtgtccttccagatatcaatcgtcatggaatccgattccatcgccgtcacaatcagctctgcaaatttgtagatattatgtgttccgaagatcagatccacaaagcggtagctttcttttaatttttcaacaactaccgtctcctgcatcatgcagccgcagagtccgatcagcatatgtggatttttctttttataattctggagtaccccgagtcttccatagactttgttatttgcattttcacgcaccgtgcaggtattgtaaataacaaaatccgcgtcctccgtatccgtctccacataaccgatgcgctctaagataccgacaagcttctcagaatcgcgcgcgttcatctggcagccgaacgtcgtgacatgaaaggtcagcggactgcctttttttgcagagagctgttccacataatttttagcaatgtccataaagtaatactgacgctccggctcgctctgcgggatctgctttttatcgattatttcaatgtctattttctttttcatcttcatccttaccatctacggacgtgtctgcccgtttccatatataatatattttgtgctggtcagcgcatccagtcccatcggtcctcttgcgtgaagcttctgggtactgatgccgatctccgcgccaaatccaaattcaaatccgtctgaaaaacgcgtcgatgcgttgacatagacgcaggcagcatcgatctcatccaggaaccgctgcgcgttcgtgtagttttctgtgatgattgcctccgaatgcccggtattgtagcggttgatgtgtgcgatcgcctcgtcgagagacgacaccgtcttcacggagatcatataatcgagatactccctgccccagtcttcctccgtcgccgccgacaacagttcctttttcagttctccaccatttgccgcctcccggcgctctgccgctgcaagacttttctcatccgcatgaataacaacatccttctgctgcagtgccgccgcaagctttggcataaatgcatccacgattttctcatggatcacgagtgattcacaggcattgcacacaccgatccgctgggtctttgcgtttaagataatacggattgccatatcgaaatccgcactctcatccacatagatatgacagttgccggttcccgtctcaatcacaggaatcgtcgcctgattgacgacggcgcggatcagccctgctcctccgcgcggaatcagcacatccacatattcgttcatcttcatgaacgcagccgccgtctcccggcttgtatcttcaatcagcgacactgccgcacgcggaatgccatgtgtctccaaaacttcctgcagaaccgaaacaatgacgatattggacgaaatggcgtcactgccgccttttaagatcactgcgttgcccgtcttaaaacacagcgcaaacgcatccaccgtcacattcggtctcgcctcatagatcatgccgaccacaccgagcgggacgcgctttttaccgatcataagaccgttcgggcgcttcttcatggaaaggacttcgccgatcggatcagcaaggtctgcaacctgccgcagcccctccgccatctgctccatccgggatgggttgagcatcagacggtccaacagtccctcgggcatatgattctctctgccgcgggcgagatccttctcattctcgcggataatctcttcggtatgtgccacaattgcctctgccgctgcacgcagcacctcgttcttcgtattcgtgtccagattgccgatctgtctgctcacttcttttgcgctcttacaaagttctgtcagttccatatcctttccatcctttctgtcagatccgatattcccgctcctccgtataaatccgatgcatccgcacgtcggtgggaagcaccgcaagctgttcctcgatctgcccttcaaacgctaccgccatgagggacagcttcggaaaccttgcaaaatagcggtcataataaccgccgccatacccgtaccggttccccttacggtcaaagaccagtccgggcaccagcaccaccgcatcctcttccccgatccgtttgcagctctcatccggctccatcacatgaaaggcgccctcccgcaccctggaaagctctctgatccggtaaaactccatccgatgtgtgtcctgcattctcttctcccggccgcagtcccgctgcaaccgctcttttgatgtaaccggaagcgccaccgtcttgccgtccgaaagtgcctgtgccagaaacggcagacagtcagcctccgcgccgagcggataatagccgtagatgacagcgctgttatgataccagtcagatgccgccagtctctcacagatctttctgctcttttcctgcacttcctcctgcggcagttccatccgccatgctttgtgccgcgcccttatctgctgacgcgccttctcctgtgtcagcgctgcgtcaggaaagtcctgtcttttttccatacttatctccaaggttctccacggaaccgtccggattcaccatatcgatattgttaagctgcgccgccagatttttcttcacatccgcaacatactgcttgcgcagcagcgcctgctcctttttttcttcctccgtcagcccttccgccttcgacttgcggtataacgcattgattctgtcaatctgttcctggttcatagtgctccttttcctgtattcttaaccgatcgtctccaaaataaaatcttcaatccggaaagattctttcttctttgcctgaaaaatggttcccttaaaggaatcatcaaatatatgatgcagaatgcagacatccctgccgttcgcaataatcatgtctgttcccgagagcgttgcaatctttgcggctgtcagtttggtcgccatgccgccggttccaacatcactaccggtcgaacttttcgccatgccgtagatcgacgcatccatctcctccaccacttcaatgagctttgcatccggattcttgtgcggatcgtcggtaaaaagcccatcgatatccgagagcaggatcaaaagatccgccccgatcagagaagccacgattgccgagagcgtgtcgttgtcgccaaactgcatctcataagtagaaaccgtatcattttcattcacaattgggattgcgccaagacggaacaattcgtcgaacgtattcttcgcattctctctcgagacagggttcaccatcgtgttcttcgtcatcagcacctgccctgccacctgattgtattccgcaaaaagccgctgatagatcatcatcagccgcgcctggccgaccgccgcgcatgcctgctttgtcgaaatgtccttcggccgctcatccatgccaagcgtctgtctgcccacggcaatcgcgccggagcttaccaggcacacatccatcccgcggttccgcagattgcagagttctcttaccagatgctccagcttggtaaaattcagattgcccgtctccccgtaattcagtgaggaagatccgatcttgactacaactctctttttctcattaaaatgaaaatgcttttgttccatctgtctaacgtcccctttatatgtaacattttccaatcattcatcccaaatgggcatagagtctcatactgtattactctatcatatcttcatcaaaatggcaaattgatgttttcacattgtatgaacagaaagtttatggtacattggatgggaaacatcagaaatggagatttttatgatgagaaaaaagaaggtactctcctgtcttctggttcccctgctctctgcaaatctgctgctctccggctgcagccgcacggcggacgaaccggttaccaagtcaggattttattttaacaccgtcatctcggtctcgatctatgaaaaagggagcgaggaactgctcgatgactgttttgcccttgcgcaaaagtacgagggatatttttccaatacgattccggacagcgatatttccaaaatcaacgatgcgggtggcgctcccgtgacagtacacgacgaaacgatcgaacttcttaaaaccggcatcgcatatggcgacttaagcggcggcaaattcgacatcaccatcggccggctttccgatctgtgggacatctcaaccaaagcgctgcttgatcagaccgatgcctccatgattccctccgacgcggacattcagacggctcttgccacagtggattaccgggagattcagattgacggcaacacagtgactctgcaaaatcccgatgccaggattgatctgggcggcatcgccaaaggctatatcgcggatcagatgaaagcctacctgaaccagaagggaattacttccggttacatcaatctcggcgggaatgtgcttgcgctcggcgcgaagacggacggttcggcatacaccatcggcatacagcgtccgttcggtgaggaaaacgaagcgattgcctccgtctccatcaccgatcagaccgtcgtatcctccggcgtctacgaacgctattttgaagtagatgggacgcgttatcaccatatcctggacaccgcgaccggttacccttacgataacgggctccttgaggtcacgatcatcaccggtgcatcggtggacggcgacggtctctccaccacctgtttctccctcgggctggaagacggtatggcgctcgttgaaagccttgatgctacggaagctattttcatcacagacgactatgaagtacacaccagctccggcatgggaaccgtcattccctatgagattctggaagattaaacaacaaaacaggcgtgaagaattcgtacttattaccgcgaattcttcacacctgtttttatttcacacttgcattccacgaaacgattcttacaggatgattttcggagaaaatcattcttacagaataattttctttggacacttctgtgcacagataccgcatccgacacacttctcctgatcaatgtatgccacgttgtcaatgacatgaactgcatccttcgggcagttcttctcacacagatgacatccgatacatcctacggaacatgccttcatgacatccttgcccttatccttggagctgcactgtacaatgtgctttgccttgtaaggaacaagctcgatcagatgcttcggacatgcagcaacacattttccacatgccttacatacttccttgtcaacctgcgcaatgccgtccacgatatgaatcgcatcaaacggacaagcctttacacagctaccgtatccaaggcatccgtaattacaggacttcggtccgccgttcggcacgaatgccatggctgcacagtcctcgttgccggtatactcgtaatcgcgtcctgccttctcacaggttcccgcacactttacaaatgctaccttgcgctcgccttcctcggctgccacacccatgatctcaccgatcttggctgctaccggcgcgccgccgaccggacactgattgaccggagcctcgccctttgcgattgctgctgccagaccggaacaaccggcataaccacagccaccacagttatttcccggaagcacacctaagattgcttcctctttttcatctacctctaccttgaacttttctccggaaataccaaggaaaaatccaatcaagatacctacgccgcccacgattaaggctgcaaataaaattgctgtaacgttcatcttctttttcctcctaaatcattcctgagaatcccatgaatgcgattgacatcagacatgcggaaatcaatacgattgcagtaccctgaaacggcttcgggatatcattgtactcgatcttctcacgcacacctgccattaaaacgatcgcaatcaggaaaccaaatgcggttgcaaaaccgtttaccacgctctccaaaataccgtattccttggtaacattcgtcagtgcaacaccgagaacggcacagtttgtcgtaatcagcggaaggtatacaccaaggctctggtataatgccggcatggacttcttcaagaacatctcaacgaactgtaccagtgcagcgattacaagaataaatacaatcgtctgcaggtaggtaaggtcaatgcccttgctcatcagatagctgttggcaaggatatatttgtagatcagcgctgtcacgaacgaagagatcgtgataacgaatacaactgcgccacccattccggcagcggtctctgttttcttggaaacgcctaaaaacggacagataccaaggaactgacttaatacaacgttattgacaatggcagagccgattgcaattaaaagtaatgttttcatccgtatctatcctcctattctgctttttctgccggagcttccgctgccggtttcttaccggtgcatgcagcagacataccgcatcctgcacagtctccggtgatacatccggacggctcggcaagcggcttgcccttggctgccatcttctcacggacgatcttcatcacagctaccagacatgccagtacgaggaatgctcccggtgccataacaaagatggtgatcggtgtgaaccagcttaaggacagaatctggaaaccaaagatctgacctgcgcccagaagctcacggaacagtccgatcagggtaagacccatcgtaaatccaagtcccataccaagtccatcgaaaagagacggaactaccggattcttggaagcatagctctcagcacggccgaggataatacagtttacaacgattaacgggatgtacacacccagcgactcggagaggctcggagtatacgcctgcatgataaactgcaccactgttaccagcgatgcaacgataacaatgtatgccggcatacgcacgccgtccggaatcaccttacggaatgcggaaatcagcatattggaaagtaccagtaccactgttgtggaaagtcccatgccaagtccgttgattgcggaggatgtgacagcaagtgtcggacacataccaagcatcagaacgaaagtaggattttccttaatgagtccattatataaacgttctacattcttgttcattgattagttacctccttctaatacgctgtggaagtatgtaaggcaggcattcacaccgttcgccatcgccttggaagtaatggtggaaccggaaattgcctcgatctcattgtccgcagacggtgtcgacttcacaaccgtaaaggagtctacgttcttgccctcaaactggctgtagaacggctcttcctgtgctttcataccaagtcccggtgtctcggaaatacttgtgatggaataaccgttgaccgtaccgtcattctggatgccgacagagaatgtaatgctgccctggcttccgtccttcgccgttacggtaagcacatagccgagcggattgccggaagcgtcaagtgctgtgttgacagcctcgatatcgtcagaatatccattctgcgccataagatcttccgctgcagcggtgtcgaaatcagcgtactcctcaaaggaatccgcatcctcaaatacctgcttgtaagcggactgtgtcttctcataatttacctggtcgatcgggcctttggtaatgccgtagaccacgccgaggatcagacctaatacaacagtaaaagcaaataaaaccaatgcgtcatgtacaatcttcttgttcatttctatttgcctccttcctgcttcttcgcttccttcacctgaccgaatgccatcggcaccgtgtgcttctcaataagcggcacaaggatattgcttaagatgatggcgaaggaaacaccctctgcattcgcgccgaagcagcggaacaatccggtcaggataccgcagcagataccaaagatgatctgccccatcggtgtaatcggggatgtcacataatccgttgccatgaagaatgcgccgagcatcagaccgccgccgcaaagctgtgcggtaagatagctgccgtcaaatccatgaccgccgaataaaagcatgaatacagcaaatgtaataatgtaagatgccgggatgcgaaggttgatcacacccatcaggatcaggaaaatagctccgatcagaatagcgatcgcagatgtctcaccaatggtacctgcggtgcgtccgatcagcatatccatcgtattgaccgcctcaccgttacgcatggcagcaagcggtgttacgctggaatacacttcaataccgttctttgtgatgccaaactttgtcatatcagcagcaaatgcaatcaaaaggaagcatcttgcgcccagcgccgggttcatgaaattctgtcccagtccgccaaacagacattttacaaccacgattgcaaacacaccgccgattaccgcctcccaccacggaagggttgccggaaggttcaatgccagaagcagtcccgttacaacggcgctcaggtcatcgatcgtctgctttttatgtacaatcttattaaatacccactctgatgccacacagcttgcaatcgttaccagaatcagaaccaatgccttatatccgaaattgtaaattccgaacaggcttgtcggaagcaatgcaataatcacatacagcataatacggcttgtggtatctttggcacgaacgtgtggtgatgatgaaacatgatataaatcactcacgataatccacctctctcttcttgttttttgaattattttttgcgttttgcagcaagtacctgctttttcatcgtcttaatggactgtgcgagctgtctgcgtgcagggcatacaaaactgcagcttccgcactccacgcactcgagtccgtgccaggattcaaacgcctcagccagaccgttattggaaaacttggcaagtcttgacggaatcagctgctccgggcatgcttccacacagcggccgcagttgatacatgcggacggctccaccttggacacttcgtccttgcttaagcaaagcagtgaggaagatgtctttgtcgtgggaatatccaggctaaacattgcaaatcccatcatcggaccaccggaaataatcttctccggctgtgtcttaaatccgccggcagcctccaccagttctgcatagctggtaccgatgctgtataagaagttgcccgggttggcaatggcatcgcctgtaatcgtagaaatacgattggttaccggtctgccaagctttaccgcacggtaaacagcaatgatggtctccacattatccacgatacatcctgcatctgccggaagcatcttggaattgatggcgcggcctgtcactgcataaatgagctgacgctcaccaccctgcgggtacttggtctgtaaaggacagacctcaattctcggttcatccttgacaagctctgtcagcttttcaatacaatccggcttgttgtcctcgatgccgagaacacccttcgcatgatcgaacagctggagaatgatcttcattccaccgatcagctcttctggattttcgagcattctgcggtagtccgccgtcagatacggctcacactctgcgcagtttgcaattacatattcaatcttttccggctctttcggagacagcttcacatgtgtcgggaaacctgcaccgcccatgccgacaacgcctgcctcttttaccttattgacaatctcctccttggagagagccgtcacgtcttcacacggcgtgtactccacctcttcaaacgccccgtcgttctcaatgacgatggaattcaccatgtcaccgactgccacacggtgcggttcgattgcctttactgtaccggatgccgacgcatagatcggggatgacacaaagccacctgcctctgcgatcttctgtcctttcagcaccttgtcaccaaccgctaccaccggagtcgccggtgcaccgatatgctgtgacaacgggtataccagatcacccttaggtagaacttctacgatcggctgatcctttgccagttcctttccttcataaggatggacgccgcctttaaatgtcttagaacccatttctcgtgccccactttctcttatctatattatattctatgccaaaagtcatagaataccctcgtgtagattatagcacaatcactcggaaattgtagcaatttattgtattttttcacgaacctattgacaaagaattcacaatattttttccacatttatgttataatgtacgcgaagacaatgagcagtgccaaaatcgtatctggcaaaattacctgcttgcagtgtatattttggctggtacgattttgatagggcgaacgcccgcgagtccgggaagccgcaggctttccgggctggtactgcgactttccggacttttgccggagcgtacattgctatttgctgcgaacgcccgcgagtccgggaaatctatgcctttccagacctgcacagcggcaaaattggaactcttaccctaatattacatacagaggattttcagatgataacctggcatgaagaactgacttttgatttttcagaccccgtttccaacgaggtatttacagaaaactgcattttttttgatattgagacaaccggcttctcgccggcgcgcacggatctctacctgatcggctgcgccacaaggcgcggcagtcttttgtgcatcgaccagttcttttccgagaacgccgccgatcagaaaaatgtcctttccgcctttctggagctcttgtccggctatgataccattctgacgttcaacggtatcggcttcgacattccatacctgaaggcgaaatgcaaggcgctgcacctttccgatccgtttgatgcgcacagttatatcgatctttataaggaagtctcacgtttcaaatttctgtttgccctgaccagctacaagcagaaatccatcgaactgtttctcgggattgaccgcatcgacgcctactccggcggcgagctgatcgaagtctacaaagagtacgtgcggcatcccgcaaaggattcccttgcactgctgaaacagcacaactatgaggacgttctctatatgccgaagcttctgcccgtcctctcctacccaaaactctgggaacaggcattttctctgcagtcactccaggcgtccgagtaccggtcgatggacggtgcctccggcaacaaggagctgttttttacactggcgctgcagtaccccgttcccaaaccggtctccttctcctacgatgactgttatctctccatgagcggaagtaccgcccggctgcgtgtacgtctcttcgagggagaactgcgcttcttttatgacggcagtcccaaagattactactatctccctgcggaggatatcgcagttcacaagagtattgcatccgccgtcgacaaagaacaccgcgtgcaggcgaacgcttccaactgctacggcaaaaaatatgccatctttcttccgcagtatgacgccatgttttccccggtgttccgtgaacagccgcgcggcaggaaatgctattttgaattatccgcggactttgccgccgatcccgctatgcagatggactatgttctgcatctgttagaaaccatgcgttcccaccgcaaataaacacatggcagaaagccctgatataattaccaccaaaaacggcaggaaagaatctggcatatactgcacagcttctttcctgccgcttttttgctttatagaaaaatgcgtcctctgatataaccttacgccttctcaaagaaaaaggacttgtctctctcaaatccgatctcccggtaattcatgatctgctccgtgcttccgatgaaaagcacgccgcctgttgcaagcgccttatagaacttcgcataaatctcgtcctttgcctcctcggtaaaatagatcacaacgttccggcacacaatcagattgcatccgcctggatacggatcttttaaaagatcatgctccttgaattccacacgtttcttgatctcatccgagatctgatacgaattgccgaccttggtaaaatacttcttcttcaaatcatccggcacacttgcgatactcttctcattgtagagtcccatccgcgccgtatcgatcacctgcttgtcaatgtcggtcgcaatcaccttgatgtttgcaagcggcaggtgtctggacaatgccattaccagcgaatacggctcatctccggtcgagcaggcagcactccagattttcagattcttgccaaacttctgaatcagcttcgggaacacctcattctccagaatcttccactgatccggattgcggtaaaactccgacacattgatggtcaggaaattgataaactgttcaaacttctctttgtccttcttgatcagcgccacatactcatcatatgtcgcaatatgattcttcgtaatcagcgtgttgattctgcgccgcatctgcttttccttataagaattcagatcaatctttgcaagcgctaaaatatcctttttaaacttttcataattgtccgtttccagcatattttatccctcgactctctttgttatctacaggatgcaaatacagaaataggcttccaccaacgtgcaagcctatctgtaactctgcaatcatcgaaatcagagattactcctcttcctttgcaaccgcatcaatatctacatctgcaacatctgcatccgcatcttcttccggtgcgagcagtgccttcatagataaactgatcttcttctcttcctcgttgaaatcaacgatctttgcctcgatctcctgtccaacttttaatacgtcggacggcttctctacatgctccttggaaatctgggatacatgaaggagtgcatccacacccggtgcaagctcaacaaatgcgccgaagtctgtcattcttgcaactttgccctttacaacgttgccgattgcgaacttctctgctgcgccgttccacggattctctgccgggaacttcatgctgagtgcaatcttattctcattgatatctttgatgaatacgcgaacctgatcgcctaccttgaataccttctttgggctctctactctgccccaggacatctcggaaatatgaagcagaccgtctgctccgccaagatcaataaacgcaccgaaatctgttacattcttaactgttccctctaatacatcaccgatcttgattcttgcgaacagttctttctgctgctctaacttcttagcaaccagaagctgctttctgtcgccgatgattcttcttctcttcggattgaactcgctgataacgaactcgatctcctgatccttgtatttggaaagatccttctcgtaggtatctgatacaagacttgccggaataaatactcttgtctcatctacgtttacgcataatcctccatccagtacctgtgcaaccttagcggtcagcacttccttgttctcaaatgcttcctctaatctcttgcttcccttctcggcagccagacgcttgtatgtcagtaatacctgaccctcaccgtcatttacctttaaaacctttgcttccatggtgtcgccgacggataccaatgtggtaaggtctacgtttgcttcgtttgtgtattcattacgagtaatgattccgtctgccttgtagccgatattcagaacgatctcatcaggtttcacatcgataacggtaccctcaactacctctccatttcttattgttttaaatgattcttccagcatttgttcaaagctcatttctgacattcttttgaacctcctcaataatattgtttggggtagaagcccctgcggtaatacctacgttatcgacagacctgacttcggcaaggtcaagatcctttacagtttgtatatagtaagtatttttgcattcgtttttacatatttcaaatagcttctgcgtgttggaactgttcctgccaccgatcacaatcatggcatccacctgctccgcgattacccgggcttccgtctgacgttcctccgtagcattgcagattgtatttaaaacaattatatcataacctttttcttttataatttcaactaattcttgaaatttattgtaattaaatgtcgtttgtgatacaatacatacctttttcccatgggaagcatcgtatttttcggcctcttcgcgggttccgatcacgcgcgtatcctctgcattcgaccagcttttgatgcctttcacctccgggtggctggcattcccgacgatcacaatgtgacagtcctccccactgtagcgctccaccagccggtgaatctttaacacaaacgggcaggtcgcgtccacgatggaaaagccgagcgtctgtattttctcgcagacacctctctccacgccgtgtgcccggatgattaccgtcccctgcggcttccccgcaagttcgtccacatcgtttaccacgacgacgcccttttcctccagatcacgcaccacttcttcattgtggatgatcggtccgaacgtgtagagcggttctttttccagaatccgttcatataccgtatccacggcacgttttaccccgaagcagaagcccgcgctctttgccaagattacattcatattctctataccctcgcataaatctgatagattgcgtccaccacttcgtcgatgttcatctcggagctgtccactaacaccgcatccttggcctgctttaacggcgacgtctcccggtgcatatcgcggtaatcgcggtcttcaatatctttctcgatctcttccagattgcactgggttcccttggcggtcagttcatcatatctgcgctttgcgcgcgttgcaacgcttgccgtgagatatatttttacctgcgcatccggaagcacacaggtgccgatatcccttccgtccatgatgacgtccgtctttgtcgcaagctgccgctgcagttccacaagctttgtgcgcacaaccggatagacactggtcgctgatgccatattgccgacttcctccgtccgaatgacgccgtttacattctctccgtttaagagcacctgctgttcgccgttctcatacacaatcgtcacgtcaaccttcgggcaggctgccgcaatcgcctgctcatcatctggtgcaatgccgttctgtaaaaaatagtatgccatcgcacggtacattgctcccgtatccacatagacaaacgccagctttttcgccagttttttcgcaattgtgctcttcccggcgcctgccggtccgtcaatcgcaatattcatactcatctcttcttctctcctcttctattcgatactctcacccgccagatgcccggtcgaccaggcaatctgcagattaaatccgccggtcatcgcatccagatccaatagttccccgcagaaatacaatcccggcacaagctttgattccatcgtggaagggttcacttcctttacgctgacacccccgcgtgtgatgatcgcttcattgaaatctctgacaccgcagagcgtcagcggaaacgccttgatcagatgcacaaatcccatccgctcctctctcgtgatctcgttgaccttcttctccggatcaatcgctccggcttctaacatcaccggaatcatcttcgccgggaacagatgcacgacggcgtttttaaactgcttattctttgcctcctcgaattcacgcagaagtctcgcatccagctgttcctccgtgagtgccggctttaagtcgatctccatcgccagttccttctccacgcggcccggcttgattgccgcactggcgcttaaaatcagcggtccgcttaccccgaaatgggtaaagagcatctcgccgaattcgtcatacaacagcttttttccgtcccggatgcgcacctgcacatttttcagcgccagcccctgcatcctcgccgcgcaggtctccttcacgtagaacggaaccagtgacggcgtaatctgtgtcaccgtatgtccgagttccctcgcaaaacggtagccgtctccggtcgaaccggtcgtctgataagaaaatcctccggttgcaagaatcacgcgctctgcttcaagaacgcttccgtcggcaagcttcacgccgcgcaccgcgccttccccggtgaggatctgccgcacttccgcatgaagctgcaccataacacccgtgcgctttagtacccgctgtagcgtggcgatcacatccgaagaatgatccgataccgggaatacacggttgccgcgctctaccttcgtcgccagaccattctcctcaaaaaaatcaatcactctctgattgtcataatcgtaaaaagcgctgtacaaaaactttgggttcgtcatcacattggcaaacagggtgtccatatcccctgcattcgtgatgttgcaccgccctttgccggtgatgtagagctttttcccaagcttttcatttttctcgagcaaaacgacctcatgtccccgctccgccgccgcaatggcagcaaacattcccgccggcccgccgccgactacgatcaccttactcatacagttccgcatctcctacttttccataccgcatcttgatggaatcatcgatataattgatctcatcgttctcgtaaacctggtattcgtcccagatatcctctaacatctcaagcgttttcgccacctcgttctgctttttcatgcagagcgccacaatcagcgcattgatcaccgacagcggggcaaccagggaatccacaatggaagccatatcgctgtccgcaatcagattgcaggaagaatagaggttcatcggggaatgtacgctgtcggtgagtgtgattacctttgcgctccggttattcgcaaattccatcgcctttaaagtacgcatggaataacgcggaaaactgattccgatgatcacatcctccttgccgatgcgcaccatctgttcaaaaatctcgctcgaactgcttgtctgaatcagatgaacgttcggaaacatcagggtaaaataaaaagccatgaagctagcaagcggcgcacagctccggattccgatgatatagatatgtttggcgtgcaggatcgtgtcaaccgcgagttcaaatgcgttctgatcaatcttttccagtgtggaatgaatcttgtccgcatcggatttcagcaccgtctccataatcttcgactggctgatcctgccgtaagtaacctccatgcgctgaatggagttcagcttattgcgcaccagttcctccagcgcactctggaattccggataccccttatatcccagatgcgttgcaaagcgcaccaccgtggactcgctcacacctacaacctcgcccagctttgcagcggtcagaaataccgccttgtcataattgtccgtaatgtaggttgccagccgtttctgtcccttgctcagcttactgtaagcatcattgatgcggttactcaggtcatttgtattgctcatgcttctcctcacttctgcggaattgtgatccgctcaatgtttttattatatcaaatacatggtgttttgcaagaaattatgcatggaactttccttacatgcagcgcatttttctgccgctgcatataataaaccaacgacactcttccattgaggcagctatgcgcgatatcacaccagcaaccaattttattcatacactgatgcagtctccgccggatgcatccgcctggattgccggcggcaacaatttcccttccatctccgggcttgcccggttctatgccacagaatacgaaggaactctcgtggaggttgaagtcttcggtcttccgaacgtcgcggctcccggctccagtaatttttacggcatgcacatccacgaaaacggcgtgtgcgtctccccgtttaccagtgccggtgcccattacagccgtacgccggccgaacacccgaatcacagcggcgacatgcctccgcttctgggcaaccagggttatgcctggatggcattttatgacaagcgttttacgattccggaaattatcggaaaatccctcatcattcaccggatgccggataactttacaacgcagcccgcgggcgactccggcgaacggattgcctgcggtgtgataaaatagcaaaaagggcagcaaaaaaagcaggtgactgctcacccgctttttgttataactgttttttgattataccggatatgctccgttcttagtatctgcgacgcttgcatcgaccttcttctgctgtgcctcacggtacttgaagaattcggttgcaacctgcgggaacagtgcgtaggacagtacatcctcatcctgctgcttccactgcttcatctcagcctcgatcttatccagctccggctcaagcagatctgccggacggcaggtaatggcgttcttcttctcctcgccaagtaccttgtctacgatctccgggttgaacggttttacagtctgaccgtactttccaagcagtacgtctttggtctccttggttgccactttgtagcgctctcccatcagtacgttgaacacagcctgtgtaccaacgatctgtgaggacggtgtaacaagtggcggctcaccgaggtctttacgcacacgcggaacctctgcaagaacctcctcgaacttgtcttccttgccctgctcttttaactgggacagaaggttggataacataccacccggtacctgatataacagagtcttgatgttaacgccgagaaccttcgggttcatcagaccgctctctaacgcttcctcacgcatcggacggaagtagtcagcgatctcagctaacaggttctgatccagaccggtatcgaactctgtgcccttgaatgcctctaccataacctcggttgccggctggctggttcccatggagaacggagacattgctgtatcgataatgtcacaacctgcctcaaccgccttcatgtatgtcatggaagcgacaccggaagtatagtgtgtatggagctcgatcggaaggttggttgcagactttaatgcctgaatcagctcggttgccttcgtcggaaccaaaagacctgccatatccttgatacataaggaatcagcacccatatcctctaccttcttcgccatctccatccagtaatccagagtgtaggcatcgccaagtgtataggataatgcgacctgtgcatgtcctttctctttgttacatgcggtaacggctgtctgcaggttgcggacatcgtttaagcagtcgaaaatacgaatgatatcaataccgtttgcgatcgatttctgtacgaaatactctaccacatcatccgcatacggacgatatcctaagatgttctgtccacgaaacagcatctgaagcttggtgttcttaaatccgtctcttaacttgcggagacgatcccacggatcttctttcaggaaacgaaggcatgcatcgaaggtagcaccgccccagcactcaaccgcattgtatccgaccttatccatcttgtctacgatcggaagcatctgctcggttgtcattcttgtcgcaatcagggactggtgcgcatcacgcagcaccgtctctgttatttttaaaggttttttaacaacttctgacattttttcctccttatcagcggatactttgataccgctatccgtctatgacggcatttgctctttcactaaattccgaaaattgccatgaatacaccggctgctactgcagtaccgataacgccggcaacgttcggtcccatcgcatgcatcagcaggaagttcgtcgggtcttcctctgcaccgactttctgggatacacgggctgccataggaacggcagatacaccggcagatccgatcagaggattgatcttgccctttgtgaggaagcataacagcttaccaaacaggacaccggctgctgtaccgaacataaatgcaatcagtccaagtgcaacgatctttaatgtcgttgtatttaagaacgcctccgcactcgtagatgcacctacggaagtaccgagcaggataactacgatgtacatcaatgcgttggatgcggtatcggtcagctggcggaccacaccgctctcgcggaacaggttaccgagcatcagcataccaaccagcggcgctgtcgtcggaagaatcgtacatacaaccaccgtaaccacgatcgggaagagaatcttctccagcttggaaaccggtcttaagttctccatcttaatggcacgctcttttttggttgtaaacagcttcataattggcggctggatgatcggcacaagcgccatataggaatatgccgccacagcgatcggtcccatcagtcccgactgtcctaactttccggcaaggaaaatggaggtcggtccgtcggctccaccgataatggaaacagcagctgctgccttatcattaaagcccatcatgattgcaaggaagtacgctccgaaaataccgaactgagctgcagctccaagcaggaaactgatcgggtttgcgatcagcggtccgaaatctgtcatagcaccgactccaaggaaaatcagagacggtaagattgaccactcgtctaacacataaaagtagtggaataaaccacctacaccattgctcatctgctctgggtctgcgaaaatatccggatagatatttacaagcagcataccgaatgcgatcggaacaagaagcaatggctcaaaccccttcgcgatagccagatacaggaaaaagcatgcgacaatgatcatcacaaaatttccccaggtaaggttaaaaaaagcggtctgatgcaggaggttccccattgtctcactaaaatagctcattgtcttcctcctaaattagtttaatgttgcaagtaatgcgcccgcttctaccatatctccaacacttacgttgatacttgctaccgtaccgtcctgcgttgcaacgaccggagtctccatcttcatgatctcaagaaccatgatgctgtctcccttcttaacggcatcaccgacagacttctcaagtttgaatacctttcctgctgcgcctgcctcgatcttaacgctgcctgcgcctgctgcagcagccggctttgctgcaggtgctgccgccggtgctgctgcacgtctcggtgctgctgccggtgcgctcactgcgccgttctcttctacggttacatcatatacattgccgtttactgtaattgtatagcttttcattgaaatatcctcctaatatgatttcttttcatttatacgaattagcgtctgcggatcgatctcacaacgaaagaatccgcggatgcaccggtgcttgccgcaaccgctgcggaaataactgccacaagttcaagatcatcggtaagctgctcttcacgctgtccgatctgctctaccacagcgcctgcctctgcctcgttcttcttgcccttgccggccgccttgttctgtattacagagataaagcggaaacagtaaataataaggctgatcaggatcagaaccacgaatacggttcccattcccatcagggtatttaacgcagccttctccatcttctcacccagcgtatataccttgtccgcggatgcatcagtaagctccggctgctcggtctcgtaattgtatgtatagatgtaagaaacgatgacttcacgattctgatactctacatactgatctactgttaaggttttctgtgcctttgtgatattgaattctccaagtccctgatatgcgccgacatcacttgtcgcctcatcccaactctcgacaagtttcattgccgtatcgctgccgtaggactggatataggttctgttgtcgtccgtaagaccaaccagcgcggaaacttcctgttccatgctgctctgcagttcatcgtaagtcattccgaaatagtcaaccgttgtcggatctgttccgcatgctgcaagtcccagagccataaagcaaagacaaagtataagagataattttttcttcataaacttcacctttctattttgttccatgtttcttgtccggtgtatatgcacactttgtgtataacagttcaaacgcatctaccagatactttctcgtatctgccggatcaacgatcagatccacatagcctcttctggctgctgtcataacgctgccctgcagtgcatcatattcctttgccttctctgcaagctcatccgcagatgcatccgcgtacatgatctttactgcaagatccgcatccatcatgccgacctttgcgtccggccatgcatatacgaaatccgcaccgatagacttggaattcatagcaacataagcggtaccgtatgcctctcccgtgatcaggttcaccttcggacatgtagctcccgcaaatgcggaggtcagatgagcaagtgcctttgcaagacgcttttcagagcacttgcatgccttgtagcccttgacatttgtcagagtcagtaccggaatctcgaatgcgtcgcagaaagatacgaactctgctgccttctcacatccctttgcagaaagaacattgtcaaacttctcgctctctttgccctcttcgtcgtataccgttgtgcagtttgcaactgcgccgaccgtcataccgtttaacttgataaatccggtcaccatatctctggcatagcctgcctttgtctcgaagaatgtatggctgtccgaaatctcactgagaagatatctcggatcacccttcatggcatccatgctctcgcatgcacggttcaggtcatccgcacactcgtctgtgtagacatctccctcgttgttgagcggaagcatgccgaccagctcacggatgtctgcaaggatctcatcctctgttcccgtcgcgtcgatgcagccgttctcatctgcctggaatgccgcagatgatgtgtcgcacttctcgatgcggtttccgtcaattgcgttcggagaattcacaaacatctttcctttggattcttcgataaaagcaaaatcagaaagtgccggtaccactgccagtccaccgccgcagctgccgaatacggctgaaatctgcggaaccacgccggatgctgcaacttcttttgcatagatcagtccgaagccgtcaagcgcatctacagactcctgtaaacggactcccgcgcaatcgataaagccgatcaccggtgctcccatcttcatcgccatgtcatacactgcagcgatcttcttcgcatgcatctcgccgattgttccgtttaaaacagaagcgtcctggctgtaaatgaacaccagattgccgtcaatcaggccgtgtcctgtgatgactccgtcggaaggagtatccgttgctgcaagattaaaatctgtgcttcttgcggttacgagagaaccgatctcaatgaaactgttctcgtcgactaacctggtaatgcgctgcatagccaggctatcattgctactattcattctttttgccctccatctataaattgttgtccacatccatttgggatgtggcttcatagtgaatgatgtaaatccatgcgtctttgtataaaaattcaacaaattacgctatgttaaattataattgcttttctgcaatatttcaagtaaattgttaattttttgacgctttttgtttgtgttttttattcgatccagagaagccgaagcacctgccccagacaccacggataatcgatctttccgattgtctccccggctaccacacatcgctccgcgagcgtctcctcccccagcatataacgaatcttcccgatgtaatcgccgctcttcaccggtgcatacagctggtctgcaatctcatacttaagcgtaacctcactgcttagcggcgccaggatactctcctcccctgcatagttcctgacaaccggttttaaatacaccgtttcgccgatttgtccgccctgtccgtcccgcacctctatgggcgcaagctccgcttcgtccggctcaatctgcaacaggtcgatctttttgaactgctccaatccgtaattcatgagttttctggtgtcggaccacttataggtcttgttgttcggccatccgcaggcgagcagcgccacgatcagcgttttgtcctcccgctgcagcgctccgacatagcagtatccggcggttccggtaaatcccgtttttccggaaagcgccccttccatcatctgcaaaaatgcattgtggttcgtgcactggtacgtgcatttcccctctgcatcagaaaaagaatactgcgccgtccgtgtaatctcgagaaattcgtcgctttttaacgattccttaatacaatatttcataatcttagcaaggtctgccgccgtcgtgtgatgaaacccggcatcatccttcgcatccagtccgttcggtgtaataaagtagctgtcctcacagccgagttcctctgccttcgcattcatcagcgcggcaaatccctgcacctcccccgccgcaaattccgcgatggccaccgcacagtcattgtaggattccagcatcagaccatataaaagatccctcagataaaactgttgtccctcgtgcatccccagatgtaccttcggctgggacgccgcattttttgacaccgtaaccacgctcgccggatcacagttttccagtgccacgatacaggttaaaatctttgtcgtactcgcattcgccatcgcttcatgcccgtttttctcatagagaattcttccggaatccgcatccatcaaaacggcagattttgcgtacagttccgactctgccggcacatcctgcgcccggacacgcacaggcgaaaaaataagcaagctcatacttaacaatagagaaagaaagcgtcgatacatgccattctcccaaaatgacttcactgatgtatatgcgtccctcattttttgcagaacagaaacggtatgtaaaaaggaactgccgcaataagcatatcgtgctttgataagtaatattattagaaacacacttggggatttcatgtggaaatgcagatggaatattcgttggagaaaaatgtgagcatttcttccggctgaatgtttgcatcggattccgtgtctcttccacgtttggacaatccgacgggtgcatgtccgacacaccggagacaatgggcggactttctggtgtccctaagggcacctcttcgcagacaatataaaaccgcgcgaaccgaaactcgccggcatctgctattgaaaataaggcagatgccgactcagacatcggcttcgcgcggttatgttttgcttagaggtgccataagggacacacacaaaagtcctacaaattgtcttccgggatgcggacatgacccgcggagt

SEQ ID NO: 11615 - DNA, 18581 bp, Unknown
  gut microbiota DNA sequence
ttggttagaaatgccacattttttgaaccgaatttccacctgcatttccatctgaaatcccacggtgtggtcttctgataatattacttatcacccaaagcggtctatgcttgttgcggcaattccttattatccgtctctcacagatttgcaccaggatttcttttatgttctatatatcaagcttcatatgcatctcggcttccgcctcctgcttaaattcctccacctgcaccggatttaataccgggagttcgtcgattgactgtaccccaaagcttcgtaggaactcttccgtcgttccgaagagcagcgggcgccccggtgcatccagtctgccaagctcgcataccagattgtattccaccagcttgttcaccgcgtgatcgcaggaaacaccgcggatcttctcgatctccaccttggtgatcggctgcttataggcgatgatggacagcgtctccagaagaacatccgtcaggacatggcgctttggctgtctcgcaatcttgatcagatattcgtacatctcgcttttggtgcacatctgatacgcatcgtccagctcaataatcttcacaccgatggacggattctcgtagtgcttcatcatcttctcaatgatcgcttttgtctcttttttatccagttctatggctgcggcgatcttgtccagctctaccgattctcccatcgtaaagaggatcgcctcaatgatcgcctcgtaattcttttcattcatcccgaaaactccaactctatgccacaatctttgactgaatcagaatatcatcaaaggtgtgttcctgtgatataaatatcttgcctgtcttcatcagttccagaatggcgagaaacgtgacaatgatctccatcttgcccgcctgtgcctcaaggagactgcggaaactgaaccggctgtgcgtcaggcagtaattctccagatatgccatcttgtccgaaagcgatacctcttccttctcaatcttgccgaacttggaacggatcggatcaatcttgtccacctgctttttcatgatggacttaaaaatctcattcaatctggcaagcgttacatccgagacgagctcctccatgttgaccggctcctcatactctgccacctccggcggaatggtcggctccttaaaaaggacacgctccgcatccatctggcggtcacgcagctcgtatgccatacatttgtacatcttgtactccaaaagctgctgtaccagttccgcacgcggatcctcttcttcctcgtcctccgtctccggagccggaagaagcatgcgggatttgatgtcaatgagtgtcgccgccatgacaagaaattcgcttaccacattcagatcctgacgcttcatctctgcgatgtattccatatactgattcgtgatctccacaatcggaatatcatagatatttactttattcttctcgagcaagtgcaaaagcagatctaaaggtccctcaaatacctgcagttttacggtcatttccatctgattctcttatcctctccggcggcagaacctctctgccacatcttcaacgtatcaattttacattgtttcctcgaaaaattcaaggttttttcctatatttagtattttcgcacaatcttctctactataattagtgtttcaaatgagagtttcccgcgggatgccaatttctttttgtgcacgctgcataatgtacaggttcttcctctacaatagtaacaaaaagaatcctggagaataccttgaagcagtttctttcttttctgttatgctgcaccctcactctctcttctcccgttcttgcggcggaaaacagcgaagccgacctttccgtctcggcgccgagcgttcttctgatggaggcgtccaccggaactgtggtctacgaaaaaaacgcacatgaaatccggcatcccgcaagtatcacaaaaatcatgaccctgattctcattttcgatgccatagagcgcggacagatctccctgaccgacacggtgaccgtgtcggaatacgctgcaagcatgggcggctcacaggtgttcttagagcctggggagacccagaccgtagagaccatgatcaaatgtatcagcgttgcgagcgccaacgatgcctgcgtcgccatggcggaatatctctgcggttccgaatccgaattcgtccgtcagatgaacgagcgtgccagagggctcggcatgaaagacaccacctttgtcaactgctgtggtctcgatacggaagggcacatgacaagcgcctacgacgtcgcccttatgtcccgcgaactcaccgtaaaccatcccgaaatccacaactactgcaccatctggatggaaaacatcacccatgtcacggcaaagggaagttcggaattcggtctgaccaacaccaacaaactcatccggcagtatgagtatgccaccggattaaagaccggttccaccagtctcgccaaatactgcgtgtctgccaccgcagaaaaagacggtctggaactgatcgccgtcgtcatggcagcgcccgattacaaagtgcgctttgcagatgccaccacgcttttaaattacggattcggaaaatgccgcctgtacacggatgaaaacacggacgctctgcccgatcttcctgtgacaaagggcaccgaaaccgccgtcggtctcgcctacgactctcccttctcctacctgtctgtaaaaggcgaggacctctctgatgtaaaaaaagagcagattctccccgagacggtcacagcacctgtcagaaagggtgacgtggccggcagggttgtctactccgcaggcggcagggaactcggctccgtgaatatccgttacactgcggatgttcacgccgcctcataccgcgattatttcaagatggcgcttttctatcttctgacctgacttttttctattataatagcggtgccagcaggcgcagcacactctgcagaagccgtaccggtaccggccggtttctgcagaactctgccgtcatctgctctgagcacgcaaacgtattcaggcagtcttcctttacctgtgccacaaccgcggagcggtagaagaaaacgccgcactcgaaatgcagatacaggctgcggaagtcaagattcacgctgcccaccgttgcgatctcatcgtcacagacaaaacattttgcgtgaataaatcccggcgtgtactgataaatttttaccccgctttgtatgagcggtgcatagtaggactgcgtgagcaggaaaatcatcttcttgtccggaatccccggcgtcacaatccgcacgtccacaccgtccttcgccgcgttgcagagcgccgtcagcatctcatggtcaatgatcagatacggtgtgaagatatagacgtaattctttgccctgtttatgatattcaggtaaatattttcgcccacattctcatgatccagagggctgtcaccgtacggctgcacgaacccgtcattctcaaagggtgctttctgatgctgtgccggcataaaccggctgtaatcttccgtggaatggacgatgtaattccacatggacaaaaacatgctggtcagactccagaccgcctcgccctcgatgcgcacgccggtgtccttccagtagccgaaccgttttacctcattgatatattcatctgccagattgatcccgcccgtaaaaccgaccgcgccgtccaccacaaaaatcttccggtgatcccggttgttcatgattaccgagagcaacggccggaacggattaaaggcagcgcacttgatgccctttttctgaagctgcttataataccgcggcggcagtgtgccgatgcagccgacatcatcgtagatcaggcgtacctccacgccctctttgacctttttctccaggatatcctcgatctggtggaacatatgtccctcctcgatgatgaaatactccagaaaaataaagtgttccgcgctctccaacgctgcaagcatatccgggaacatcgcctccccgctctcataatactttgtggcggtattccggtagaccggaaaatgtccccagtccgcaatatattttgactgtcgtaagaccgatggatccgcctcctgcagcagccggaccgcctcctcgtctaccggcatgcaggcatccactttccggttcacggcatccatctgttctctggtgtgcttcgtcagaccggagcgtccaaacaggaaatacaacatgattccaaggatcggcgacaacagaatcagaaacgtccaggaaagtttattcgccggattctcccacttgttcgcaatcacaagcaccagaacaatcgccgcagcgcggattatcaggttcgcataggtgaactgatagctgaatttccacagcaccagaaacagccagcagatctgcagcaatatcgaaaccccgacaatggtcaatcttcccatcagaaggtgtgcaatcttcttcataagtctcctccctttcaaaaccgtatcctttatcttacgttttttcatataaaatgtcaaccgccggtcacgtcccctccccttcccttcctttccgtcttgcagcattctattttcttcagcctcccgctcctcttcagcctctcaccagatggtcgacatgaatcattccccagcattttctgccaagctgctctccccgcggatacgctctctcgtacaggcgcagcttcatctccgccggcgacagatacggatacttctgaaatgcaagcgccagtgcacccgtgacaaccggcgccgccatggaagtcccgctctttacccggtatccgtttttttccctgccgcagcttttaatcgccgtgcccggagccaggatttccggctttacaatacagcatgccgtcggaccgttgctgctgtaccccgtcttaagcccccgcttccccggctcgctctttccgtcgtcactgcttccaatcgttacaatctttcttgagattccgggaatggtcaccgaattttccttagggccgttatttccggctgccgcgacaaccatgatccccctgtcccagagatcgtccaccgcgctaagaagttcctgctgttcccgctctcccgcgcttggaagcattccaacggaaatattcaacaggcggatctgatattcctgctggttctttgcaatccactccattcccgccagaacatccctggtatttccgttccccttggcgtctagcacctttaacatcacgatatccgcctgcggtgcaatgccgtggcaaaccggcatcccgtattcttttctcgatgcctcgccactgcccgccacgattccggacacatgtgtgccgtgaccgttgtcgtcgtacagtcccgtctttccttcacagaaatctccaaaatatcggatcctgttcccgaaatccacatgcggaacaattccggtatccataatcgccacggttacatttttcccgctcaaacctgttttatatgcataatccgtatggatgatttttctgacccgattcataaaaaatgccttttcttatagcttatgcaaagccatagaaaaggcacttcatttctgttatgcaattaccggtgcatgactgctttatgcttccgccggaacatctttgatggagaagctgattcttcccatcttatccttgccaaggcataccaccttcaccttatcgccaagggtcagtacatcctccacatggttgatgcgctcctttgcgatcttgctgatgtgaaccatgccttctttacccggtgcaaactctaagaatgcgccgaactccttgatgctcactaccgttccggtaaggatctgtccctccttgaaatcggtcgtgataatccggatcatctcgatggccttatccatcatctccgcttccgtaccgcatacggatacggaaccgtcatctgtgatgtcgatcttcacgccggtgcgggcaatgatctcattgatcgtcttgcctctctgtccaaccacatcgccgatcttctccggatcaatctggatctggacaatcttcggtgcatactcgctcacctgcttgcgcggctctgcgattgccttggacattacctcatccataatgtagattctcgcctctcttgttcttgcgatggcttcctctacgatcggtctggtcagaccatgaatcttgatatccatctggatggcggtgatacccttgtgcgtaccggttaccttgaagtccatatctccgaagaagtcctcgagaccctggatatctgtcagaacaatgtaatcgtcatcggtatctccggtcacaagaccgcaggaaatacctgccaccatagccttgagcggtactccggcagccattaaggacatgcaggacgcacaggtcgacgccatggaagtagatccgttcgactcgaatgtctcggacactgcacggatggcatacgggaattcctcctcggaaggaagcactgccataagtgccttctcagcgagcgcaccgtgaccgatctcacggcgtcccggtccgcgggataccttggtctcgcctaccgaatatgccgggaaattgtactgatggatgtatctcttcgtcgtaatattctcatccagtccgtcgatcttctgaacctcggagagcggtgcaagtgtcaccacatcgcagatctgtgtctgtccacgtgtaaacatcgcagagccgtgtactctcgggatcagatccacctctgctgccagcggacggatctggttgatggcacgtccatccggacgtttatgatcctttaagatcatcttgcggacagtcttcttctgatactggtaaactgcctcgcccagaacagcaagccactcctcattgtctgcgaaagcctctgccagcttgtccgtaatctcgcggatattctcctcacgctgctgcttctcgtctgtgaatacagcctcctccatctgtgccggaggaaccagttccttgattgccgcaaacatctcatccggaattgcgcagcttgtatactcatgcttcggcttgccaacctcttccacgatcttattgacaaacgcgatgatcgtctggtttacatcatggcacttgtagatcgcctcgatcatcttgtcctccgggatctcattggcgcctgcctcgatcatgatcaccttctctgctgtggatgccacggtcagctgcagatcacccttgtcccactccttctgggaaggattcacgatgaactctccgtccaccatacccatctgcgtcgttgcacacggacctgcaaacgggatatcggaaattgtggtaaccagtgcggaaccaatcatggcaacgatctccggacggcatgccggatctacagacattaccatgttgttgatcgtcacgtcgttgcggtaatccttcgggaataacggacgcatcgggcggtcgatcacgcgggaggttaagattgcattctcggatgccttaccctctctcttgttgaatcctcccgggatcttgccaaccgaatacatcttctcctcgtattctacggaaagcgggaagaaatcaatgccgtcacgcggcttgtccgatgccgtcacggtagaaagcacggtcgtctctccatattttaataaagctgctccatttgcctgtgcgcagactcttccgatatcaacggtaagtgttctgcctgcaagttccatcgaaaaacttttgtacatgcgaattctccttttctgattctctttcattctcttcttcggttctgccggaaggatcccgcaaaaccactctgcagaagcaccgaaactactgaaatacatacactgcacgtatctatatttcagtggtctcggggatacgcttctgtcagattgccatgctgcacggaagtgcctccatacagtaaaaatagagcggggaagctctccgctctattgataagcgggcatgtctgcccgctttggacatcttattttctgagacctaaacgctcgattaaagcacgatatctctcgatatctactttctttaagtaagcaagtaaaccacgtctctgaccaaccatctttaaaagacctcttctggagtgatgatcgttcgggttctcctttaagtgagcggtaagctcctcgatacgtgctgtcaaaagagcaacctgtacctccggtgaacctgtgtcattcggtgttcttccatactctgcgataatgttctgcttcttgtcctttgcgatcatgttctgatcctccttataatattctgtttggatggcttctgccataccgggcccttttggcccatcgcccgactgtgtatgatactcagtaaaaggttggagtgtccatttaccgaatatgggctgaactcatactctcgcattatagcatagctgcatacgcttgtaaacaactttttaattattgatcacacgcacaactttgaccggcgtacggtaataggcaccggaaatcttgatgccggacttcggtgaacttgcatgtaccacctgtccgttgccgatgtagattgccacgtggttgatgcggcttccgtttccgtagaagaacagatctcccggctgtgcctcagaggccgaaatcttcgttccacaattcgactgcgcgccggaagaatgcggaagggaaatgccgtagttggcaaatacgctcatgacaaaaccggagcagtccgcacctctggtcagacttgtgccaccccatacatacggattgccgacaaactgtgtcgcatactgcaccagcgatacacgcacatccgaaacaccctgtccataccggatctcagtcatggtcatcgcctttaaaagctctgtcgagatctctacataatcggaagagacatatccctcatcactgtcgacgttgatcttcacccatccgtcaagcacctcgagcacctcgagttcctcgccctgcggcatcattgtgacaatcgcgcagtcggtgttcggctgctctctgacgtaaagggttgtcgtcgtcacggtggcaagcgtctgctttacctcatccgctctggcaagcgccgcatctccggtcagaagatactccgactttacataaccttccacggaaccggacttaatctgtgtccattcgccttccacgccgaggatctcacatcctgcgttgttcggcatcttgcccacgacatctgcatcagtgcctgccgctgcacggacgttgagattgccctcaacattcgccacaccgagattggtatatccgtaagcgctcgccgcctgctgtgcggcatcctgctctgtactctctgtctgctcctctgtgctctccgtctctgtaagttcgtcctgcgcctgtgaggccgcggctgctgcatctgcaagctctgccgatactccggcagcggcagaagacgtcgatgcatccacatccacacccgcctctgctgattcggtgccctcttcaaccgcttcctgtccctgtgccgttcttgcaatgtccattccggaaacaccggccacgcccatcgccgcgtcactgagacttccggacagtgcgctggtaacaccggacgccacggttgcactggtatccgcatctgtattctttgacttctgatctattgccgctgtggaaaccaccagagttcccgccaggaccaaacctgcgattctcgctaatcgtgctttcatatgactctccattcttgcgccgtctcctgcgcaattctagtttgtgctcatttttaaatctaacgtccagtatagcaacgattttttacgatgtcaacatatttttgtaacatttatgtaataattattacgaggtgtgtttttcaaaataggcacggccataggcaacatcgttctgcatctgctctttgagcgcctcaatcgatgcaaatttccgctcgctgcggactctgcttaagaactccaccgtcaccatcttatcgtagacatcttccgcgaaatccagcagatgtgtctccaccccgacaggatactctccctcaatcgtaggcttgcaccccacgttgctgatgccgcggtaccaccggtctccgatgtatgcctccgtcacgtagacaccgttcggcggcagcagcttctccttcggcggcagctggttgatggtcggaatcccgatcgttcttccgatctggttgccgtgcaggactctgctggtcacaaagtaacggtatcccagaagatgatttgccttctcgatattcccggctgcgatctcttccctcacgaacgtgctgctgatgtcccggctgtcttcttttattttctccacaacgatcacttcgtatccgtattttccggcatactgccgcagcatatggtaatcgcccctgcggttatgtccgaaatgaaagtcttcccccacaaccatgcactttacatgaagctgccgcacaatcttagcgatgaaatcctccggctccatgcacatgatctcctgcgtaaacgggcactccaccacataatcaatccccaggtgctcaaacatgtgccttttttcctcattcgtggtcagcaccttcgcctccacattctgcacatttctgcgaggtggaatgtcgaaggtaaaaatcgctcccgcgagaccttcgtcctttttctttgcaaaatactgcagcagctgctcatgccccctgtgaatcccgtcaaacttgccgagagaaagtaccgtattctcttctatataaaaatccgttgtgttcctgatatatttcatgatctacttaaacacctttaatggtttatagtcttccttttccgcctgatattcataaatgccgaaaaatgcgccttcatcgtcgtagacgcggaccggcgccattctcatactctcatgttcctccaaaaacatctccgggcgcagccggtttccgttatataaatatttgcggaactgtccgtccaccgtcgcgctctcatattttagaaagacggtatccaccgcctgaaggaacggaagctgcagttcttctgtctccgtcgcatccgacctgtgtgcaatcacgtacgcctccacctcggacagctttatggcgtccgcaagcgcgaactctccgactctcgtgcggagcagcgattccatgcacgcaccgcagccgagcacctcccccacatcctggcagagcgtgcggatatacgttcccttggaacaacagacacgcatcctgacacgcggcagttcgatcgaaaggatctcgatggaaaaaatatgaaccggacgcgccgcacgttccacggtcacgccggcccgtgccagatcacacagcttcctgccgtcaacctttaaggcagaatacatcggcggcacctgcatataatcacctacaaacgagagaaccgctttttccacttcctttgcactgcagcgcacctcctgctgcgtcagggtctcgcccgtcacatcctgcgtgtccgtcgttcttccaagcagcatgacagcctcgtattccttcgtcttgtccgtcagcagttcgcagatcttcgtcgccttgccgatacacaccgggagcaccccctccgcatccggatccagcgttcccgtgtgtccgatctttctggtctttaagatcccccgaagcttagccacgacgtcaaacgaggtaaatcccttttccttatagatattgataattccattcatcatactgcttttttctcactttatctgttctgccagatccgaaataatctgttcgatgatggcatccgcatcgccagtcatggaaaatccggctgcccggatgtgtccgccaccgccgtactttaccgccaccttcgagacatccaccacttccctggatctggtgctcgccttaaacgtgccgtctcccgtctcatacaaaaagactgccacttccacatccttggtcacgcggagctgattcacaatgccgtccagatgctttggcagcacgtcatactgcgtcatctcctcctccgtgatcacgctggaaatacattttccgttcaggtgcagcctgctctttaacagtgcaagccccataatgcggttctggttgtatgtctttgtgtagaaggtatcatccacaatcttcggataattgatcccgcactccatcagcgctccggcgatctccatcgtctttctcgacgtacacgaatactggaagacgccggtatcatgtaccattccggtataaatgcactcggcaatctcctttgtgatgcgctcctttggaagcagttcatagacaagctccgacgcggaacttgcctgcgggaaaatgtagttgtcctgtgcaaagctctggttgctgatgtggtgatccacacagacggtatgcttcgcctgctcaaagaaatgcgccgcaccgcccagacgtcccgtatccccgcagtcctgcgcgataaacagatcgtataccgtatccccggaaaaatcggagacgatctcattggagcgcgccataaatttgaaaatattgggaatcggctccagataaaccgtcacatcaatgtcgggataccatgttttaatgtaattataagtagcaaggcaggagcccacacagtcaccatcgggacggatgtgtccgccgatggcaaccgtatgaacctctgccagaaaatcatcaaaattcgtcattcttctgtttcctcttccgcctcatccgcccgatcaggaatatcctttgtcacatcgtcaatcatcttggacatgcgcacaccgtactcgatggactgatccagcacaaatgtgatctccggcgtattcctaaggttgatgctgtgggcaagctgcctgcgaatgtacccctccgcacttctaagacctgcgagcgttgccttctgggattcctcatccccgagcacgctgatataagccttgcacgttttcagatccggtgcaacctccacggtgaccacgctggtcatcggattgatccgcgggtccttgatctccccgcggatgatattcgacaactcgcgcagcacttccccgttgatccgggtatttttaatactgttttttctcaatttctagctccttccatacacgcaaaacgtctgttaacgcggtacctccaccatcgtgtatgcctcaacgatatcaagctctgcaatgtcattaaagccttcaaagacaagaccgcactcgtatccggcttttacttccttcacatcgtccttgaaacgctttaaggatgccagattgccctcgaagatctgctctccggcgcgggaaatacgaaccttgcagcctctctggaacacaccgtcaagcacataggaacctgcgatatttccgattccggatgccttgaagatctgacgcacctccgcatgaccgagcaccttctcctcgaagatcgggtcgagcattcccttcattgccgcctctacatcctcgatagcattgtagatgaccttgtagagccgcatatcgacgttctccttgtccgctgttgtcttcgccatcgggtccggacgaacgttgaatccgatgatgatcgcattggatgcggatgcaaggctgacatcggactcgttgatggcaccgacaccgccgtgaattacttttactactacctcttcgttggacagtttctccagactctgctttacagcctccacagaaccctgtacatctgccttaacaataatatccagttccttgacgttaccggactgaatctgcgagaacagatcatccagcgacatcttcgccttggtatcttcgatcagacggttcttgccttcggaaatataggtctcggcaaatgctcttgcctccttctccgtatccatggcaacgaatgtctcgcctgcctccggtaccgatgaaagtccgagaatctccaccggtgttgacggtcccgcttccttgactcttcttccctggtcgtcaatcattgcacgcactttgccgtagcagcttccgcatgcaatcggctgaccaacctttaaggtacccttctgtaccagaacggtggcaactgcaccgcgtcccttatccagacgagcctcaatgacaaggcctctcgcattacgcttcggatttgcctttaactcaagtacctctgcggtcagaaggatcatctccaaaaggttctcgataccttccttagtatgtgcagataccggacaaaataccgtgcttccgccccaatcttccggaatcagttcgtactcggacagctcctgctttacgcgctcaatattggcactcggcttatcaatcttattgatggcaacgataatctcaactcccgccgcctttgcatggttgattgcttcgatcgtctgcggcatgacaccgtcatctgcagcgactaccagaatcgcaatatcggtggaatttgctccacgcatacgcattgccgtgaatgcctcatgtcccggtgtatccaggaatgtgatgttctgaccgttgatcgaaacaacagatgcaccgatatgctgtgtgataccgcctgcctctttgtctgtcacacgggtggagcggatcgcatccagcagggatgtcttaccatgatcgacatgacccatgacgcagacaaccggcggacgtgccacaagtgtctcttccggatcgtcttcttcttttaagagttctgcgatcacatcgatcttctcttccggctcacagatgcagttgaactcaagcgcgatctcctccgccgtctcatagtccacttcctggttcaccgttaccatcgtgcctttcatgaaaagcttcttcacgatcacggacggctgcactttcatcttatcggcaagctctttgatcgtcagcttctccggcagaacgagtgtcttaatcacatcctcttcctgcttcggctgcggctgctggttcggcttcttcttgccgccgttcttctccagatttacgaagcgctcctgcttcttgccgccaagtgcatcataatcgtttctctgtctgtcgttcttgttgcggtctttctcgcgctctctggactccttgccgcgcagttcctctgtggatgctgcggtctccttgttcatacggtcgatctcacgatccagtctgccggacgggttgccaccgcggtaaccattgccgccacggcctccgtttctgtctccctgaccaccgtttgcgccaggtcttcctccgccgtacggtcttcctccgccattattgccgccgcggttgccgtatccattctgtcccggtcttctgtcgcggtctccctgcgggcgacgatccccgttcatcggacggcggtctccgtttgctcccggtcttctgtcgcggtctccctgcggacgacggtccccgttcatcggacggcggtcacggtctccctgcgggcgtgcctgcggattctgtgcatatacgttctcatacacattctcgtatacattttcacggcgttccggctgctttgctgctgtctcctgcggctttttctccggcgctgccgttctggccgcctttgcgcgctccgctgcctgacgctctgcctcctcggctgcctttgcagcctccgggttgattgcgcgctcaaatgctctcttgacatcaaagctgtttgccggtcttgcctgacgctgctccggtctgcctccctgtgggcggcggtctccattcatcggacgacggtctccgttcatcggacggcggtcacggtctccccgcgggcggcgtccgcctccctgcttgctgtactgcggattaaataccgcggtaatgctggacttcttctttggacgctccggtctgccctccgcgttctcagcagccttcggtgccgcttccgccttcggtgccgcttccgccttcggtgctgcttccttcttcggcgctgcctccgccttcggcgctgtctccgtctttggtgctgcctttttctggaacttgtcgcgcaccattttctgcacatcatcctcaatgctgctgctgtgcgactttaccgcatgctccgtcgtacttaaaaattcaataatctgtttgttttctattcctaactcttttgcaagttcatgaactctcatttttgccatatatcctgtttcctccattattcagttgttaacgtcagtttcaatttatcttcgatcgaatgggccagcccttcgtttgtcactgcaagcgatgcacggaattcctttccaatgaaatgtcccaatgtctctttttctccgtacacatacatcggaacttcataaaaagtcgtcatatcccggaaatgcttctgtgtattctcagacgcatccgacgcgacaatgacaagccatgccctgccatccttcaccgctttttctgtggaaaactctccgcttgccacaccgcccgccttggctgcaatgccaagcatcgacaacactttatctggtttcaaacttctccatctcctttgtcagtgtatcatagacttcctttggaattggcatttttaatgatcgttccagacccttgttttttattgccgcgcgcaggcactcactgttcggacacacataagcgcctctgccgtttttccgccccgtagcatcaagtacaatctgtgaggaggcctcatcttccgccgccgtcttgattacccggatcatatcttttttcggcttaagctctctgcaccccacgcactggcgcattggaatctttttgtttgccattctctgatcaacccctgcctactcttcttcattctctgtgtctgtctcatccgcaagttcggattcctcagcgtattctccctcggcatccgcatcctcagcatatctgtccccggcatactcgccgtcttcggtatattcgccgtcctctgcgtactcgtcatcctcgtaatactcgtcgtcctcgtactcgctctcataatccatgaagtcgccggactctctggcctgtgtctcgctcttgatgtcgatcttaaagccggtaagtcttgccgcaagtctcgcattctgtccttccttgccgatcgccagggaaagctgataatccggaacgatgactttcgccgacttctcctccgcatccgcgataacagaaataacctttgccgggctcaatgcgttctcgatcatcattgccggattctcattccaggtaatgatgtcaatcttctcaccgcgcagttcgttgacgatcgcattgactctcgcaccgttcataccgacacatgcgcccaccggatccacatccggatcattggaccagacggcaatcttggttctgcttcctgcctcccgcgcgatcgctttaatctcaacgattccctctctcacctcggtcacttcagactcgaacaggcgctttaccagctccggatgggttcttgacacgagaatcttcggtcccttggacgtatccttcacctccaggatatagaccttgatgcgctcggtcggctggaatacctcgcctctcacctgctcgttctcggtcaggatcgcatccaccttgccaaggttgacgctcacatttcttccgatgtaacgctgtaccacaccggtcacaacatccttttccatgctgtaatactggttgtataaaaccttgcgctcctcttcacggatcttctgtaagatgacattcttggcattctgtgttgcgatgcgtccgaactccttggactggatctcgacattcacgatatctccgatctcgtatttggaatccaccatcttggcattgacaaggctgatctgctctaccggatcctccacctgctctactacggtcttctcctggaacacatgatactcacaggtctgcgggtccatcgtcacctttacattctcggatgtaccgaaatggttcttgcaggcggtcaccagtgaattctcgattgcctcaagcagtgtctccttgctgatattcttctcacgttccagtatattcaatgcttctaataactcattattactactcattttattatcctcctgtttccttagtggttattagcatatattttatcaaaaatcgaatgccagacggatcagcgagatatccggcttctcaaacgtcattttctctccgttttctgtctctattgtcacagtactttcatcatatgcagataaaataccataaaattccttttcccggttgattgcacggtaagtgcggatctcaatctcctttcccatgctccggacataatctttttctttcttgagcggtctgccaagtcccggggaacttacctcgaacacgtaggaatcttccacgaagtcctcgcggtcaagaatctcattcatctctctcgccactgcctcgcagtcgttgacggtgatcccgccctccttgtcgatgtaggctctcagataccaggttccgccttcttttacatactccacatccacgagttcaaaatgcatgcgctctaagatcggagtaatcagttcttcggtgcgcgcttcgtatgtttcacgctttgacatgtgtacaccttctttctccatattcaattttaattgtaacaaactgcccacccggcctttacacagactttacagggcataaacgtgaattgagagagggctttcgtcctctctcaatcaagtcatcgtgttatcatatattaaagtagcacttttttatgggaaatgcaagctttttctcgaaaatacaggctttttaaaaatgtcaacattaaattcgac

SEQ ID NO: 11616 - DNA, 2436 bp, Unknown
  gut microbiota DNA sequence
aatatactcttccagatacagagcagggattgcctgctattaagaatccatactcatttcgtttaagagagtcgttttcatatcgtagagcttctgggagaggtcgacgtagatctcctgcgggttgacgaaacgcttggtctcatcccagatggtgtctttttcatggttacagatttcacggatctccatgacgcccggcgaggtgtagatggtttttccggcctttattaccggaatcagcatctcacgcaacgtgtagcttcctcccgggagtctcgtctttttccagggagcgttcggatcaaacagctttaagtcttcgctctcgtcgaatgtctcatcgtacaggcagatgagatcggccttgatcttgccggtttttttgtcatagacgcggtaaaatgtcttgttgcccgggttcgtgactttttccacattctcggataacttgatcttcggctggaaacttccgtctgcggtacggatggcggcaagcttgtagacaccgccgaaggcagggttgtccttcgaggtaatcagatttgtgccgacaccccaggaactgatggttgcgccctgcagttttaagctttcgatcaggtattcgtcaaggtcgttggaagcggagatcacggcgtccggaaaaccggcttcgtccaacattttgcgcacctgcttggagaggtaggcgaggtcgccgctgtccatgcggattccgtaataagtcagcgggataccggcatcgcgcatctcggtgaagacacggatggcattcggaataccggattttaacgtgtcgtaggtatccacgagcagaatacatgcggacgggtagagctcggcgtatttgcggaacgcagtgtactcatccggaaaactcatgatccagctgtgggcgtgcgtgccgagtaccggcacatggaacatctgaccggcgagaacattggaagtgccgttgcagccgccgattacggcagctctggcaccgtaggtaccggaatccggaccctgtgcgcgccgtaaaccaaactccatgacattatcgcccttggccgcgtaacagacgcgggcggccttggtcgcgatcagacactggtggttgacgatatttaagatggcagtctcgattaactgtgcttccatgatgggagcgacaacttttaccagaggctctcgcgggaagatcaggctgccttccgggacggcgtagatgtcgccggaaaatttgaaattgctcagatattccagaaaatcttcgtcaaatattttcagactgcgaagatagttgatgtcgtccgtatcgaaatgtagattctcgatgtagtcgatgacctgcgctaaacctgcgcagacggagtaaccgccgtcgcagggattgttgcggtagaaggcgtcaaagacgacaacatcctgattatgatttttaaaatatccctgcatcatggtcagctcatagagatctgtgagcagggtaagattcaatgtactcatgtgtgtctggaaccggagttccgctcctttcctgttttgagattggaactattataacataatcgttgagaaaatgtaggaaaagttatatagttaaggtattctggaagaaatgtgaggcagtgaatgggatgagaagagagcgtgcgatggcactatttgaagaaggatataattgtgcgcagtcggtatttctggcgttttcggatttacatggaatggatacgcacatggcggcggcactcagctcgtctttcggcggtggaatgggaagactgcgcgaggtgtgcggagcggtcagcgggatgtttctggtggcaggcatattatacggctatgacgacccgggtgcccgggaggaaaaagcggcacactatgcgagaatccaggaactggcgaaggcgtttgaggagaaaaacggttcgattgtctgtcgggagctgcttggcttatcggtaaagcgggaagaaccgacgccgaaggaacggactgccgagtattataaaaagcgcccctgcaaggaacttgtcggggatgccgctgagatattggaaaagtatattgcagaacatccggtggatgagaggttagaaaagagaggaacagtcagatgatgattcgcagagcagccatacaggatctggaacagatcatgcagatatatgcgagggcggtgcagtatatgcacgcgtccggcaaccccaaccagtgggtggaggggtatccgtccagagcgttgattgaggaggacatcgcacgcggagtcagttatgtagttgacagggatggcgtgattgaggctgtgttttcctatatagaaggggaggatccgacctaccggcagattgggcaggggatgtggcgcacgaatggaagttatggaaccgtgcaccggctggcatccgccggacggctccgcggcgtggcgggaatctgcttttc

SEQ ID NO: 11617 - DNA, 22073 bp, Unknown
  gut microbiota DNA sequence
agtgcggcagatattgtttaaaatggtaagttctatccacgataatcgatagtcaagaatttcatcaaattgaaagccgggcaaagtcataaaaagagcattttttaacccctttaatttttgattattgtcgggttcgcagatggctgatttgtaagcagcaaattgtaaatagcagatatctttggaggtgcatagcatctccattttttttacaagatcaagctgtaaggttttatggttcatacgagtttttgctaaacgaaactgtagttcctgcagcttgttctctttttcactcccgtaaaatgtaaaaacaaaatccgaaatacctaggcgctggagcaaagtctgagcaagaatgatatcaggctgctgtgtttcgttttcgatttttgaaagcttggatttgctgcataatccccgacaaagcgccgattgagataatttttgctctttgcgtagagagcggatcaggccacccagcgtgaaaaccttgtgagaaaaaaagtcataggtgccatctcccatagaagagacatccctaggaaccttgggggaaaacgatataagcggaatatcggaaaatatgtttaagtcttcagccaaagtggtagaaaggtggttggaaacataatttttacagatggtggcataacagctgttaatggaatgggcagagaaaaaggcagttttaaataaggtcagaaaacgatcctgttgtcccgtatagtagcatccgagtgcggttaaaaacgtcagctcatgcataagcccgtcgtcaagatttgaaatcatttgatggcggtagaagttcgacagttcaagtgcagacttataatcacagatagtcagcagatatttggtatataccaccgcattttccgcaagtaaacgatcccgttcaagaaaagaaagcgaacgggcagagagataggaagaaatctgctggcagacatgatgagcagtagctgtatcaccaatgtacagtgcttcctgcgcaagatatataaatagttctatttcgacagaagacaaaaacagagaatggatcgctgcattgtcgatatcagatcttgtgatttttaaagcaaagcgaaccagctcataagtatgagcgtgatttgcatgaccagaacgtaattgcagcttgcagtgaagcagaagccattcctgatagtaaaatttattgtctgcccaattcagcatttcaatgtgatccaataactggcaggcgggcgtgagttgccaggaatccagataaaagcgtactttcttcaaggcgtaaaagcagtcaaagtctgcgcgcgtcgagaaagtaggataagcttcacaaaggataccagcatgtgccattaaagtctgaaaagtggcagggctgacaccggcagagccgttctcaatgcgggacagagagagggtagaacagactccatcggataattgttcctgggttagacccgcattaaggcgggcctgtctaataatagaaccggcatgttgtacactcatagaaaatagctcctttatatgaaactacaaacagtataaaacggacatagggaaaatgcaaggttttgaaaaacctgcataaatgtcggaaaagtttccatttatgaaattaaaaatgtgagaaacttcaagtatcataaaggtaaggtgtgataacacgccttacctttatgataaagacggagaaaagtatgttgaaatatgagatagtatcgattcttagaaataaggcagcctatatttttctgttggttgttctgctttttggattaaaagctacggtggaactgcaaagatcgattacatccagtcaggacacgaactatataaagcgggaactgcaatatgaacttgtgatgcatcggcagctgttagaatcggagcttgctactgcgcgcagagatgcaggagatgcagaacggcgaaaatttaatacaaatgcaatacaatttcgtaaatggagaatagaagaattacaggaacttattgcattgcttgaggtgagtgggacagagtcacagcagttccagaaggaatataaggcatatgggatgatatgcagtattgtatcataccagatgtttgtttatccagagcgtggatgcagtcctgttgaagtacgttgtgcagatatgtttcagaaatggggcaggcagctgggactttatgaccttccgtttgacatttcttctatgactgcgaatccatatgtatcatccgaactgatggaagcttctgttgcagcgtatgagaataatatgagccgtctggaacatttattaaatgattatgataaaaaaagtctgggattggattcgggatcgccctatgcttttttggagatgctattttgtgaaaatgcgtatgtacctacaatattagatatttgcatcctcttattttcctttggctacattatggaaggaaaaaatgaccacaggtatgaatttatgacagtgcagccatgcagtgagtggaagaaatacaggcattatgtgacatcctttttcctggcggcaggagtagtgtgtgtgattggaataggtgtgtggtttttgtattggggaatgcgatacggctttaatgggattgacagccatatgtttgtggatgctaaaacctataaggggttttattcatacgagcatctggaagattactcctatgaggggttagcccgcatgtatgcggattataagtatacagacggaggaagaggagtcatgttgtatacaacttatccgttgggatcacttccgttatatcgtttcttgctatatatgtgtatacttgcagtattaaaagttttgttttttgcaatgcttggaagcgggattcgagtgctgatacagcattcacagggcggaatttccgtggtggcagcagcaaccgtacttacaggatacagtcagttgacaggctggggaaaaccatataatccgtttgcgattggatcctgctggaatgtaacgctgggatcagaaaggatcacatggctatatgcggtattggaactaacattcagctgtattttgattatgataataacgtgtactgtatccgggaaaaaagacagaatataggggagagcggaatgaaggttttacaggttgaggatattgaaaagtctaagaaaagaaaaaagattctgaagggattaagtttttccgtgggcgaacaggagattgtaggacttttaggaccaaatgggagcggaaaatcgactacaataaaatgcatcagtggattatacaggacagatagagggagaatcagaatctgtgggaatgacatcaaaagcaaccgcttagaagcattaaaacagattggaattgccatggaagtccccgctctttatccggaattaagtggtatacagaatttgcggatggcagcaacagccagaaaggtacccaaagagcgggtggaggaacttgccgttttcacagatctgggggacagacttttggatcgcaccggaacttattccatgggaatgaaaatgcgactgaatctggcaatagcgattgtggatcaacccaaactggtaattctggacgagccgaccaatggccttgacccggaagcagtttttcgtctgcgacgggaaatcgaggagattcgccagagggggagcgctgttttgatctcttcccatcaactttcggaaatggaaaagattgcagatcgaatcgttgctattgacgatggcattgtttgttttgatggaaagcttgatgatctttcaggcaggtttgaaaatcttgaagaattttacaaaaatttgtatggagcagataagaatgaaagcatttttgcaaaatgaaatacagcttttctttagccggaaaaattacttggtctggatagtaggggcgctggcggttgtttttgcatatagattttactatgttacacagtatgagaattatgcgcagacagtgttggaagaactggaagaaaatgcaaaagatattacgatctgggaatctgagtatcagaggcagtgcatggaactatggggggacaatagtgcagaaaaatttgcacatgccagtttattgctaaatgcatggaaacagtacgaacagaccaatattcggttgcgttattattgggaacaggcttgggatgagaatggaattcgcaggacggtgctggaggaagacgaaaatttaatagcgattgaggaactgggagaggaagtggagtatacgggcatattcagagggagtgttgctgattggagagcacgtatgctgttacataaagcatatcagcagagcggaacagaggaaccggtctgtccggttgtgcctcaggctgcatggttatggaaagaggctttttctggaaacagtgtattatttttgatttttacagttttgattattttgctgcattttgatgcgtgggcgaatgaatttgaatatgcaacttgttacagactatacatcctgccaataaaaaaggaatggttgtatctggaacgattttttgtacgtgtactggtgagtgtcgtatgtgttggcagtgcggcaggcatattatttctgcttggaacagcacgatatggaaccggaggacagatgcttctggtgatttctgaacaagggacgcagacggtgatatcgatatggagtcttgtgcgagaagaaatattaggaatgcttctgtatatagtttttctgacggctgcagttctgctcatttcttttattgtaaaaacgaaaatgaacgcattgatgatatgtgcagctttttgtatgacagggattgttcaaacgacagcctcagatggaaccggtaaaggcatcgtggaatggctgccgcagctttctgccttaacgttgcttatgctgttggcaggctgtattctgatccgtataagagaggactaggaatctgtttggcaataatgtataatttttatacatcacagtgtaaaaattatacattatttggttccggaaaaaggttgaaaaatatcctgtgatatgataaactttttacaatttaggaaaaaggcatagcactgcccataatggcacgaagacgatgcatcacacaccgtgtgcatgtgcgttctgaaaaaaagaagaaaaacggaaacgtttttttttttgggaaaaaagtgaaaggacagggagacgaatgaaagcttttttgatactcgaagatgggaatgtatttacaggaaccagcattggttccaccagagaggtcatcagtgagatcgtgtttaacacatcgatgaccggttatctggaggttctgaccgatccgtcctatgcgggacaggcagtcgtgatgacctatccgctgattggaaattacggaatcacgccggatatggagtcgggacggccgtggccggacggttatatcgtgagggaactgtccagaatgccgagcaatttccggtgcgaggggacgattcaggattttctcgcaaaatacgatattccgggaattgccggaattgatacgcgtgcgcttaccaagatccttcgtgagaagggaacgatgaacggtatgatcacgacgaatgagaactataatatagaagaaatcattcctaaattaaaagcatacacgacaggcaacgtggtagataaagttacctgtacggaaaaacgagtattaaaaaagcagggaaatgcccctgagacgaaaaaagtggcgcttcttgacctgggagcaaagcgcaatattgcccagtccttacgagagaggggctgtgaggtgacggtatacccggcacatacttctgcggaggagattctggcggcgaacccggacggcattatgttaagcaacggaccgggagacccgaaagagtgcaaagagatcattacagagatccgcaagctgtatgaatccgatacgccgatttttgcaatctgcctgggacatcagctcatggcgcttgcaacgggggctgacacgcacaagatgaagtacggacaccgcggaggcaaccatccggtcaaggatctggcgacgaaccgcgtctacatttcttcacagaatcacggctatgtggtagacaccgataccttagacccgaaggtggcgacaccggcgtttgtcaatgtcaacgacggaacgaacgagggactttcctatgtcggcaagaacattttcacggtgcagttccatccggaagcgtgtccgggaccgcaggattcagcatatctgtttgacagatttatcaacatgatgggaggagcgaaataatgccaagaaatcaggagattaagaaggtacttgtaatcggttccggtccgatcgtcatcggacaggcggcggagttcgactatgcaggaacacaggcatgccgttccctgaaggaagagggcgtggaagtcgttctggtcaattccaacccggcgaccatcatgacggataaagacatcgcagatcaggtctatattgagccgctcactgtgccagtgttagagcagatcattgcaaaagaaaaaccggattccatccttccgacccttggcggacaggccggattaaacctcggcatggagctttccgagaaaggaattctggataagtacggcgtgaagctgatcggtacgaccgcagagactattttcaaggcggaagaccgtcaggcattcaaagatacaatggagaagatcggagagccttgtgcggcatccgaggttgtgcacaatgtgcaggatggtattaagttcacaaataccatcggttatccggttgtgcttcgtccggcgtacacgcttggaggaagcggcggcggtattgcacacgacgagaccgagctgatcgagattctgacaaacggactccgcttaagccgtgtcggagaggtactcgtggagcgctgcatcgcaggctggaaagagatcgagtatgaggtaatgcgtgatgcgaacggcaactgcatcacggtatgtaacatggagaacattgatccggtcggcgtgcataccggcgattccatcgtagtcgcaccgtcacagacgctgggcgacaaggaatatcagatgctccgtacctctgctttaaatattatatctgaattaaatatcacgggcggatgtaacgtgcagtatgcactcaatccggagagctttgagtattgcgttatcgaggtaaacccgcgtgtgtcccgttcctccgcgcttgcatccaaggcgaccggttatccgattgcaaaagttgcagcaaagatcgcacttggctatacgcttgacgagatcaagaacgccatcaccggaaaaacctacgcaagctttgagccgatgctcgactactgcgttgtcaagattccgagactgccgttcgataagttcattaccgcaaaacgtacgctgaccacacagatgaaggcaaccggagaggttatgagtatctgtaataactttgagggagccctgatgaaggcgatccgttccctggagcagcatgtggacagtctgatgtcctatgattttacagggctttccagagaagaactggtaaaacagcttcacgttgtggatgaccggagaatctgggtgattgcagaggcactgcgccgcggtatggattacgatgtgattcacgacatcaccaagattgataagtggttcatcgacaagctggcaatcctggttgagatggagcagaagttaaagagcgagccgcttacggtagaattgttaaaagaggcaaaacgaatcgagttcccggataaggtgatcgcagaactgaccggcaagaccgagacagagatccacgatatgcgctacgctaacggtatcgtggcagcatataagatggtagatacctgtgcggcggagttcgaggcgaccacaccgtactactattccgtattcggcagcgagaatgaggcggaagagacgcacccgaacaagaaggtgctggtacttggttccggaccgatccgtatcggacagggaatcgagtttgattactgctccgtacattgtacctgggcattcgcaaaagaaggctgggagaccgtcatcgtcaacaacaacccggagaccgtatcgacagactttgatattgcggataagctgtactttgagccattgacaccggaggatgtggaagccatcgtaaagcttgagaagccggacggtgcggtggtgcagtttggtggacagactgcgatcaagctgacggagagcctgatgaagatgggcgtgaagatcctcggaaccaaggcggaggacgtcgacgctgcggaggatcgtgagctcttcgacgagattcttgagaagaccaaaattccgagagcggcaggcggaacggtatttaccgcggaggaagcgaaggaagtggcgaaccgactgggctatccggtgcttgtgcgcccgtcctatgtactcggcggacagggcatgaagattgcatttaacgatgatgagatcgaggaattcatcggcatcatcaaccggattgcacaggatcacccgatccttgttgacaaatatctgcagggcaaggagatcgaggtcgacgctgtgtgtgatggaacggacatcctgattccgggtatcatggagcatatcgagagaaccggtgtccattcgggagacagtatttccgtctatccggcaccgacgatcagcgaccatgtaaaagagacaatcgtggaatatacgaagcgcctggcacaggcactgcatgtcatcggactcatcaacatccagtttattgcgatgaatgaagaagtctatgtcatcgaggtaaacccgagatcttcaagaaccgtgccgtacatcagcaaggtgaccggtattccgattgtcgatctcgcaacgaaggtcattatcggaaacacaatccgcggacttggctatgagccgggacttgcaccgacggctgattacattgccatcaagatgccggtattctcgttcgagaagctgcgcggagcggagatttcccttggaccggagatgaagtccacgggtgagtgccttggtattgcaaagacattcaacgaggcattgtataaggcgttccttggcgccggagtgacactgccgaaatataagcagatgattatgacggtaaaggatgcggacaagccggaggccgttggtgttgcaaagcgctttgaagcgctcggctacaagatctacgcgaccagaagcaccgcaaaatatttgcaggagcatggggtgaatgcgctgcgtgtcaataagatcacacaggaatccccgaacgtcatggatctgatccttggtcataagattgatcttgtgatcgataccccgacacagggcaatggagacaagacgcgcgacggctttctgatccgccgaaatgcgatcgagaccggcgtgtactgtatcacagcgatggatacggcaaacgcacttgcaagaagccttgagacagcgatggatacgctgactccggttgatattgcgaaagtaaagaatttataaacaaaaaaagaatctcgcttgcgagattctccgcgcgcgagcggttcgcaaagcgatattttccttaccgcgagctgcgcatccgcgcggagcggtttttatttcataggaagagcctgtacacggatggatgaaaactcatcgcaccgttacaggctcttttttggtaaaattttctgttgtcatggcgtcactccgggattagttgtaatatggatgaatgtcaactccgtacattgctgcaacacccattgcgaccccgtcgatattctccatgaagaatgctttgatttttgctaacataatcatttcctcctttattgaattggtatatttctacttgttcatcaaaggttttccctttgacagctattataatacacggaaatatggtaatattatagataagatattagcaaaaggttgggcgatattgacttttgggagcaaaacatggaagaacagaaaaacacatatgaaaatgtcacactcgaaccggatgtcggctttgatatccggtttgttacgatggatcataactctccgtttcactggcaccgggagatggagattctctacatcttaaacgggcatgccaccgtacatatggagggcgaggaatacgagctgaatccgctggacgcgattgtgatggactatgccagaattcacgaggtgatctatgcgctgccgcagacgatgggaatctgtatccacgtgtcaaggcagcttctgcggcgctatctgccggagacggaaccttttgcgatccgttgtgcggggcagcgtctccttcccggacagcaggaatattacaatgagatctgtgggtatctgaaagaattgacggtgctttatgtaaatcagaatgagacataccggttaaaaagcacggcgcggattctggaactgctggcatgtctggtggaacatttttccgaaccggtctccctggtggcaacgcagacgagggcgggcaatatggagcggctggagcagatctgtatgtatgtggatcatcactacagggaagaaatgacgctgcaggaagcggcggatgaactggggctcaaccgggaatacttctgccggttctttaagcagagcaccggaagctcgtttatgcgctatgtgaatcaggtgcggctcaactatatctatcaggatctgctgcacacggacgatccggtacaggagatcatggagcggcatggcttctttaatcagaagcttttttaccggatgtttaaggagcgttaccactgtactccgcgtcaggcgcgtcggatggcggaaaacaatccttatgtggaagcaaaataaccgcgctgtatatgcagaggggaggatataagttccggatgcagcccggtgtgaagcatccttgaagcaaaatacgagcatttcttccacgtcgtgtttgacattttattctgtgtctttgccacgttttggcaatccacaggatgtgtccgacaggttgcagacaatgggcggacttcctggtgtccctaatgtcagcgcttcacagacaatataaaaccgcgcgaaccgaaactcgcaggcatctgctattgaagacacggcagatacctgctcagacatcggcttcgcgcggttatgttttgttcagcgatgacagtaagggacacacacgaaagtcctaaaattgtctgcaacctgcggacacacctcgtggagtgctcaaaacttggaaagacacggatcatcgagaatgtcaaacacgatgcggctagaaatgccggatttggcggttagaatgcttcacaccgggctgcagggggaacgatacgacgttcccacccttcacataaaatattaaaccagtttcacacgcttgcggggcgctttcctgatcggggaagcgtcctcttccggtgccggtgcaatgggcggaggtgtaagcactctggcattgtccaaaagatcatccatgctcttcttctgggcagctttctgcttgcgctgtgcgatggcaagctttttctgccggaaacggtcagccgtctcacggatgtactggtctgcgacaaaatgctcgagcgcctcctcgtcgatcgcaatccggttgtccatggttttcatgatgtccgtcacacgcagggaatctccgatgaccggatcactcagatcgtagatcatattgttggagaactttaagatcatcgggcgggtaaaatccgcggcattttccacgaggacgagcgccttctcaccgtcggagagatcaacgcacgcgccggtcgggagaatgtggatgcattccgccagtgcggcaacgacgcgcggattgtaggtccggctgtgtctgcgcaaaaaagacatcgcggcaacctccgagaccggcggattgttaatattcatggcggtaagccggtcaaactgatctgccacctttaaaatatcacagagcagacgtgtctccggggaaggatccttgatctttaaggtctgactcttctggaagatgaactgctggataatctctaaggaaatcttcggaagattgcactcctcatagcgcgggcggattgattcataaccgcgttccagattcatctggataaaattccggtcgctgtccgagaggtcgtcgcccttgtcgaggatggcctgcggaacatacagataaccgaaatcatacagcagggaagccgtgatcagcgcccggatatcttctgccgggagctgcatctcattggagatcattgcggataggataccgacactgatcgagtgtttgtatacaaagtctgcggaactgcggagtgtctgcgtaaaattcagcttgtggtcaagactgccgtaatgccgctggatatcatcgaccagcgagagcagtgtggacgggacaagattgtcgacaagcttgtccatgttgtcctttaacttgaacatgtagatggtctggaactgttcaaactccagatcttcccgcgaaagcggcggcagcggttcagccggctccagaataaaaatgccgatcagaccaaaattctcaatactgttaataccctggatcgtgagccttgtatcccgttcgtataacagaacccccatcctgttgtagattggctttgcaaggcgcataccgggctttagatcagcagttttgacaaattgcatgcttatctccccctcttccggtattgtcataccaaaatcctctttatcttccctctatgatagcatattgaaagctgaaatacaatctgatatgatactcttagaaccggggtttttgaaagaaaatcctacttttccggagaaagaggtacttatgatacagattccgtggagacgcgtggcgggagcggcgctggtgatgtgcctgcttctggcaaatacatcttatgccgagacgacacaggacaacataaatgatgcgaagaatcagattgagcatctgaaagatcagaaaaaggatgccgaggataccgtcaatgacatctccggcaaaaaggacgcactggagtcggatcttagcgggttaaacggtcagctttccgatattgtcgcacagatcaatgacctggaggggcagatttcggacaaacagggggagattgaccaggcgaaggaggatctggctgcggcggaggcacagtctgcgaaacagtatgaggatatgaagctgcggattcagttcatgtatgagaacggaagcacgccggtatggcagatgcttgcggaggcggaatctttttccgacttcctgaaccgcacggaatatattaccgacatcaacgcctacgacagaaaaaagcttgtggaataccaggatctgcaggagcagatagccgcccagaaggaagaactggagagcgacatgactgagctggtggcgatgcaggatgacatgaagaaaaagcaggcgaacgtcagcagtctcatcaacaccaccaaggcgaatctggcgcagacacaggaagatctggcggatgcgcagtccgacgtcgcggacctggaggataagatcaaccagatggtcgagtacgagaagcagctggagatccagaaggcgaaggaggacgctgcgcgtctggcggcgattaaggagcaggagaaggaggatacctccaccgtggtctatgtgccgacggacagtgaccagtacctgcttggagcaatcatccagtgcgaggcgggcggagaatcctacgacgggaagctcgcggtcggaagcgtcgtgataaaccgtgtgaagagttcgtattttccgaactctgtctcgggtgtgatctaccagagcggtcagttctcgccggtggcgagcggcagactggcgtatcgtctggaagcgggtgtggacggaagctgccttcaggcggcgcaggatgtgctaaacggcaatattacggtgggctgcctgtatttcagacagaataacggcatcatacagggaaccgtaattggaaaccatgtattctattagaagtgaaaaaagtgcggaaaaccgcagaatggcagcagggcgatttttgtgaaaagtacacaagaatcgctttgtttttgtttggaaaataaaatttgcatgataaatttttaacaaaaaaagactgtaaaacagacgtatagagggggaaaaaggagcgtaaagaaaactttagaaagatgaaaaaagaagaaagttattgcatttaagagtgaaatatggtagcatgaaaaagtattaaaaagctagtaaaaacgccgattatttaaaatgcaccttgtgaaaaaaagagggagaaacataaattttaactgcaaagttgaatttattttttttagcaaaaagattgttaaaaaattaacagcgtttttcggcaaaattatttttaaagaggaacaaattccccgtacatacggggttttgtgtgtaaaactgaaaggagaattcaaaatggcaaagaaagtagttttagcaggcgcatgccgtaccgctatcggcaagatgggtggagcactgagcaatactccggcagcagagctgggatcaatcgtaatcaaagaggcattgaacagagctggcgtgaagccggagcaggtagatgaagtattgatgggatgtgttatccaggcagcacagggacagaacgttgcacgtcaggcttccatcaaggcaggacttccgatcgaagtaccggcagttactctgaacgttgtatgtggttccggactgaaatgtgtcaatgaagcagctactatgattctggctggtcaggcagatatcgttgttgcaggtggtatggagaacatgtccatggctccttatgccatgacgaaggctcgttttggatatcgtatgaacaatgcgaccatcattgataccatggtaaacgatgcactcaccgatgcattcaaccattatcacatgatgatcacagctgagaacgtatgtgagaagtatggtcttacaagagaagaactcgatgagttctctgcaaacagccagcagaagtgtgagaaggcaatcgctgagggcaagttcgatgacgagattgttccggttccggttaaggttaagaaagagaccgttatgttcgcaaaagatgagggaccgcgtcctggcacaacagctgagtcactgtccaagttaaaatgctgctccggcaaagagggcggactggtaaccgcaggtaacgcttccggtattaacgatggtgcagctgcaatcgttgttatgagcgaggagaaggcaaaagagcttggcgttaagccgatggcaacatgggtagccggagcactcggcggagtagagcctgagatcatgggtgtcggacctgttgcatctaccagaaaggtacttgagagaacaggacttaccatcgatgatatggatctgatcgaggcaaacgaggcattcgcagcacagtctgttgcagttgcaagagatctgaagtttgatatgtccaaggtaaacgtaaacggcggtgcaatcgcacttggtcacccggtaggagcttccggatgccgtatccttgttaccttattacatgagatgcagaagagagacgcaaagagaggtcttgctactctgtgcatcggtggtggtatgggatgctctaccatcgttgagagagactaatgcagttatgagaacttctgaaccggcgccagcctgtgggcggcaccggagaagttcttgctttgcgtaataggaatctttgttcctattttattaaaaggcatagaatcagttaatagaatcagttaatagaatatatatatgatatttcaggaggtactgacatgaaagttggagttattggtgcaggaacaatgggacagggtattgcaaaagcatttgcccaggtagacggatatgaagtagcactctgcgacatcaagcaggagtgggctgacggcggaaaagagaagatcaagaaaggctatgcaagacttgtcgagaaaggaaaaatgacacaggaagcagtagacggcattctcgcaaagattaccccaggcttaaaggaagacctttgcaaggattgtgacctcatcgtagaggcggctttcgaggatatgggcgttaagaagactacattccaggagctggataagattgcaaagccagagtgcatttttgcatccaacacatccagcctttccatcacagagatcggcaacggactgacccgtccaatggtaggtatgcatttcttcaacccggcagaccgtatgaagttaatcgaggttatcgcaggtgtgaatacaccggaagagaccgttgaggcgatcaagaagatctctgtagagatcggcaagactccggtacaggtaaatgaggcagcaggcttcgttgtaaaccgtatcttaatcccgatgatcaatgaggcagctttcattaagatggaaggtgtatctgatatcgcaggtatcgatgcagcaatgaaactcggtgcaaaccatccgatgggaccgcttgagttaggtgatttcattggtctggatatctgccttgcaatcatggatgttctctacaaagagacaggcgacagcaagtaccgcgcatgcccgttaatccgcaagatggttcgcggcggcaatcttggcgcaaagagcggcaagggattctatgtatacaatgctgaccgtacaaagaccccggttgatgctcagtaaaatataaggtaataatggaggaaatgatatcatggatttcactttagacaagaaacatgaaatggcgcgctccctgttcagagagttcgctgagaacgaggtaaagcctctcgctcaggaagtagatgagacagaggaattcccggttgagaacgtgaagaagatgcagaagctcggcttcatgggcatcccggtaccgaaggagtacggcggacagggctgtgacccgctcacctatgtaatgtgcgtagaggagctgtccaaggtatgcgctacaacaggtgttattgtttctgcacatacttctctctgcatcgatccgattatgacctacggtacagaggatcagaagcagaaatacgttaagccacttgcaacaggcgagaagctcggtgcattcgcactgactgagccgggtgcaggtaccgatgcgcagggcgcacagaccaaggctgtattagacggagacgagtgggtattaaacggctccaagtgcttcatcacaaatggtaaggttgcagatgtttacatcgtaatcgcaatcacaagcgtaacagaggataagagaggcagaaagaagaagaacttctctgcatttatcgtagataagggagctccgggcttctccttcggaaccaaggagaagaagatgggtatccgcggatcatctacatacgagctgatcttcgaggattgcagaatcccgaaggagaacctgcttggcgtagagggcaagggattcccgatcgctatgcacacactggatggcggacgtatcggtattgctgctcaggcacttggtatcgcagagggcgcattagaccgcgcaatcgcatacaccaaggagagaaagcagttcggccgtacgattgcccagcagcagaatacacagttcaagctggctgacatggctgcaagaattgaggctgcacagcttcttgtatacaaagctgctatggcaaaggcaacacagaaggtatattccgtagaggccgcaaaggcaaaactgttcgcagcagagactgctatggctgttaccacagaggttgtccagctgtttggtggatacggttacatcagagagtacgatgtagagcgtatgatgcgtgacgcaaagatcacagagatctacgagggaaccagtgaggttcagagaatggttatctctggtgcattactgaaatagtcgtaatccgtggcataatataaaaatataaggagtgaaaaatacatgaatatcgtagtatgtattaaacaggtaccagataccaagggcggcgttaagttcaacccggacggtacattagacagagctgcaatgcttaccatcatgaacccggatgacaaagcaggtcttgaggcagcacttagattaaaagagcagtacggcgcagaagtaaccgttcttaccatgggtcttccgaaggcagacgaggtgcttcgtgaggcaatggcaatgggcgcagacaaaggaatccttgtaacagatcgtgtgttaggcggagctgatacatgggctacctccaccacaatcgcaggcgcactccgcaatctggattacgatctgatcatcaccggacgtcaggcgatcgatggtgatactgctcaggtaggaccgcagatcgcagagcatctgggacttccggttatttcctacgcacaggacatcaagatcgatggagaatatgtcgttgttcagcgtcagtacgaggacagataccatgagttaaaggcaaagatgccgtgcctgatcacagcactttccgaactgaatcagccgcgttacatgactccgggcggaatcttcgacgcatacgataaggaagttaccgtatggggaagagcagatcttaaggatgtagatgattctgatcttggattaaagggatcaccgacaaagatcgcaaaggcatctgacaaggtacgtaagggcgcaggcgagaaggttgtccttgatccggatgagtccgtagcatacctgatcggcaagttcaaagagaagcacattatctaacaaatataaggaaaagtggtgaataaaatgggtttagaagaatataaaggagtatttgtctttgcacagcaggttgacaacgtattagacggcgttgctttcgagttacttggaaaaggaaaagagctggcaaaggatttaaacacagaagtaactgcagtattgattggctccggcgttaaggagctggcagatcagctcgctgagtacggcgctgacagagtcatcgtggtagacgatccgcagttaaaagactacagaacagagccgtacgcacatgcactggcatctgtgatcaatgagtacaagccggagatcatgctggttggcgcaactgcaatcggccgtgacctcggacctactgtttccgctcgtgtgaagacaggtcttactgctgactgtacgatgcttgagatcggcgatttcccgctgaacgcagcagctggacaggagcagcagcacaatcagcttcttatgacacgtcctgcatttggtggtaacacgatcgcaacgatcgcgtgcccgtacaaccgtccgcagatggctactgtacgcccgggtgttatgcagaagatcgctccgattgcaggcgctaaggcaaatgtggtagagtacaatccgggattcaccccgaatgacagatatgtagagatcttaaacattgtaaaggctgttaagaatacagcgaacatcatggatgcaaagatcctggtatccggtggacgtggtgttggttccaaggagaacttcaagcttctcgaggatctggcagaggtacttggcggtaccgtaagttgctcccgtgccgtagtggagaacggctggctgccggtagatttacaggtaggacagacaggtaagacagtacgtccgcagatctacttcgcaatcggtatttcaggagctatccagcacgttgcaggtatggaggattctgatctcatcgttgctatcaacaaggatgaggatgcaccgatcttcgacgttgcagattatggtctggtaggagatctcaacaagatcgttccggcactgaccactgcgttaaaggcagaacttggcaaataagcaaagaaaagtacataggtgaaaagaactcccgcgtggcagatgtggcgtctgtcatgcgggagtttttatgtttttatttcacgagcttgacagttgccgttttgcgtattattgtcattccgaaggagtgaaagaacgtgagacagacagtaacagaaaatcgattattcagtaaaaaagatttgcggaaactgattattccgctgatcttagaacagacgcttgccatcaccgtgggaatggcagatacgatgatgatttcttctgcgggagaagcggcagtttccggcgtgtcgctggtagacatgtttaacaacttaatcatcagtgtgctggcggcgcttgcgaccggcggtgcggtggtaacgtcacagtgtatcggtgcgggaaggagagaggaagcctgtcggtctgccagacagcttgtgtttacagaggcggcgatcacgatcggtatcagtgtactggtacttctttttcacaggcagatcctcggattattcttcggacagattgaggcggatgttatgcagaatgcgatcatctatctcattatctccgtgttctcatttccgcttctcgcagtgtatgactcgtgtgcggcgctgtaccgttcgatggggaatgcgcagatcacattgaaaatatcgctgctgatgaatgtcatcaacgttgtgggaaatgcaatcggcgtgtatgtgctgaaactgggagtagcgggagtcgccattccgtcgttggtttcccgcggtgtggcaggagtggtgctttttacgcttttgcataatccggacaatctggtctttctcaccagaggaaaatttaaagtggacggaacgattgtgaagcggattctttttatcggcatcccgagcggaattgaaaacggtatcttccagctgggacgtgtgcttgtggtcagcatcatagctgcgttcggcaccagccagatcgcggcgaacggggtggcgaacagtctggattccatgggatgtattgtgggacaggcgatgagccttgcgatgattactgtgatcggacgctgtgtgggagccggagaagaaggacaggtgcgctattacaccaaaaagctgctgggagagacctatttttatacggcggtcatcaacagcatcattttacttctgctgccgtggattttacagatctatggactgggagaggagacgacgcgcctgtcctacattctggtcatgattcatgatggaatggcgatcttcctgtggccggcgtcgtttgtgctgccgaatatgctccgcgcctgcaacgatgtaaaatacacgatggtcgtgtcgattttttccatgattaccttccgtatcggcttcagttatgtgtttggtgttcacatgggatggatggcagtcggggtgtgggctgccatggtaattgattgggtgttccgcgtactctgttttgtgggaagatatctggcgggaacctggcggaaaaaatgtggtcttgtggcgccaaccgcttgataaatatttcacatagtgatatactgcaaaagatgcaaaaagttcctggcagacaggaaccataaacaaagtatacagaaaagaggaaaagactatgacgaagtcgaaattttctacgaagtatctcgtggagatggcgcttttggttgccatcatcttactcatggcttttaccccgattggttacataaagacagcaggtcttgagattaccctgattgtcataccagttgcggtaggagctgtaacattgggaccggcggcaggagcaatcttaggtggtgtgttcggtatcacgagttttatccagtgttttggaatgagcgcgtttggtacgctccttctgggcgtaaacccggtattcacatttctggtatgtgtgccgacacgtattctggacggatggctgaccggactgatctacaagggactgaagaagacgaaaataccttccgcaggttcggtaacgcttgccagcctttgctgtccgctgctgaacaccacattttttatgggaacactggtaaccctgttcgcaggaacaatgcgtgagcagttcggcatgacgaaagtgattccgtttatcgcagcatttgtcggcgtgaacggtgttgtcgaggcgatcgtatgtttcgttatcggaacagcggtttccatggcattgaaaaaagcactccgctactaggaacaataagtaatattacgagaagaaatacacttggggatttcatgtggaaatgcagctggaaattcggttcaaaaaatgtggatttctaaccagccgaatgtttgcatctttgatgatccgtgtctttccaagtttggagtactccgcgggtcatgtccgcatcccggaagacaatttgtaggacttttgtgtgtgtcccttattggcaccag

SEQ ID NO: 11618 - DNA, 17385 bp, Unknown
  gut microbiota DNA sequence
atggcataaatgccacctttatgtcgaacaaaacataaccgcgcgaagccgatgtctgagtcggcatctgccttattttcaatagcagatgccggcgagtttcggttcgcgcggttttatactgtctgtgaagaggtgccattagggacaccagaaagcccgcccattgtctccggtgtgtcggacatgcacccgtcggattttccaaacgtggaagagacacggaatccgatgcaaacattcagcaggaagaaatgcacacatttttctccaacgaattttcatttgtatttccatctgaaatcccacggtgtggtcttctcatattattacttatcacccaaacgatctatgtttattgcggcatttccttttttgtccgcaaaaaagaacacgagaaagcgggcgtcttcttggaaacatcgacaaaagagagtataatagtctgtgatgaataagaatagaggggtgaaagtgtgggagaacagcagagcaggaatattatggattatgacaccgtgcggctggatgatgagaacaatgcagtggtgatcatcgaccagacgaagctgccgggaaaaatagagatcatttcgcttcacacggcgcaggaaatctggaacgcgatctatctgcttcaggtgcgcggagcaccggcgatcggagtggcggcggcatatgggatctatgtgctggcaaaacggatggatacggaggattacgatacattttaccgtgagtttgtacggcagaaggagtatctggattcttcgcgcccgacagccgtgaacttaagctgggcgttaaaccggatgcagcgtgttgtggaggcacacagtggggagactgtagcgcagatcaaggaggcactgcaccgggagtctgtggcgatccaggaggaagatatctgggtgtgccggatgatcggagagcatggtctgactctggtaaagccgggggatggcattctgacgcactgcaatgcgggacagctcgccacgagcaaatacggtacggcgacggcgccgatctatctgggagaggaacgaggctatcattttcatgtatttgcagatgagaccagacctctattgcagggcgccagactgacagcatttgaacttcagtcttccggtgtggatgtcacactgatctgtgacaatatgtcggcgacagtcatgaagaacggctgggtcaatgcggtatttgtcgggtgtgaccgtgtggctgcgaacggagatgcggcgaataagatcggtacgtccgtagtggcggctgtggcaaaatattacggtgtgccggtgtatatctgcgcgccgacgtcaacgatcgacttaaatacgccgaccggagctgagatcaagatcgagcagcgcccggcggaggaagtcacggaaatgtggtacaaggagcgcatggcaccggagggcatcaaggtcttcaatccggcatttgatgtgacggatcatgagctgattgcaggcatcgttaccgaatacggtgtggcgagagcgccttacacggagtcgctggcggcgatttttgcagaaaaggaaaagcgtgccagagagaaaaaagaagcctgatagagaagatgtaagcgatttaaggaggaaagaatatgccagagaacagtaattgcagcggagcatccagctgctcaaaggagagctgcgagggatgtccgagcaacgcgaagaataaagcaggcggcggaattgccaaggagccgatgaatgcggcatccaacgttaagaaagtgatcggtgttgtcagcggaaaaggcggcgtcggcaaatcatttgtcacagcatcactcgctgcagcgatgaaccgcgccggatacaaggtaggcatcatggatgcggatattaccggtccgtcgattcctaagatgttcggaattcatggacaggtatacggaacggacgacggaatggttccgatggagacggagaacggcatcaagatcatgtcgatcaacctgctgttggatgacgaggaggcacctgtcatctggagaggtccggtgattgccggcgtggtaaaacagttctggaacgagacagtctggggagacgtggactatctgttcgtggatatgccgcctggaaccggcgatgtaccgcttacggtgttccagtcgcttccggtagacggaatcgtgattgtgacgtccccgcaggaactcgtgcagatgattgtgaaaaaggcgtacaacatggcggagatgatgcatgtgccggtgctcggtctggtggagaatttcagctacctgaaatgtccggactgcggaaaagagatcaagctgtttggcgagagtcatatcgacgatgtcgcaaaagagctcgggatcccggtattcggaaagcttccgcttgatccggcgtttgcggagcaggcagacaagggagcgtttgcaacgatggagaacgcttatctggatgcgggcgtagagaagttaaagacactttaatgtgacaggaacgggaaagtgttaccacttacccggagaaaatgacctcttggtgtaaaactgtttacaccgggaggttctttttttatactggaaccatcaaaggagttacagagatgaaaataaaaattgagattgacgagagcgccgcggaggatgaagtgattattcgctgccgcggtctgacgaaacaggtcgctgccgtgcagcgcgccgtgcgggatgtcaccaacgcttccgagaagatcctgctttataaagggaacacggaatactatgtgacattgtccaagattttgtttttcgagacagacgagaacgggatcagcgcacacacccgggatgaggtgtatcagacccggtacaaactatacgagctggaagatatgcttccgggcgtttttatgagagtatccaaatccacgatcttaaacacggatcagatttactctattgaccgcaatctgacggcgtcgagtgtggtggcgtttttgaacacgcacaagaaggtctatgtatcgcggtattactataaaccgttgactcaaaaattagaagaaaagaggttgcatcatgaaaagtagcaaagtattctggggaatcttttttatcctcgcagcagtgtatgtcgttataagcaaatttggaattctgccggatatcggcgtgttcagcattattctgaccgtatttttcctctggctttttgtcgagggaatccgcaatgtgaatttctgggagattctgttctcaattgcgtttatctgtatcatatacgatgagccgcttggaattacggcactcacgccgtggacggtgctcggcgcggcattcctcggaagcatcggtctgtcactcattttcggcgggaaaaagcggaaatggaagacggtgaccggcaatgtcgggacatccagcagtgaacagtataccggcgaagagatccggtgtgagaacagcttcggttccgcaatccgctacatcaactccgacaacttcagacgcgccgccatcgaaaataatttcggatcgctttcggtgtacttcgacaatgcgatcgtgcaggaaggctctgcaaatgtgagcgtggagaataatttcggggagactaacctttacatcccgaaagaatggaagattcagaataatctggaccgttcgttcggcgccatccgtgaaaccggcagcagcatcggaacgagcagcacggtgctgtatctgaatggctccgcgaacttcggagagattcatctgcactacatctgataaataccgcggaaagcggaagcggtggggatcaaagctgactcatgaaaaagttttctgacgtttcaggatgcagccgactacggtcattctaatcgcaaaatccggtatttctaatccgcaccgcgtttgacatccacgatgatccgtgtctttccaagttttgagcactccgcgaaatgtgtccgcactccgcagacaatttaaggactttcgtgtgtgccccttgtcggcaccagacaacagatggcataaacgccatctttatgtcgaacaaaacataaccgcgcgaagccgatgtctgagttggcatctgccctattttcaatagcagatgccagcgagtttcggttcgcgcggttttatattgtctgtgaagcggtgccgctaggggcaccaggaagtccgctcattgtctgcgacgtgacggacacatcctgcggattgtcaaaacgtggccaagacacagaatctgatgtcaaacgcgttgcggaagaaatacaaggattttgctccaaagaatggaccgcctccggttgcatcctgaaacgtcagaaaacttttacatcatccgggcactgttccctgccgcctccgcttttggcggtatgtttattcctctgtatctgcgtagctggtatcttcgtgaagattcggcttcatgtcaataccgcggttcgcgtcacctgtgatgtcttttccgaagtgatagtcgttgcccggcaggatggcatttaagaaaatacctgcgatcgctgcgactgccagcgcggtgagtgtgacggaggttccggcgatcgtaaaggtaagaccgtcggagaaaccaagaccgcacacgaagatcacgcctgcgatgatcagattgcgtgactgcgtaaaatccacatgattttccacaacattgcggacgccgatggcggagatcataccgtagagcatgaagctgacaccgccgatgatagcggacggcatggaaccgatcacagcagccatcttcggaataaagcttaagatgatggcgtagcaggctgcgatgcggatgacctttggatcgtataccttgctcagctcgagcacgccggtattttcgccgtaggtggtgtttgcgggacctccgacgagagcggacagggaagtggcgagtccgtcaccgatcagggtgcggtgaagtcctggatcttcgataaaattctgatcaaccgtcgcggagatggcagaaatatcgccaatgtgttccatcatggttgcgagtgcgatcggagccatgaccaaaatggcggacagattgaatttgcagagggaaaatgccggtacgccgacccaggaagcgtttgcgatgtcggtaaaagaaagaatggcggagccgtctgcgtttgtcatgcccatggcgttgaagatcaatgcggcaatataagaaataatgacgcccatcagaatcgggatgatcttaaacattcccctgccccagatattgaaaacaatgatcgtaaccagagcgatgagggcgagaagccagttggtggaagcgttgttgatggcagaaccggcaaggctcagtccgatgcagatgatgatcggaccggttacgaccggcggaagaaaacgcatgaccttcttgacaccgacaagcttgataatcagcgcgagaatcagatataaaagacccgcgacaacaattccaccgcaggcataggaaagtttgtcagcgttggacatgtcggcgaatacaccggaatccatgtttgcaatcgtggcaaaaccgccgaggaaggcaaaggaagaaccgagaaacgccggaaccttgaatttggaacacagatggaaaaataaagttccgataccggcacagatcaatgtaacctgtacatgtagaacatcttcgccgaagtaactgttgaccagaatcggcacgagaatggttgcgccgaacatggcaaacatgtgctgcaggccaagaatcagcatttttggtacgccaagtacgctggcgtcgcggattgctccgtctttttcgttcatagtaaactcctcctgatgtgaaatgattggtagttgcgtatatacaaatggcaaatcagaacttctgatttgccataagatatcaaaaaatagatccggtgaaacgtcttgcctcctgatcgtaatcacggacgggaatctggtccagttcgccggtaccgtcgagatagaaagtgagcagcgtctgcgtcatataaggactgatccagagagccgcaatgccaaaagagcagatggcaagcgcgccccagccgagaaagctgaataaaatgtaaagcagcttcctgcgtcgtccgcgcataaatttacggcaggtgcgaaaagcatcccgcacgcttaaatgcggatggtctaaaagaaagaagaaaaccatgcggtaggtaagcagcacacagaaagtaaaaatcagaccgaggatgcttccggcagcaagcagggcaccggagagaccggagacaccggttttataaaaataaagaacaccggcaatggcaggaatacctgcgatcaccagaaatacatcgaagagaacggcagcgagaaagaagcgctctgcgccattgcgaaacggtgtaaaaacatcacggatgcggtatgtctgaccgcgcgtcatattcatatgaaccagcataacgccggtgtctagcatctgggcgatcagaagaattaaaatatctgcaatcgtgctgatgataagctgcggagtgccgggataatcgccgagcgtcatggagaacggaagctcgatgagcgtcggaattaaggaggcagtcagaaatgctgccatcggtacggaataacggttatttaaaatgtcgcgtgaaatacgttttaattcgctggatgatcttgacatgtgtagactcctgtggatgtgatatttgtgtatgttctggtgaaagttttgctttcgcgaacattatttccctgtatctgcgcagatttttgcgcatccgaagttccgcaggaacttctaatatgaactcgccagagttcattatagcatggaagaacgtgatatgctactggcagttaaagagatttggaatccagaaacgtgcgcgtgctttacaaccgaaaatgcggcggttataatagcagggagtaagataggaatggagatcggaatgtttcagacggatagacgggtagaccgggatttttatattatgggctggtgcgcggcgggaattttcgcggcgctgtttttgtttgtcagagtaacaggaattccggtctggaaatttttgctgccctgcccgtttcatgcgctgaccggagcgtactgccccgggtgcggcgggacaagagccgtcagggcgctgcttgccggcaaatggctgcgctcctttgtgctgcacccgtttgtgccgtatgcggcgctgcttagcggctggtttatgatcagccagaccattgaacgcgtgagcggaagccggatacggattgccctgcgctttcgtgatgtctatatatggatcgccctgcttttgatcgtggtcaactgcctggtcaaaaatcttgccctgtttgtgtggcatgtggatttactggcctagggaattcatcagtgtatcaaaatcgatgccgagcgtgccgtatacctgacgcgccatattttccacgccgccataatataattcggcaatcgcaaatgtgtaaataatcatggcgaggacaatgcccagggcaatggcgccaaggatcagagcaattttcgcgcgggaggtcagcgtgcgctcgccgccccgggataaaagtgcaaaaacgatggcaagagatccgcagatcagtgccggatagaccagacaaaaagtagctgccccgatcacgccgagaagcagagcggcattttccattcgctgggaacgtcgtttgttgttcatgataatcagacctttcccgatatgccggtattgccagtatatcgcaggataactttgtctattgtaacatgggaaagccaaaaagacaatgaggaaggcacttgagattacagcggattttcggtatactgggagcagactcggtaaaatttggaggacagatatggatattattgcaaaaatttctgaggaactggggattaagcgccatcagacagaggcagcagtcaagctgatcgatgaaggcaataccattccttttattgcgcgttaccggaaggaggcgaccggcgcattaaacgatgaggtgcttcgtaacctgtcggagcgccttacctatttaagaggactggaggagcgcaaggagacggtgctcgccagcattgaggagcaggggaagctgacggacgaactgaaagcgcagatcctttcggcggagacgatggttctgctggaggatttataccgcccgtacaagccgaagcgcagaacgcgcgccacgatcgccaaggaaaagggactggaaccgcttgccggtgtgattacactgcagatgataaaaacgccgctcatagaagaggcggcaaaatacgtggatgccgaaaagggagttacaaccgctgaggaggcgattgcgggagcgtcggatattattgcggagtccatctctgacgaggcggattaccgtacgcacatccgtgacctcacggtgaaaaaaggccggatgacctctactgccaaagacccggagacggagtccgtctatgagatgtattacgattttgacgagccggtggcaaagcttgccggacaccggattctggcggtgaaccgcggagaaaaagaaaaattcctcaccgtgaagatcgaagcgccgcaggaggacattctgcgctatctggagaaaaaggtgattgtccgggacaacccgcagacgaatgaggtgctgcgcgatgtggtgagagacgcctatgaccgtctgattgcaccggcgatcgagcgtgagatccggagtaacctgaccgagcgtgcggaggacggtgccatccgtgtattcggaaagaacttagagcagctgctgatgcagccgccgattgccggacaggtggtgctcggatgggatccggcgtttcggacaggctgtaagcttgctgtggtagatccgaccggaaaagtgcttgatacgacggtgatttatccgacggctccgcagaataaagtggcggaggcaaaagcggtattaaagaaattgattgccaaatatcacattaccctgatttcccttggaaacggaacggcatcgcgggaatccgaacagatcattgtggacctgttaaaggaacttccggtaaaagtacagtacattattgtcaatgaggcgggcgcgtcagtctattctgccagcaagcttgccacggaggaattcccgaattttgacgtgggacagcgaagcgcagcgtccatggcgcgccgtctgcaggatccgttggcggagcttgttaaaatcgatccgaagtccatcggtgtgggacagtatcagcatgacatgaaccagaaaaagctcggggaggcgctcggtggcgtagtcgaggattgcgtgaacaaagtcggcgtggatttgaatactgcatcggcatcgcttctggaatacgtctccggcatcagcaagacgctggcaaaaaatattgtggcatatcgggaggaaaacggcagattcacatcccgtgcaggacttttgaaggtgccgaagctgggaccgaaggcgtatgaacagtgcgcaggattcctgcggatcggcgacggaaagaatccgctcgatgcgaccggtgtgcacccggagagctatgatgccacgaagaagcttctggagcggctggattatacgttatctgacgtaaaagagcggaaggtagagggcatttccaaaaagatccatgactacaaaaaactctcggaagaactgggtgtgggagagatgacgctgcaggacattgtcaaggagctggagaagccggcgagagacccgagagaggacatgccaaagccgattctgcgcagcgatgtgcttgagatcaaagacctgacgccggggatgattctgaaaggaaccgtgcgcaacgtcattgattttggcgcgtttgtcgatattggtgttcatcaggacggactggtgcatatttcacagatgagcgacaagtttatcaagcacccgctcgaagttgtcagcgtcggggatattgtggaagtgaaagtattaagcgttgatccgaaaaagcagcgcatccagctgacgatgaagctgaacggatagagaaaaagggttgacagtatgcccatatgggcatacaatataaaagcaaaataaatataggaattcttcggggcagggtgatatgagttcacagagatggaagcatagattcccgaccgacggtgattctggcagacgccagatcagtccgtgagctgcagttgcagttgagccggtgtgaatccgggaccgacagtatagtctggatgagagaagagaagcatgttaggaggacctgcggcagcagggtcttaagaatgcaatttaacgccccggatgtagagatcatccggggctttttgtgtggcgggaataagcgctgttccgctgccggaatgcaatccgttgaaagacggctgacacgcgagaatacctcgaattcctgcagagaaaaggagacgagtcattatggacacaaacagtacaatcacaggtaggacaacaacaaacagtatttcgagcgttcgctacatgagcgtcacggcaatgctttccgcagtagcatttattttaatgttcctggatttttccgttccgtttatgccggctttcatcaagatggatctctcagagctcccggcactgatcggtgcattttccatgggaccggtatgcggcattctgatctgtctgatcaagaatgtgcttcatctgtttattacaacaaccggcggcgtcggtgagctttccaacttccttctgggcgtagcattcgtacttccggcaggattgatttaccgccacaaaaagagccgcagaagcgcattgattggatccctgctcggtgcggtgatcatgggtgtattttccgtggtatccaactacttcctggtatatccggtatactacaactttatgccggaagaagctgtgctcggcgcttatcaggtgatcgtaccatccatgaagagcattctgcagtgcctggtgtgcttcaatatgccgtttaccatcgtgaagggactgttttccgtggtaatcacattcttggtatacaaacacatttcgccgattctgaaaggagcgaaccgctagaaaaggggctgtcttagacgacagccccttttcttttggaatgaaaaatgctatactggcttagatatagacaggagggactgttatgccgctaaagtttgatattacattgacagcagaagatatgtaccggtttaatatgtaccagacctactccggatttcacgggtggttttccattgcgttttccatcctgatttttgtggtggcaggagtgacccgcgggaagatcgaggcggcatacaccgcattatatattgtatttggcatcgtatttctggtctatcctccggtgagcctgtacctaaggtcgaagcgcacactggcaatgtccgaggtgctgcggggaacgctgcactatgaggtggacgaggaggggctgcacgtatcgcagaaggaagagagtgcgctgcttccgtgggagcagatctataaaatggtcgcgacgaagcacaacgttctggtgtacagcagccggatcaatgcctatgtcattccgagagcacagctgggggaaagctacgcggcactgcagacacaggctgcggcacatctgccggcgtaccgtttgaagatgaagtagagaatggggattttaaaatatgacagaaaagatctatgaaacatattcgccggaagagacgcacgcgcttggaaaacgcctgggcgcggaggcaaagcccggcgacgtctatacgctggtgggagatctgggcgtcggaaagacagtcttcacacagggaattgcggaaggacttggcatcacggagccggtctccagcccgacctttacaatcgtgcaggtatatgaggagggcaggatgccgttttatcatttcgacgtttatcgcatcggggacatcgaggagatggatgagatcggctacgaggattatttctacggggatggtctgtgcatgatcgagtgggcgaatctgatcgaagagattctgccggagcggcgcagcgaagttactatagaaaaagatctggaaatgggatttgattatcgcagaattaccataagagagcatcaggaggacagaaaatgaaaatattaggattggacagttccggtctggtggcgagcgttgcaatcgcggaggatgacaaccttctgggagaatataccgtaaactataaaaagacacattcacagacccttcttcccatgctggatgaggtggcgcgcatgatcgaactggatctttcgagtatcgatgcaatcgcggttgcaggcggaccgggctcatttacgggacttcggattggttcggcgacggcaaaaggtctgggactcgcgctggagaagccgatcctcaatgtgccgacggtggacgcacttgcatacaatctggtgggacaccgggatatggtatgcccgcttatggacgcaagaagaaatcagacctataccggtttgtaccgttttgatggaaacgacatgcaggtgctgcgcggagagtgtgccgtgggaatcgatgagattgcggcggacatcaacagcagaggtgaggcggtcgtatttttgggagacggtgtaccggtttttaaggcatatctggaggagcagcttacggtgccgcattcctatgcgcccgcacatctgaacaagcagcgggccggcgcggtcgctgtgcttggcatgcagtattacagagagggaaaaacggagagcgcggcggaacaccgcccggaatatctccggctgtcccaggcggaaagagagcgcaaggagcaggaagccgcaaaaggaaaggaaaacgtatgagtattatccggagcatgacagcggaagatgcggcgaaggtggcgtctctggaggcggagattttttcgcagccgtggagtgagaatgcttttctggattcgctttgtctgcccgacacgatctttctggtggcagaggaatcgggtgtcatacaggggtacatcggaatgtatcttgcggccgatgagggtgagatcacaaatgtggctgtgaatcctgcgtgccgcaggcgtggaatcggggaagggctgctcacagagatgaaaaaacgtgccgcagaccacaagattgcccgcattgtccttgaagtgcgcgtgtcgaatgagggggcgatccgtttgtacgagaagcagggattttcctcggtgggtatccgccgggggttttatgaattcccgagagaagatgccagaattatggtctgtgccctgtaattccctgtgggattgcacggcggctcaatgatataatgaatcctgacggattcatattagaagttcctaaggaatttcggatgcgcagaaagcggcgcgaaacagacgatagaatggagaatatatcaatgagcagacgaaacggagtgatttattgcaaccgatgtggcagcccgatctgtacggaaggggaagcaggaaaaagttcctttcttactatttgtaaagagtggggctatttttccgaacgaaaagacggtacggtgcacaggatggatctgtgcgaatcgtgttatgacgcctgggtgcggacgtttgctatcgcgccggaggtggaacaaaagacagaactgatatagcgataaaggagtttattcatgttagatgtatgcctattgggaacaggaggaatgatgccgctgccccgccgttttctgacggcggctatgctgcgttacaacggcagcagtctgctgattgattgcggcgagggaacacaggtggcgatcaaggaaaagggactgacgtttaagcccattgatgtcatctgttttacccattaccacggagatcacatcggcggactgccgggactgcttctcaccatgggaaatgcggacagaaccgagccgctgaccatgatcggtccgcgggggctggagcgggtggtgaacgcgctccgggtgattgctccggaacttccgtttgaaatacgttttattgagattacggaaccggaaatgcggctggaactcaatggatactgtatacatgcatttcgtgtcaatcataatgttacctgttacggttattcggtcgaaataaaacgtgcagggaagtttgacgtggagagagcgcgtgcggcggcaattccgcagaaatactggagccgtctgcagaagggagagatcctgtccggggaagacggaacggtctatacgccggagatggtgctcggaccagccagacgcggcatcaagatgacgtactgcacggacaccagaccgacagaatcaatcgtggcggcggcggagggatcggacctttttatctgcgagggaatgtatgcggagccggagaagcttgtcaaggcgaagcagtacaaacacatgacattctatgaggcggcagacatggcgaagagagccggcgtcagggaaatgtggctgacccactattctccatccctggtgcatgcagagaactatctgccccaggtgcgagagattttcccggatgcgtttttgggaaaagacgggaaaagcgtggaattgatgtttgaggatgagaactaaagaaaagggaggttgtcataatgaagaagagtggcgtgattaaggcagtgataacaatactgatcattttactgatcgtgggagcgtattacttttttacgacacagagacggacatcggtggaagatacagtggagttgacagagatacaaaagcttatcacaaagaatctggatgccaactatccggcaactccgcgtgaggttgtgaagtattacaaccgtattctggagtgcttctatgatgatacctatacggacgatgaactggagtcgctggcggatcaggcgagaaagctgctggacgacgaactgttggagaacaatccgcgggatcagtatctttccgacctgaaagcggatattgaagattaccacaacaaatcaaaaacgattcgcagcagcaatgtctgcgacagcaatgatgtggtgtatcagacggtggacgggagagagtgcgcttatgtgacggcgtcttattttatgaatgagaacaacagcttcgaccgtaccaacgaaatgtatgttttgagaaaagatgacgatggagactggaagattctggtattctatcaggtggagggagattcttccgatgaacagtaatgagataaaaatattggcgattgaaagctcgtgcgatgagacggcagcagcggttgtcgtgaatggaagggatgtcagatcaaatgtgatatcctcccagattgcattgcataccttgtatggcggcgtcgttccggagattgcctcgcgcaaacacattgaaaaaatcaatcaggtgattggacaggcactttcggatgcggggatgacgctggatgatatggatgcgatcggtgtcacctacggcccggggcttgttggagcactgcttgtcggagtggcggaggcaaaagccatcagctatgccaaaaagctgccactggtgggcgtgcatcatatcgaggggcacatcagcgccaattacatagagaacaaagatctggagccgccttttctatgcctggtggtgtccggcggacatacacatcttgtcaaggtgcttgattatggaaaatacgagatccttggaaaaacgagggacgacgcggcgggagaggcttttgacaaagtggcgcgtgccattggactcggctatccgggtggaccgaagattgaaaaagtggcgcatgaggggaatccgcatgcggtagagttcccacgcgccaaaatcgtggacggcccgtatgacttcagcttcagcggcttgaagtctgcggtgctcaactatttaaacggttgtaaaatgaagaacattccgatcgtacaggcggatattgcggcgtccttccagaaagcggtgacggacgtgctgatcggaaatgccatgaaagcgattgatgaattcggaatggacaaatttgcgattgcgggtggagttgcgtccaacggcaccctgcgtgagggaatgcgtgcggcgtgcgagaagaagggcgtggcattttatcatccgtcgcccattttctgcaccgataatgcagcgatgatcggtgtggcggcatattatgatttcatgcgcggtcagagggacggactggatctgaatgcggttccgaatctgaagctgggggagcgatagtggagaagataacagcggtggtacttgcagccggggcggggaaacggatgcacagtgatgtgcacaagcagtatatgatgcttgccggccgcccagtgcttttttatgcgctgcaggcgtttgcagagagcgcggtaaccgacattgtcgtcgtagtgggggcaggagagatcgattactgcagaaaagagattattgaaaaatatcatatccaaaaggtttgcgcggttgtggaaggcggacgggaacgctatcattctgtgtatgaaggacttaaggcggcggacgggagcgattacgtgctgatccatgacggggcgagaccgcttgttaccaccgatattatcagccggtccatagcgtgtgtcagagagggggattcctgcgtagtgggaatgccggtcaaggacacgatcaaagtggtcggagcggatggttttgcaaaagagacgcccaagcggagcagcctgtggcaggttcagaccccgcagacatttccctacggacggatccggaaggcgtatgagaaggtgatggcacagggagattctgccgtcacagatgatgcgatgatgctggagactgcatttggagagcaggttcgtgtgattgagggaagttatcagaacctgaaaatcacaacgcctgaagacattttgacagcggaattatacttaaatagaaaaagtgaaaaaaagtgttgacattggtggaagcagatggtaatattatttctgcactgatttgagacaagaacacggagaggtatcgaagtggtcataacgaggcggtcttgaaaaccgtttgtccgaaagggcgcatgggttcgaatcccatcctctccgcttatcaacacagacgataccgactccggtaacagaagtgctgatacaattttatatcattattttattcggagaagtacccaagctggccgaagggacacccctggaaagggtgcaggtcgttaatagcggcgcgagggttcaaatccctccttctccgctcgcttgatagacatattttctgagttgttgaaacaattcaaaaaaagtcgaaaaaagttgttgacaaaacagtcgacacgagatatactaatcaagctgattgcgaatcggaaacgaaacgcgaacaaccgcttcgaaagaagcaaaagaaaaataaaaaagttgttgacaaacggttgacactatgatatagtaaataagctgtcgccgagagatgacaacgatgaatgagattgaaaaatccgttcggaagttgcggagcaac

SEQ ID NO: 11619 - DNA, 47534 bp, Unknown
  gut microbiota DNA sequence
atcatcccaaagaggtctatgcttattgtggcagttcctttgaatgatcgtttctaatccaaagccatgctccgcttctagttctggctcagagaatctctgatctgcgccatctcctcatcagagaagttctcatggctccacatcagaatgtcgttattctttgcgctctgatagcgtggaatcagatgcatatggaagtggaatactgtctgtcctgcaacttcgtgattattctgaagaatattaaatccatcacagcccagaacctcagtcatgtgtcctgcaagcttcttggcaagcttcatggcttttcctgcaacttcctcatcgatatcatagatatctgcatagtgctctttcggaagaatcagcgcgtgtccttttgacgccgggcttgcatcgagaatcaccttaaatatgtcatcctcatagatcgtgttggacggaatctctcccgcaataatcttacaaaaaatacagtctgcttgtctcataatatgattactcctttcttacacctgtcgaattttgtaaactggttgttattgaacttcttttgtataaatgctacactaagttgtgtcacgtgttaaatcagatcaacaaggcagggattacattgttaagcaacgaggattaccttcatattttccacgaaataaaaaattctattacgttgataaacagctcccttcagctcgttgaaaagaaacaccctgaagtgcgggaatttgactactggagtgaatccatgtcggaactctgttttctgaaaaacatggtcattcagctgtcctctgcgcggctgtgcaatcaactgaatctgatgcaggtaagcatttattcgtttatgcatcagatcgacacttccatccgtgtactatcctggaagaactttgtctgtaacttccagcttgaagagaaccttcccctgatcgaactggatccgcagcttttaaaacaagctgtcataaatattatcaaaaatgcatttgaagccatgcatgagagtggcactaccgatgtccacgtcttttatgaagaaccctttatgagcattgccatcactgaccacggcggcggactcgacccggctctggcggataccatcttccagccttttattacctccaaaacgggaggcagcggtccgggacttgtcattacccgtcagatcatcgaatcacaccacggtacattaacctgcgattccagaccgggtgacggatgcaccttcaccatcgcacttcctcttacgcaaaattgaacacggtatccagcatccgcagaatcttaaaattgcccttcgcagtcatctcgcctgtcataaaggctctctggaatgtcattctcccggcaatcacaccatccattacttccggtgtcaattttgcatagatatcaatattctcttcctgaccgtatcgtaccgtaagatcctcatccttcacttcaataaaaagcggctttttcttatctgcaaacataaacagatatctcgcatgaaaatcctgctgcggaacaaacgcattgcgcagctgatcgatataggccacatcatcttcctgactgaccttccccagcatatccttgaacatggatgccagttcctgaatatcttccttctgcttcttcacatagctgtcatccgatacatacttggacagctgctcactttcctgcggcgtgagttccagctgcggtgtgcgcagcacactctgtctgactgcgaggttactgttcgggagacttttcatcttctgagaaatcgtccggtagaggttctccgcctttttctcaataatgaccgtgtagtccttgttcatctcaaacgacaccagatcctccacatatccgcaaagtcccggacaaggaagcccgccgagaatctcccatgcatttgccaacgtcatctcaccctcacgctctccgtaagtcgtagacatcacgatcggctgcatataggtcgtctgaatcttctccttatcgccgtacagccagcatgcatccagaaactgctgcatgtagccgccgattccgagccactcgatcgtggtcgcaagaataataccgtccgcctctttcatcgtctgcggcagggtcgctatttcattcttgtgctcatagatattgatccgctcgaccatcacacgcagttcgcgcagcacttcttccatcttattcaaaacataaagtgtcggatcgtccaacagtccccgtccaccgtaataaatatttactttcattcaaagcctccgttttgtcccatctgtcgctttatggaacatactgctttcagtatataaatttttgctcacaaaatcaatatttttgacggtttctgtgatataaaatgactgtcgcggaaaatccggcaagcagacctccgatgtgtccccagttatcaattcccgccgaggaaaacccgtaatagatggtaagtacaatcatcatcataattccccgggttgtaatctgctcaaatctgccccggtgcagtatcacgatccacaggaatccgccaatcactccgaaaatagcacccgaagctcctgccgacactgcataatcgccggtgcgaagcatcatcccgtaggagagcagtcccgccccgatcagggaaaccagataaatcagaaaatacttcagatgccctgtgacacgctccagtcttgatcccatacagtataaaatcaccatattattcaccagatgtaccgcgccgaaatgaaggaagccagcagttatgatcctccaccattcatggttgatccggataaaatccgggtacatcgcgccgtgctccgccataaagaatccgttcgtcgtatctccgagccattcaagcacaagatatgttataacattgacaacaacgagagcgatggtcacatattccgcccggatgttcttccacaaaatgcccaaccggttctttgccgtattctgtgcagacgcatatgcggcacctgtgccctgccacgacgtctctgcccaaccaccggctccggcaccctgccgcgacgtctctgcccagccaccggctccggtaccctgccgcgacatctctcccgcgccgcctgttccggcaccctgctctaatgccccccggagtccgaaaaagtctcccggctggttctcatagatcagcagccgtccgctttggggctgatatacccacacattcctgcactctgcgcacaactttcgttccacctcggaatctccgccgatcagaagtgtcagcatctccacatgatataccggaaatccatccgggaaatccccaagtctcccctgcgggtgatagaacagatccatggcgtgttcttccatgctccggtactgctgcacagagaaccggtttccgccggagagatctaccgccattacaatatggaacccctcctgataatacttataataaattccggcttccaccagattggtgtgacaatagcggtagccttctcctcttaatacatttgcgactgctgcattttccatacgcgttacctctgtctgcactcttataatatggttattatagttagaccgggcgcagattgcaaacgtacttccctcattttttcttaaataaatctaaacttttcatctgcaaacatcacgacctcatttttctgcagactcattcctgttttataattcagcaattctccacccactctggtgccgttcgacgaattgagatcctctataaaaaagacagctccctttttgctgatctttgcatgcctcctgctcacggtcgcactcggaatccggccatcacactccgctgcactcccgattacatagttgtctttctctatcaccagatccgagtatccgccggttccttcgtagcacaggattccttccggtttctgcgaaattcccgccaaaagcaccgtgggatttgcggatttatgttcctcttcctccggttcaaagacaaacgcctccggctccttctgcatatttttcatattcccgccgatcttccatctgcccattcttcttttgtccccggatgctgccgctttgcctgtcactctgcctgccttttcacctgccggtctgcccgcagctgtgcctgtcagtctgcccgccttttcacccgccggtctgcctgcagctccgcctgccagtctgcctgcagctccgcccgccggtctgcccgcagctccgcctgtcgttttccataatttttcccacactgccgcaagcagttcctgcaccgtgctctctccgcgaaaaatctgcttccatatggaagcatcccgcttcccgtcctgttccgtctgtccgacagcggcatatgcctccggctcttccggttctgtgtcatccagactctccggttccgtcttcgcttcatccttttcatacggcattaaaagcagcgatttcagctcctttaactccactccccctgcactgctctgtccgtaaatatcatatgccgctttgaccgcacgctcatccgaatgatccagtcgtgtcagcagatattccatgaacgtccggaaggcttccggcagcggcattggattccccggataatagcagaaaaaaatctgtctggtccggtaatctacaaaaatactttccgccgacaacagaatactctgtgccggcagcagcattccctctaactgctgcactgcctcataaattccgttgagtacattgcacaacatatcataggaaagcgtctccgtctccaacaccgcatccagcgcctgttttcctgtaatgttataccacagatacttttctccgttctcctgcacacattccgcaaacacaatattccccctcggggcatgagcaatcatctttttttcccattcctgcaattcttcacactgcgcgagcaccatgtagcttgccgtcagttttctaatgtactgtatcttcattttgaaataattcccccgcttcctgccaacggtaaaacatctttaccgcctctatttcctgctcctgtcctatcgccagcgcggtgtccctgcactctgtatacatctgaataccgctcttcatggcgaatgcaaacaacgccagcacgagcggcaccacaagcgccgcctctatggtcagacttcctctccatccgttcataaattctccatttcgtcccgttttctaccgccatcccagctgaaatacatacgccacaaaaaggaatggaagaaacggcatccggtaatcctttcttctatgcttcacaatgagtccaaacaacgccgccggaacaatcagcataagcgccgttaaaaacaactccacattccgccagaatcccagaaaaataccgcttgccatcagcattgcgccatccccgtagccaatctcctccctgctgacccaagccgcaagcaaaagcaccgcgccgattcctgcacccaacagcagatccgtcagcttctgtgtcgggtgcatcaggtgaaaaaccagtcctgcaattcccgccgcaagaggcacatacacacatatcatctgttccttccagtcgcggtatgccgtgaccgcaaatattccaagcagcaacacctcacccacacaattctgcattgtctttcttctcctctcatccatctctctcccgctactgcccgcaccggctgcacggtctgcgtgttcccacctcggacagccgtatcatgcggacggttcgcttgatgccactgcagccaagatctttgtggtagcagtcgccctggttcgtaatatagagccgtccgaatgcattttccgcataccggcactgcatgcattttctatatgcttccccgttctcattgcgaagtgccgcaatttccgcctccgccacagaccggatcgacagctccagatgcgtgcagctatactccctgtgatagacggttcctgtctgtgtgacatacacccactggtcttcatcacttccctctgcagcactccatcctgtccatttcctgcaatctgcccgctgttccatcgcaaaatcccacaaccagaagatccggatgggcagccggatatgatacgccgcccgcagtgtgatctcctccccagagaaatcggatccaatcaggctgattccaaactttcctcctgtgatgtaagtttctgcttccgtgcggtccgccatctctctcaaaagcaaagcctctgctattccggggagcgccgccccgtcggatgacacagctgccgcgcagacagccagcttccgtcccgtatcatccaatgccttctgcacctcaagctgaatctgcatgatgcggaagaaaaagagaacactcacaaaaaagcatgccagcaccggcatcacgactgctgcctccagcgtaaatactgcagacagacggaggcattgcggtgtcccttttcgcgcgatattttctgaaccagatatggaattttgttcggggagagatttgtcctttcttattatttttatgattcgccttacttctaccttataaagagacaccgcaacacctccctcctcaatcatacgaaaacgttcgctgtgtctgatagcatagaccggacagatctctccctgtatgtaccatcagcccggaaaacaacggctgccactcataatccatgcgataacttatgccacacagcacatgatccatgcggcagtctgcatacattggatgcaggcgtactgtccgttccatgacgtccatcatccggtacgccagccgctctgctgacactgtatacaggaatcccttcaggtagccctgataactcacaccgttttcgcagttttttgcctttttgccgtcttcaaacgccgccgcaagactgccaaactgcgctgtccactgcgtctcagtttttatcaaggcaatcttatcccccgccagcaatgcccggatgtccaaaatactctccacatacgcccacgccgcgattacccccgtctggacaagccgcacaaccgcaggatttcccgtaaatcccgccagcgcctccgccattccaagcgtctttgcccgcttgtccccatctccgaggatatgcgtgatattggctgcctcccggacaaacagcaggcgcttgatgacgctttccagattctctttatccgatccttttcctgccagcacatattccagttcatatgccagcgcgtgatcctctgattctcccagataatctccaaaatattgatccatatattccagtgcgagtattctgtcataccagtccgacacctgtatttccatattgccggtctgtttctgccgcctctctatcgaatcacccagatcggtctgcctcgtcgagaccgcaccaaaatcccccagcgtcattccaagcagtgcgttctgctttatcgcatgaacaacctctagcggattttcctgctccggcggaagttccggtatcaccgcttccgtcccgtccgattctgcctgttcccggcgttcactttttgcctcttcgatcgctgttctggcatcctcgatactctcttccccctgtccgctctgttccacctgctcatgctcgccatagcgttcctgtaatgcccgtatggtctccatcgccatattctgcttcatatatgctgccacacagtgcagaaacacgcttccctcctgatccgtcatcagacggtatgccaccggctctgctcctgcaagggtgacctgcaggatgcttcctcccgctccatcaacgtccagattccggtcaagccgctctcttaaaacagcggttacatgatccatggaaaatatatccccaccgtaggcgccatccagtcccagcagatgaaattcttcccagagcaccggctgatactctgcgcataccgactccagcgcaagcgtggacttcatatctgcatacgtctgtatctggtacaccctccccgcctccagaagagccataaggaaggatgccaccagtgcaaacgcaagtgcggaaaataccgtaatacttgctctctttctcatatcagacctttcccgcctttttcgtgatcgtatcaaaaatatcgttcaccagacttgtaagctgatctttaaagatcagtaccagcccgatcaacacgaccagaatgagaatcaattccacaacgcctacaccgtcttcttctctgataaactctctgattcctctcatagaattcctccctttctaaatttgaaatgccagcaccgccggcaccaacagtatcaccatcacaattccaagcatcagcatcatcggaaacagcaattttgttccggcttcctcaccgtaacgttttgcggcatgcttccgctcctcaaacgcattctgcgcttcctgctccagcagtaccgtgatgccgcgggttcctttttgcagattctgcgtcagtataccggcaagcttccggtaggatgccacaccgcaccgttctccgaaatgctcatacgcccgctgttcccccacaccgctctccatctgtcggcaggcgaccagcatctcctcataggcgggcatttccgccgttttattctgtgtccgcttctgtccataagctccggcaatttttctgaacgctccctgaagcgtcattcccgcccccagaagcaaggccagcttgctcaccagatccggatactcgagttccagaagcattttgcgcttcttttgctcctcctgctttctgctcatggataccaccggtacaaagcaggcgagaatcacgcccagtataaggatcttttccggtctctgatcgcgcctttgctcccagtgtatggtatgtccctccacctcatccggcagaaaaagtctgtctgctcccgcctccggctgctgtcgcgcaatcttttctgaaatccccttccggaagcgctcttcctcgtctaacagtctgggatacacgcagatataaaactcctgtacacatctggattttccacatgtcagagtgacctgcacattcaccagctccccctcctcgtccggttctcccacaattcttccagtgcggctctctatcagccggtaattgtcaaagctccattccgcctcaacatgcccttcctgatattcctcacgaatgacaacagcatcccgtatacaattcacagattcattgtctcccgggaattccttaatgagttcttcctctgccgctcgaagatatgcctgctcctcctgctttgtcagctcctgctccggcacatgcaccttgtaagctttggcctttttcgccccatccacatacatacgcaggtctgcctcgtagtcaccttctccattttctctccgaagcagccccttctccggatcctcatctgtctgcagttccatgtatccggacagcagcccgagacatgccgctgccgcaatgactgccgcccctttctgccagtctttcctgccccatttccggctgactgcccatccgagcaccgccagtccaagcgctattccacatacaatcacattttccccctctttatccacaaacctttcgtcagatctgaatatccaatatatgctctgaccatttgatggcggcaagatagcagcaaaaagcgatgctcatgacagccactccgaatgcgctgccatacaaagcgtccagaaattctcccgatgccacctgaagatatgccagaattgcaagcggcattatttccataatccgcccctccagacgctttcctgcaagcacggttgccacttccctttcgacttcaatccgccccgcgagtttttgtaccgtcgtctgcataatgtggacaaagtctccgccgctccgctttgcaaacgcgaacacctccgcaaaactctcgatctcctcacacccgcttcgcgccgcaaacgaaagcaacagtcgctccaatggttcgttcatgcgcactccctcattcatccagcgcacctctgccgccataagccccttctccccatgtaattccagaagttctctctccgtctccctccatgcattttctacggaatatcccgccagcagcgccgccgctgcagactgcatggcatccttgaactccatgagcagctgttcctttctttttttcatttgcagggcgcaatactttttcacgcacaccaggtacgccgccggaaacagcagcattccccacacagaccggtaaaacagccacgctgccattcctgccgcccctgctcccactgccgcacaagccagtttttcctcaaaacctgcccggtattttctataatccactgctcccctccttctccaggttcattcctgcacgctcacatttttcggtatgcatcagccggccggttctcatcagggttcccctcacatgccgtgcctcctccccggactcttcatacctgaacaattcatggagcacaatctctccctgctccactcctgctatttccgctatttttaataccttacggcttttatcccgcagccttcccagatggatcaggatatcgatccccgatgcaatctgactgcgtatcgcggaaagcggcagttccatacccatcagaaccatcgtctccaatctgcttaacatatccttgcacgagttggcgtgcccggtcgagagacttccgtcatgcccggtattcattgcctgcaatacatccagcgcctccgcgcctctgcactccccgacgataatgcgctcggggcgcatgcgaagcgccgtccggatcagatcgcggatcgtgatcggcgtaacgccttctgtattggcattacgcgtctcaagccgcaccagattcggcttgtccaaaagctgtagttccgccgaatcttcgactgtaatgatacgttcctcgcggggaatatactgggaaagtgcattcaaaaaggtagtctttccggaaccggttcccccggaaatgaaaatattgtagccgcaccgcaccagtattttcagtagatctgccgcttcctgtgagatgcttcccatccggatgagatcctccatactgatcggattttccggaaacttccggatcgtaacggccgacccgtcgatcgccaccggctccagcacaatattgacgcgggaaccatccgccagacgggtatcgacaatcggagatgcctcattcaccatacggttgctgtatcctgccatctgctggatcacatcatttaacttttctttggaggaaaacccgtactccgctttgtacagccgtcccgctttctcgtagaagatatgcttcgcaccgtttaccatgatctccgtgattgccggatcttccagcagttcctgcagtacatccagcttgcgcagggaataaaacaaggtctgtaccacggcttcccgctcccccagcgtaagcatcctctctctggcaaagtcccttacctgtgcttcgatcagctgatatacctcctcgtcctccaccgtccgcgtcaggtcgatctgctccatgatctgtctgcgcagccgttctatctcttctcccgcaatctgcattgcgcatccccctgtcccggtcttattcttcctgtccaccgatatggttccggacatagtccccaaattcactccacaaaaactgacggtacacatccattcccgcacgtatctttcctgcagaaaacgggagccttatcacctgcatccggtctgcaatgtccgccgcaggctctctttccaggtatctgcggaaatgatccatccggcagtcgtagtaaaagccgctcttcattggacaataaatactggtgcaaagccccagaaaggatagaaaatcccttaacccctgaccaaaatccaacaggaggatctcatatgacgtctgcttctccagaaaggagatcagttcctgcagatcccccgcggtcatctcccccagatcctccggattatcaaacggctctacatagtgcatccactcggtctcatgaatccctctgccaagcgtttccgccgtaaggcgctgcctgcgcaatgcgagaatcacctcgcccagatcacattctcccggaacgccaagcagctccagcatccctgaatgttccatcagattcacatataataccttcttctccgtcgacagcttctgtgcgagaaccatcgaaaacggcatctgcatttcatggcagatcggagagtaaacaccaattacctccattcccgttccgacattctccatccttctgctgccgactcccgtcagagtcatcacctgcacctcatgcagaatgacctccatggactgataacggcagattccgcggcagctttccggcacggaaccgtacgttaccgattccgcaaccgcatctgccatcgtctcctgcaagaccagcaccggaatatcgtatcccgccagtctctccgccatctcttcaaatccggtcccgcatattgcaagatccggcttctcttcctccaacgcttccaaaagcttctccggcatcgaaaatgcggatactgcatattcttccgccttgcgttccaccaggtatgtgacaaatctgtcccggtattcccggtctgtatcacagactgccaccgcaattttattcaatggcacacccccagactacaataaaatatccaattaaaatcatcgctgaaaaatgaatcagtgttctctgattcccgaatattcccgccattcgcttctgatacagcagcttccccagtccaattactgctgccgtcacaaatgccgccagtatgacatacaacaactgtctcattgaaagaaatccaccagctacggaaaataacttgatatctcctgcgccaattacacgcagttgaaataaaagaaacaataagataaccggaatagaaatgttcaccaggaaatgaacaatgcccgcaccgccttcccccagaatgcgcagtgcaagtcccatcataagtccggaagcaatcagccggttactgatccgcatctcccggaaatccgctgcgaccgcaaatacaagtaccgtcagcagcgtcagtgtcataagttccccaactcaccaccccttcgttcatttgtaaatcagattatagcgattcatttttgctttgtctataggtttttcacattttatttacatttgtaagattctcacaaaattttgagcagcaaaattccataaagaagcgcaaccccgctaaaaccaaggcttccggttgtcaaaagggtcaccggattgatgccgacagcaagcatgattccctgctgtgcgagccatttgttcacacatgcaatggtgcaggcacccagaaccgcgcgcaccagaaaatttaatgcaaaccttgcacgattttttaatatcataattccaaggaccagcacacagcttcccgcaatgatccagaatgatgtcagcgacatttcctgcatggcgtttcctccacgcttttttctatatctatgaatgtccgcgtccgtttatgccagtttgtctgttcctgcggacggacagatttttaccgttttttgtatagaatgggatttatttgcttatactttgaataagatagaaggaacaacactgccgcagacttcggcagaacccatagatctggaggaactatgctgcgtttttttcaacccgaaaaaacgaatgataatcattatacgctgctgataaacgatctgcaccagacggcacaggatctgcaggacgcctaccgcaatctggaaaacgtcatcgatccggatctgatcgactgttacatttatgaattaaattccgtgcagatgcgctacaaatttcttcttacaagcatccgcaactatgagctgcgcacacaaaaaaatccagaggatttttataccaaaaatcctctggaactatcggaatcctgacaagtctccaccagattgtcacgtccgtaagtatacccggcatacacctgctgcgtatttttcataagcggctccgaatgatcctgctcggccgcatgcacaaagccgtcatagagctttttcatgaggcggcaggcatcctcggcatctgccagatctctcttgtagagagactttgcgatcgaatctctgcagaacacatagatactgtagagattcttcgccatgtcataggagaaattgagcgccgatatcagttcgtcaatcgcgcgctgcgctctccgcaatgcttctttgtaggcatcccagtcggctgcatcgtatgccgccctggcatcatccagatatgtgaaaaaaatatcatacataaccacgaccagtccgctccggttcgcctgactgatccgcctggtaaaatctacaatctgttcttttttcaaaacggacctccgttctcatgcccctcgcgcttactgcagtatctgcagtacctgctgcggcagatcatttgcctgtgtcaaaacagaaattgccgcctgattgagcacattctgatgtgtatagttcgtcatctcttccgccatgtcaacgtccgtaagtctcgacattgcatccgtcatattttccccaaactcatccagactgtttgtggaatactccagacgattctcataggctcccagattagaacgcgcttcgctgactcttgcaatggcatcatccagacggtctaaggcacggtctgcaccattaactgttgtcacgtccagatcgtcgatatagaggctctcgcaggaaatctccggaatccggatgttcatattctgatccatgtttgcaccgatatgaagcgtcatggttcccatatctgtcacctcaaatttgagggatccgtcataggtctccaacacattgccggcagaatctgtcttggtcgcaccgtcctcatatcctgcttccaccaggaatgagagggaaaaaccgcccagatccgtgatggtcacacggttaccgtcgcactttgcggtcgcggaagaggtaaatcccttccagttcgccacgtcatccaattccatgtccgatccgttcggaacactcgttgtcgtcttgccggaggcatctgtctgctggcttccgtaaatccactgttttgtcgccggatcctgcaccagaccgttattgccggatgcgtcggacagtgcaaactgattggcaagcgcctgattgctgaaggaaagcttcaatgtggcgtcagatccgtaagcgtctgtcgtaaaggtcaggcttccgtccgccttgctgcgctcgatctgtgtctcgccgatctctccagccgtccggagcttttcgtatacttcctgatacgtatcggttgctgcgatctcaacggttgacccattgacgctcatcgtgccggaaacgccaattgccgccgtgctgttaaaatctgcaccggacgtcacctctgcctgtgttgctgccgttttgactttaatctcataatttcccgggctcacctgatctgtcacctgaatgcggctggcatgctttgtgtacactctggtgtccagcgagccgtcaagcagtgtcttcgtattgtactcggtatccttggaaatacggtccacctcattctttaaagatgagatctctttctgaatggcttccttgtcttcctgacccatcgtcgcgtcactcgccgcctgcacggaaagctctctcatacgctgcagaatacttgtcacctcacctaacgcaccatccgaaatgtgaatgacggaaataccgtccgacgcattggcagatgcccggtcaagtccgtcaatctgtgctttcatcttgcgggaaatcgccattcccgccggattatcctttgcatgattgatttttaaaccggaagaaagccgctccatggactggcttaaattactctcaatcccgagcagattcttgttcgctatcgatgccgaaacattataatttattctcatcctgtcgttctcctttatccatatctgtcctatatatcgaccaacttgccgcttcactgaatacccggcagaaaagatttcccgcgcacctgtgtatttcacgcaaactttgtttgcattccgcggcgtttcgtattataattagcacattgccgggcatactaatgtaatcatacatgcccataatcacataaggaggtatcattatgacacagatcacaaagtccacgatgattggcgaattacttcagatcgatcagaatatcgcaccaatccttttaaatattggaatgcactgccttggatgcccgtcttcccagatggagacagtagaagaggctgccatggtacacggtatcgatccggacgctctggtaaaagagatcaacgattttcttgcaaaggatctcgcttaatccgtataagaatctgcgccatgtgcgcgtttcactggcggacaccagacgaaaagggtatcccggttcccactggaatcggaatacccttttttctgttgcttaacgccgcaggacccttaaagctctgcaagcgtctgaagcgcatgatttttcaaaatcacctgatagtgttctttcatgaacgcgcctgctgccggcgtatacgtctgctgcgttccatattcagataaaatattgcacaccttgttgaactcttccggtgtctgtctgctcttgctgaccagaagataatacctgtgcgccgcctcattcttatacagatcgttattcccctgatagaagccctgcagcgtgtgcgccagtctggtgatctcagaaaaatcactgaacacaaataacttcgtaatgtctacaagtacgtttaccggagtttcttttttcttatcattctcttctgaaacgaagctatccttactgccctgtgcatctgccgcctttctgcgctcttcctgaatcctgcggaacaaccccagtatgtcatctgcaccttccggcgccggtgctgctccaccgcctgccattgcctcctcgtacacgtcttccggatccggatcggagaacctggaaaatctggtatcaagctcctccggatactccaccttggtaatcaccagaataatcgtgtcctgtgacaacggtattgcctctatcatcagcggaatatcatccgcctcaaaaccaaattcatacgccgcctgctgcatcatatcgcggaacagaagctttgccttctccgttccgtatgcaagctcactcagcttgatctgacgctctgccagatcctccctcgtcagcgtacagcgaatctgattgtcgtttactttttcaattttcatactacaccacgcctttccgtattctgaaagccaagcttccagccaaactttcatgcgaaactcccgcattacttcctttatccggaaaaccttgtaaactgtacatttattataatcaaatgctatattgatgtaaagtatacctttttattaaatctttataaactgccaaaaagctattgtcaaactacatttttcatgttataaacatatgcatgagatgcgaatctgccacactatgaaaggagcggattttgcatagaagaagttattctgttcggcaagtaccggattctttccgtactcggttccggtagtttcggtaccgtatttctcgccgagcatctcaagctgaagatttatcgggccatcaagcgaatccccagatctctgtcagatagatcttctttctccctggaatctgacttcctcgcggaagcagctcttctgaagaatcttaatcatccaggaatccccctcatatatgatatcgacgaagatgacgcctatctttatatgattgaagaatacattcagggtgaatcactcgagacgtttgtctctcatcaaaaaagcatttctgaggaactgatcgtaaaactgggcatacagctatgcgacatttttacctatctacatcatttatctccatacccgatcctgtatcaggacttaaaaccggagcatattatattatgtggagatcaggtaaaattactcgattttggcattgcatctttttttaccggtttcggaaaaaatttccaactttacgggacaagccgctactgcgcaccggaaatcctgcgcggacagcccgtcactccggctgccgacatctacagtctcggcagggttttaacggagctttcggacgccatgtcctgccgctgttccagacagcttcggtgcatcttagagcaggcatgcgccgcagatccggcagaccgctgtcaggaggcctgcgatctgaaagccgcactgcttcgtgtaccattatcagagaatcagcagtcttcgcatctcattcggaacattgccgtcatcgggagcagacccggtgcaggcgccacgcatatttccatttctcttgtcagcaccatgaatcaaaaacatattcccgcaatctatgctgccgcggacgggagcgcatcgcttctacacgccgccagggcaaatcatcgtctgatcgaccagagcgggatctttatttatggaagcttccgcgggattccggactatggggacagtatatctgtttccgttccgccggatgactgcgttgtaagggactatggcacccgcgcgcccgcgcttgccgagctggcttcttttgacctgattcttttcgtcttaaacggaggagactgggattttgtacaggcagccgcctatgggaaacagctggcactgctgccacagacacgttttctctgcaatcacggctgctgctctgccgcaaaggcatacgcacggcagttaggtcaccgcgtctactgctttccggaagatgcggttccatacgatacaacacccgaaaaggaacggcttgtttcgtccatcttaccgaagaaaggagggagacggcatcttctattttgatcgcaacgaaaccaaagcacacatcaccatcggcattctcggatgtcatccgggggctggcgtgacacagctcgccataagccttagcacatactgtgcctccaggcgaagactgcgcaccgcttgtcttgaacttcacaagcgcagcgaactggcgcggctgattccggaatctgctcttgcggactccatacaccgccatgccttacaatgcagcaaagcgccggatgccgcggacacttcaaaggcagagttttttcacttccgcctgcacggcgtggattattatccgaatctggcaccggatgctgtgcctcgcctgctgaatatggggtatgattatctgatcctggatctcggcagcttaaacgaatccgctgccgcagaattcctgcgctgtgaccgcaagattgtgctaggcagtcttgcactctggaaaacctggagttatgaggaatttttcaaacaatttgacagctttacaaaccttggggaaggttatcattatctggtacagatgggaacattccagaatcattccgttttttccaggcagcactccatatccatgcaggaggttccgttcatcaaaaacccttttcatatagagaaggagcactttctattttttgacatacttctgtcattttattcattgtaaccgcaacacactgtctgccggggatcaggcagcgcaatttttctttatatcacgaaacgtaaccagcgaattccttttggtatttttcagatttgggggaatctaatgtgaatgatgaacatatgcaaagactctatctggagcttacgtctctggagaatcgaggcattaccatctggctggagggcgcgaaaagcagctcgcaggatgtagccagccagctctgcgtgcaggaggaaagcacgtacatgagagattatatttttgacgagggggtgttaaaggaagtccattttgataagatcagaaaagatcttccgtaactagtcgtaactggaacagaatgactgagttcctcaatgcccggtcatactgtctatgcagtgaatattatttgataaaaagacagccgggaactgccgcccgagttcacaatctcccgcggccggttcccgtttttcattctgcggcacgcaaaaaatggcagatgcaaatagctttgattttgtgctgcaatatgctacaatgtaggggaaatctctcagaagaagaaaggatttttccatgaagaatacaaaaaagaatattataccggtcattgccgttcttgttttaatcgtcattatcattctgttcatgctgctcggacgactgatcgaaaaatacacgccctccaaagagcaccaggagttatccgagtattacgggcttgcatctgatgattccgtagccctgatctttaataatgaagtgttgtctgtgcaggggcgactgatcgacggaaacgtatatctggattttgagacggttcacgataagatcaacagccgttttttctgggatgccaatgagaacaagcttttatacaccaccgccaccgacctgatctcggcggatgcggagagcacgacctactatgtgaccaaagacgcccggacgttagatcacacgattgtaaaggcagatgcctccaccgcatatattgcgatcgatttcgtaaaacagtattccgattttgattataccgtatacgatcagccgaaccgcgttgtcctcacaaaccagtggggcgactacaacaccgctcctgtcaagaaatccacggagctgcgctatcagggcggcatcaagagtccgattctcgccgaccttgcaaaaggaaccgtgctcacggttttagagccggacgagacctggacgaaggtgatgacggagggcggcatcatcggctatgtaaagaccaaagccctcagcagcacctccaccgcgacccggaccagcgactacactgcggaagaattttcgcatattaaaaaagatttctccatcaatctcggctggcaccaggtgaccaacagcaatgcgaacgcaaacattgcgaacgtactttcaaacaccaagggactcaatgtcatctctccgacctggttttacttaaaggatacgaacggaggcatcggttccctggcaagttctgattatgtaaactattgtcaccagaacggcgttgaagtctgggcgcttgtaagcaacttcggcgccaaggatcagggactggagagtccggataccacgcaggtgctgacctacagttccagacgtgagagtctgatcaacaacctgatctccgctgcgatccagtacaagctggacggcattaacgtggactttgaatcgctcgacccttccatcggtgattcctatatccagtttatccgggaattatcgctgaaatgtgccaacaacggcattgtcctttccgtcgataattatccgccaacagcttacacggcattctataaccgctccgagcaggcagtctttgccgactatgtcatactgatgggatatgatgagcattacgcaggttccgaggaagccggatcggtggcgtccatcggttttgtcaatcagggtgtcgcagatacgctccaaagcgttccggcagaccagctgattctcggtatgccgttttacacacgtgtctggagcgagactccggtatcggacgatggcgcggctgtcagtacaaccgagaacacctccgacagtgatacactctacgagctggactgctactcggcaggcatgaaagaagtccagaacctgatcagcacgaacggagccgttccggtgtggtccgacacagacggacagtattatgtagaatacatcaacggcggcgtcacctacaagatctgggtggaggatgccacttcacttgaggagaagttaaaggtaatgcagtccaaccagctcgccggcggagctttctggaagcttggtctggaggatccggctgtctgggataccattatcaaatacatcaactagccgttctaacccccggggatcgtgaatatcattttatgaacgaatccccgggggttttttatttcatgaaaaaaaagttggaacttatcatgagcctctgtcttctggccgctgccttcattctcgcaaagcagggcgccgtactggtccagagtgaaaaggcggcacgtgaaaaaatctgtattgtcgtcgatgccggtcacggcggaagtgaccccggaaaggtgggcatcaacggcgcactcgaaaaggacatcaacctctccatcgctttaaaattaaaagatcttctggaacagagagaaatctctgtcgttctcacccgtgattccgacgccggtctctcacccgcagacgccaccaacaaaaaagccgcggatatgcagaagcgctgccagataatcgcggacgccaatcccactttcaccgtgagcattcatcagaacagttacacaaccgaagacatcaaaggcgcccaggtattctattacgggcagtccgaaaacggcaagcgcttagcggacgttctccaggagcatctgatttccgaagtcgatccccagaatacacgcgtcgccaaggcaaacgaaagctactatctcctaaaaaaaacacccacacctacggtaatcgtagaatgtgggtttttaagcaaccagagcgaagccgatctgctcctgaccgaagattatcagagcaagcttgctcatgccatctatctggggattctctcctatctcgaagaagaatccctgctttaactgttttatgcatccgctccctgcgcatctgttccctgcaaaagatcctgcacctgccgcacaaagctttccgcaatatggtatagccttgttgtctgcacctgatacgtcgtatccgactgtttctctgtggtctcctgctgttctggtgcatccacgccaaagacgcctgttgaaaaatggttcagatccagatctgcgatgcatgcatagtgaagatctgcctcgtttccactgtccaatactgccgtaaggctctcctgccggctgtctaaaagttctttggtatcctcccggtccgatgcaatcagaccgctgacgccatgctcttttgcctggaacgttgccgcaatcttaccgtgaagcttggtttccatcgtgatgtcaaccagccctttttcaccatccccacgcacgaccttcagcgaaatgccgacaacaccgctctcggtctgcaccggtattgcatactgctcttcttttgccatcatactgccgatggataactgtgccgacagcagacgcatctccctgatatcaagacttgtcacgtcatcgctgtcgatcattcccttcattacattctcagcaacctcagcaagctgttcctgtgcagcggcaagcccctccgggcttgcgattgcctctccgaaatcctcaagcacctgctccttcgcccgggcaagctgctcctcattttcctctttgtggcttccctttgcgctctcgccgaagatctgacggaatacgccgttccggtcatttaccatggcttccatcgccatgacgttcgtcatggtattcggaatgtcgtacttctgcagtaccgtgtaaatatcctgcgtcattttcgcgctctgcgataactgatccagctgctccttcgcatatgcataatcctggctggcatcgtctgtctgtgcctgcgcgagcgcctcctttaactgctccggagtcatctcctcccagtccggcgtctgtgatgcgacaaccttcatgcgctccggtgtgagcagatctgcgacatctttcacgcagttgttctgatatgccgcttccatctgatcggtgatggaagtgccggaatatccactgccttccacttttccaaaggattcatccacactgtaatccatttttccactgcgcctctcggatcggaccgccatcatcagattgcgcatggtgatatcggctccctgatttacaagcgctcccaccgcggcgccgtccgactgctctacctgatggatcaggcgatacgttccgatataagaagcccgctcttcctggctgattccctccgtgcgttccagcttccacaaaaattctccaaagccgcgctcatcgttcgcactggtctcctttttaatctgctccgcggtcgcattcagcgtactaaaatccatatccagcggatcgattcctctgcggatcatctccgtcaccgttgccggcgtcaggttgcggaatacacgctgcacctgctcatccgccgctttcatctccgccacggattcctgtgtaatttcaatctggttataaccgaggatgcgcaccgcacgctgatttgcctccgtcgcctccagtccgatatcgctcaaaatatcatccacattgcggaatgccttctgaatcgaatctcccaggtctgcacgtggtgccgtcatcagggtctcataactctgatttgcacgctcaaaggtatcccgcatcgcacgtccggtatcatgaacctctgcgacagacgcatcctttactccctgcgctcccagcacgtatgccggaaccgtttttaaatcgttgacacgctctgtggtctcacggaaaagattcacgttcgtctccgaagcttctacaccctgtcccttcaacagctgttcgtaatattggttctccgtctccttcaaagcttccacaagctctgccagcggcagggtatcaatctggattccctttttcagcaacgcatagtttgcctgcgctgtcatcgcaagacgtgtctcctccagctgtcttctggcggtcagcagatccagttctctctgcgtataagcagtgctgccatccgcactgctctctgccgtctcctcctgcgcatctcccgaagcgctatccgccgtctcctcacccgagcgatgtgccatcgcttcttttaagctgcggatatttaactccatgccgtgatccacgacatatgtgacatcctcatccgtcgcttcgccgatcacatcgcaggcatcctgcgccttatccgcaaatgattgtccatccacaagcagtgcgtcctgcgggctttttccttctgcaaccgcagccgccatactgcccagcagcgcctctgcctgcactggcagactgagatttttcagctccatatagtaagcaagattctcctcattgagcggcacgctattgtccagcagccactggcacgcctcttttgatgtatcatccaccgaaagcccggcgcgcgcaataatcgcgtcaatctgatccgaaaacatcgtcatatcgactgctgcctccggatttgcctgataagcagcacttccgctgtactctgccttgtacaggttgccgatcgtgggctccatcccgttatccagcatatacttcactgcgccgtcccccggcgtctgaagtgtctgcgccagtgagagcgcctccatcacgccccgcacattttcctcggtgcacgggaggtcggcttccttcattgcctgcgccagctgtcttgcaagcgcttcgcttccggtaagcgccgccatctgctcgtaatccagatcatctccaaagaaagagatatccactcccgcttttgcaagctgtgccttaatcttatccgtctcggtcacaatcgtattggtcgtcgtatcgtccagtgaaaatccgtcttcctgcattttcgcataatcttccggggaggtagtgttggacaacaccgccatctggttcttgcgctcttcggcatcaagcgtcgcggacgcttcgatctcctcggcaaccgtctgcttgtcttccgctgccggcttggcataggtggcatcttttaaattcacggatttcgcattgtcactgacactgcttttttccacggcagctcccgcggctcctgtggtatattggctcagaacggccccgctcttttcctccggtccgatactctgctttacaacatctataatattctggctctgctgctctactctcatcctgtgcactccttttaccttttcagctgtggttctatagagtaatcgaatatgaagcataaaaatggcgcataacactatgcgccattcatagctgatatatatatcggtcatatcagcaccattattaagctgttcttcgcatttcaccagcccccgaaatgcaatcagtaacgaaataccgccacgccgtacggctccagaggatacgcgatcgagtatggtctgccgtcacattcggcctccaccgccttgtaactctgcggacgctgtctgccgcatcctccaaactcttcggagtcactgtccaatatcagcttgtaggtcttcttggcaggcactcccactctgtaatccggtcttgccaccggtgtaaagctgcacacaaagagcagctgattttttccgtccttgctcttgcggatgaaactgtagatgcttctgtccgcatcgttcgcattgatccactcgaaaccgccccagctgctgtcgagctcgtaaagcgccggattcttccggtaaatatgaagcagttttttcacccagttctggatatgcttgtgatccggattgtcgagaaggaaccaatccagctcacgctcctcactccactcgcgaagctgtgcaaattcctgtcccataaataaaagcttcttccccggatgtcccatcataaacgcgtagcctgccatgagattgcggaacttatcaatgccaagtcccggcattttgttaatcatggagcatttcagatgtacaacctcatcgtgggagagcaccagaatgtatttttcgctctcattgtagctcatcgcaaatgtcatcttgtgatgattatccctgcggaagtaaggatccaacttcatgtaatccaaaaaatcatgcatccagcccatgttccacttatagctgaaattcagtccgtcatcctccaccggtccggtcaccttcggccatgcggtagattcctccgcaatcatgacagctcccggatttcttccgagaaccagggtattgatatgtttaaagaactcgattgcctccaggttcttattgtcgccgtactggttcggaacccactgaccggcctcctttccgtaatcgagatacagcatggacgccaccgcgtccacacgcagaccgtccacatggtaatgctccacccacagcagggcgctgccgatcaggaaattcttgacctcgttcttaccgtaatcaaaaatcttagtgccccagtccggatgctccccttttctcgggtctgcatactcatagagacagcttccgtcaaactctgccagaccgtgcgcatcctttggaaaatgtgccggaacccagtctaagatgacgccgatcttgtgtctgtggcattcatttacaaaataagcgaagtcttccggtgttccatagcgcgaggtaggcgcataataaccggttacctgatagccccaggaaccatcgtacggatattcgcagattcccataagctcgatatgggaataccccatctcagtcacatacggaatcaaagattttgccagatcccgataactgtaaaatccgtcatcctgtctgcccggatgacgcatccaggatcccgggtgaacctcatagatggcaagcggctgttcatatacatcttccttgtgtgtggcgcgctctttcatccactcggtatctgaccacttaaaatgttcaatatccgtaactgccgacgccgttccgggtcttaactccgcgtagttcgcataaggatccgccttgtataggcgctttccgtccttcgtctcgatgaggtacttatacagatcgccctcctcgacacccggaataaacaattcaaaaatccccatcgtctccggctccaggcgcttcatttcattggcgccctcatcccatccgttaaaggaaccgatgacccatacacgcgcggcatttggcgcccacagatcaaagcagactccccggatgccgtattcatctgtgggatgcgcccccagcttccggtaaatctcatagtgtgtcgcctgcccgaataagtaccgatccagctctgaaaaatttgccatacccatctacccctttatcttgattttaaaatccaaaatctttttcatgaaggatgacataatcgtcatcgtcatatcttctggaagtgataatactgaacgccttcttaagtcctccccgttctgcatgggcgattgcctcgtccacaatatccttgacctctgtaagggttgtcgcctgatccagcttttgaatattgctgatgctgttgtaaagtgccagaactcccatctcatcgatggtgtatcccagttcgttggcataggatctcgcaaacgccaccagttcgtcgctcgtaaagatcgggatattgattttctccgaaaaccgtgctgcaaatcccgcatcccggctgagtgccttctcgattcctcttctggtgtcctccataatcacaaacagtccgctgttgtcactgtcaagcagcgtgccaagcttgactgccgtctctcttgagatggctcccgccttttcgataatcagacatccgcccgccacttttttcaggagcgccgccacatctttctgattcagcacggaagcttcgatcttgccgatttttccattcggcttgcccacttccttctggagcgccttaatcatgctggtcgcgagcaccgtcttgccgcttccctgtccgccctgaataatcatattcccggtggaagccgttttaccggacgaaagtcttgccgctgctcccgtaagcgcctggcacagctgctgttccattcccttaatcggcacaaaatatgtaaaaatctcccgctgctctttggaaagccggataattgcctgatgtccttcctcctccggctcctcgatcttcggaagcacgtcgtctgccgctttcgcttttgaagctccgctcttcgggtgtcccccgcctgccagctttccgccggacttctccgccttcggaagttcctcgtcctccggctgtatcttctgctcttccatcaatgcctggatgtcggctcccagtgctgccgtatccggctcttccatcccggcagcatcgtctgtatcctccggttcttccgccgcctgtggctgcgccgtgtcttttgccaccgcttcctctgccagaagcgcctggacatcggcccccagggtaaacgtatccgggtctgtctcttcggtatagctgcccggaatctccggttccgcgattccgccatagcttcctgccgcatctgcctgttccgtctcacttaccaccgcatctgtctgcggttcatataccgcccctgtctgcggctcatataccgcctctgcctccggtgcgtataccggctctgtctctgctccgtataccgcatctgtctgcggttcatatgcagcctccgccgcaagctgctccgcatctggttctatctcatacgggctctgtgtcagctctgtgatgccgttcccccagaaatctgcctcctccggctgcaacgcttcctgcggctccgccacacctgctgcctccgccgcacttgccgccgcaagctgttcatccattctcgcattctcggaggataagcggtcgatctcctgctgtaagatctggttcatgttcgccaccatctcagccgccttatcgtcagcaatcggctggccgcccagatactcttcatccagcagatccttcggtgtcagtccggagtcaagcttcggaatcacatccaccagacgctccatgatatcgcctgcctcctgcagtgcacgcgccttcgcggattccagcttgcgctgcttcgcctcctcaagcgccgtctctgccgcacgcttggtcttctcccagtctgcaagcacctcatcaatactcatctgtcccgtcacctgcggctctgtagcccccttatccggaacatacatgctgatctgtccgtcataatcctctgcaagaagctctttaaaattgctcttgagcgagttgtcaatctctgcatccgtctcgatatggggcatctcgatcgtatcctgcggcagcggttcctccttgggaatctgaagatacggaatctcctccacgagcttcttgatcgtatccatgctgtcctcgaccttttccttgtcggtcgcttccatgatctgcaccatattcttgcgaagttcatcctgcagattctgtgtattaaaacgctccggtgaaagctttaccttcggtatctgcaccggttcgctcacaatctcgccggactcaaggtcgtcctccggccgcacttccacaacgccctcttttttgaggcggaactgccggtacttttcctcctgctgtctggtcagcggctgatagagcatcttaagctccagcgcccgctccacataaggtccgtctccgaaccagagaatcagctcatcgcaggcgtcgatgcatttttcgctcatccccgccttatggtaaaggcatgccagctcaaatgcccactcctcggaatattcctgctcttttaattcttccagtattccgatcagcgtctgcagatcggcgccctccgccttactgatctcgtagcgcagaacgtatttgagattgtcgtgcggggcgatctccacgaattcctgatagtagtctctcgcttcctcgcagttccccatcttgatggcaacctccgcaagccggtagataatcattcgtccgatcggggatctgtcatacgccatgagcagaatgtccctgctctcctcatatcttcccacattctcgtagatttctcccgccttaatcagtgcgttgacgttttttattttatgccagttgatcgtgtccgcaatctccgcagcggctttgtaattattctctgcggtaaaggacttcatctgatccagctttaatttatattcgtatttatccaatttgtgccacctcaaactgtgcgattttcactctttttattaccttttagtttatcatacgcactaatagatgtcaaaaatattcgtccgaaaaggctgtcacgcagtggtgtgctgcctgtctttttttattggaattatcttactttttccagacatgaaaatacccccatataggacttttatatttcattgtcctatatgagggcagcatattatttttcaagtgattcttcgattttttccccggtgtctttctctgttttttcctcatagacaagctcgtttgtcctcttgtcaatgcgcatcagatgaatgtagcttcccgtatcgtccaccagaccccgctttcgcagaaaataagataccagcttctgcgccacatagtagattactgccatgagcggcacaccgagcagcatgcccgggaatccccacagcccgccaaataccagaatggcaaataccacccagaaggaactaagcccagtagaatcgccgaggatcttcggtccgataatattgccgtcgatctgctggagaataaagatgaaaatgagaaagtacactccctgcagcggattctgcaatacaacgataaggaatgacggaattgctccgataaacggtccgaaaaacggaataatgttggtcacgccgatgatcactgcaagcaggatcgtatccggcattctcataatagtgagcaccacataggcaagaataccgataatcgctgaatccagaagttttccggaaataaatccgccaaagatttcgttgctcttgcgcaccgtctcaacgatcacgttcgcacgtaccggcttgaacatggcgtaaatgattttcttcgcctgtcctgcaaacgtctcctggctcgccagcacataaatggacacaatgatgccgaccaccagattcagcagaaactttaacgtatagatcacaccgcttgcgatcgacgtcagataaacctgaacctgcgccagcagatcattttcaaggaacttctgtacggcatcgcttgctttttgcagcacatcgtttataacacctacaatctccgaatctcccttgaagaattcatccgaccagtccatgatattcttgacctcgctcggaagcgccgtggcgatcccctgtatactctgtataatagaaggaacaatcgccgcgataagcagtacaacgattccccctaagaacacccacgcccccgcgatcgcaacgccgcgcgacattttttttgcttttgttttgctcttcatccgcggttccaacagcttcatcagatgacgttccagaaacttcattaccggattgagcagatatgcaagcaccagccccataataatcggctgaagaattgtggtcagctttttccagaaatccgcaaacccgttgtaacgatatatcataaagaaaaacagtatgcaacagcaaaacgtaataaacactaccaacgcgattactacatattgctttaaattccatccgccatttctgtcgccggaagtattgtctgtctgtcgtctctcactgtccatagtaaacctccttgctgttcctctgttgtctgccgcttctgctctcgcagtgcacgtccggtcagcttttcacgcctacggcaaaaggtccgaaaaacctacggttttccggacccgctgacgcgttcacatgcatcggatccggctgccgctgcaagcatctgcatccgtttcgatgcatgctcacttttgcctatgtgtacattataccccatgcagggaggttttccaatcgctattctttatttgccgctaatttaatgttaatttttcaatgactgccttcagctggtctgccgacgcaagaagtgcatttttctccttctcattgagcggaatctcgagcaccttctcgattccgttcttgccgaccaccgacgggatgctgagtgccagaccggacagaccgtactctccctgcagttccaccgacaccggaagcacggcatgctcatccttcacaatgctctctgcaattctcgcaaccgccatggcaatgccgtagtaggtcgcacccttgcgctctatgatctcataggcgctgtcgcgcacctcctcatacaggcgctccatggatgcctcgtggttgaaatgtccccgcagttcgcagaaatgattcagatcgattccggacacattcgccccgctccataccggaagttcgctgtcgccatgctcaccgatgataacggcatgaacgctgcggctgtccacatccagatgtctgccaacctgatatttgagtctcgccgtatccaaaaccgtaccggagccaaagactctctccaccggataaccggatatctgctgtgccgcataggtcagcacatccactgggttggcaactatcattaaaattccctcgaacgccgtcgccgtgatctgcggaacgatcgattttaaaatcccgacattcttctcgatcagatccagacgcgtctctcccggtttctgattcgctcccgcggtaataatgatcagaccgcagtctgccacatccttatagtccccggcatagatgtccatcgatgccgtgtagggaaggccgtggcttaaatccatcgcctccccctccgcttttgcgtgattggcatctatgagcaccatctctgaaaacagtcctttctgcatgagggcaaacgcgatggacgcccccacaaaaccacatccgattactgcaacttttcttggattcatcatcattcatttctcctttctatttcacacacgcggtcgttttcctctatgttctattgttacacaaccccgtgttttctatttcttccaaatcctaccatagcaccaggaatttgtctgttgtatttacaacagaataaactttttggttagttaaaacaaactccactgtaaaaacacaggcagtgcatttcttaacactgcctgttctctctgatcctattgccacgaaacggacttatccgcgataataattgatcagacaaccttttaagataatctctctctcgtcgtccgtcatcgcacccagtcccagcttaaattcctttaactcagaacccttcaccacgtatgcggtaatctcgctctgcttttcttccactgccttgcggatgtccggcaaaaacagataatccagattctggaacggaagcgctccctccggaatgacaaacggaagcataccccagttgataaggttcgagcggtaacgctttgtcgcgtactcattggcgatgtttgcccagccgccaagcaccttctgacaggacgctgcctgctcacgcgcagaaccgtcgcccggcttcaccgcgaaaatcgtacttccgaagccaagtgttcccggcttcatctcttcgccaaacgttttctccggaaatgctgcacggatcgcatccattaccgggcgcagttcttcgactgcctcaaccggacatgtgccctcctcgactgctttctgtgccttctggatctcctttgcacgtcccacgtactgcgggtcttttctggagagtgcaaactctgccagtccgagcgggttcgagcggaaagaagaggtctcgccggaaggtatcagctcatctgtcgtcgttaccggatcatgaatctccgatactacttttaataccatattctccggaagcgcactcatcgccggccagtccttaatgttcggtccgaactggatctccacggacggatctgccacgcccttgctgtcgaagacacggtttgcatagatcgcactgtcaaaatgatacttcggcttggaaaaatctacatccacgtccgtagctgccgtcaaatatcccttgtttgccgccgtcgcagcgatggaacgcgcgtccataagcgccacggaagcaacctgtcccttctgcaccttggaaccctcgcggttcgggaagtttctcgtggagtggcggatggaaaatgcattgttcgccggcgtgtctcctgcgccaaagcacggtccgcagaatgccgtcttcacaatcgcgcccgtctccatgagcgtggcaacggctccatttttcaccagttccatataaatcggcgtacttgccggataaacgctgagcgtaaactcatccggtccgatcgacgcaccctttaagatgtccgccgcatcacagatattctcaaaaccgccgcccgcgcagcctgcgataataccctgatccacatacagtctgccgtttctgaccttgctctttaagtcgagcttgaccgcaccgtcaaagcttacctctgcccgcttctcgcagtcatccagaatatccatcaggtttgcgttcagctcctcgatcgtgtaggtgttgctcgggtggaacggcatcgcaatcatcggtttgatctcatccagattgatctcgatcattccgtcatagtaagcgactgctgccggattcagttccttgtaatctccctctctgccgtgaatctcatagaactccttcaccgcgtcgtccgttctccagatagaggaaaggcaggtcgtctcggttgtcatgacgtccacaccgatacgatagtccacactcatgttggaaacgcccggtccgacaaactccatgaccttatttttcacataaccgcggtcgaacacctcgccgatgatcgccagtgcaatatcctgcggtccgacgcccttgcgcggtgtacccgtcaggtaaacgcctactacgcccggcatatcgatatcgtatgtcttagagagaagctgctttaccagctccggaccgccctcgccgactgccatggtaccgagcgctccgtatctcgtgtgggaatccgatccgaggatcatcttgccgcctgccgccagcatctctctggcaaactggtgaatgactgcctgatgaggcggcacatagattccaccgtagcgctttgcacaggtcagtccaaacatgtggtcatcctcgttgatggtaccgcccactgcgcagaggctgttgtggcagttcgtcagtacatacggaatcgggaacttctccagtcccgatgcacgtgctgtctgtatgattcctacgaacgtaatgtcgtgggaagtcagcttatcaaacttgatctgcagcttgtccatattgccggatacattgtgatcctttaaaatgccgtatgcgatcgttccctgcgccgcctcggcttttgtcacctctctgcccgtcctgctctttattgcggcagctgcctgcgcgtcatccacaaccagttccgttccgtttaccagatatactccgctgtcatataacttcatgatttcctccttgcccttatcatagcctttcaaaaattatatcggtcttgcaggtaaaaatcaagcactttcgcgctttatcatgacaaatcgccgtcttcaaacatcagtatgatatcaaagagtgtacccgcttttgccgcgatgcgttttgccgtgtccgcatccggttccgccagatccggcaccatgaccgtccggattcccgcatccgttgcggagcgcacgccgttgggggaatcttcgaccgcaatacagtccgcaggcgcttccccgatctgctcacaggcatagagataaatatccggcttgggcttgccgttctccaccatcgttgcgcacactatacggtcaaacttgtcgtagatgccgattctggtgagataatcctttgtgcgcgccggatctgtggcagttgccaccgccgtcttaatccgatgcgcccgcagatagtccagaagttcatccacacccggctttttatcgatcccgttcgccgcgatgtgcgccttcatcagttccttgcgccgctcgcggatcgtccagtacgggaaatccgctccaaaccgctcctgtagaaacggcgccgcatactttgccgcgagactccggatcgcaagaccatcctccaccgtcatatcataccccgcctccgctgccgcctggcgccagtatttgttcagccatttttccgtgtcaatgagtaccccgtccatatcaaagatcactgcttttaccatatcactgccccctttcttcctgtccctccacatagagcggaagagcgatggtcgccttaaacaggtctccatccacagaaatatcaaacattcctcccataagaagcgtgagattcttcgcgatggaaagtcccagaccgcttccctccgtcgttctggaggaatccccccggataaaccgttccgtcagatcttccacttcgctgttctctcttgccagtgaccgcgccgaaacattcttaatagaaaagacggcacgttcttcgtccgcctgcacttccacatagacacgcgtcttttgaagtgcatacttggcgacattattatagagattctcgatcacgcggtagaggtgccgtccgtctgaccaaatgtagaccgcctggcgcggaagcttcgtcacaatcgtaagttctttgtcctcgaacttttcattgaattcgccgccagtctggcacaccagttccacaatgtcgatcttgtgcatctcaagcttcacatttcccgagctgaccttggatgcctccacgagatcctctgtgagctgctttaagcgctgggacttttcgtccagaatcttcacataatttttcacgcgctcgttgtccacatcctcgcgctgtataaggttgacataattgataatcgatgtcagcggtgtcttgatgtcatgggaaacattggtaatcagatccgctttcatgcgctcgtttttcgtgctgtcgtccacggcatgcaacagtccggcaccgatattgttgatcgtctccgccagcttccggtcctcaccgtgaagttcttcgacgtcaatcttggcagagagatcaccgtccgcaatctcctcaactccctgcaggatctgatagtgctccaccgctttccggagcagaatgtacgcctccgtggcactgaacaaaagcagtgcgatcagcgccggcacatttctgtagtaaaatgctcccgctgccaggaaaaagcagacgatcatatggatcgcaaagatcatcaaaatcttaactgtgacagacctttcccggaacgtcttctcaatcccgcgtccaagccagcacacaaggctgttctcccacatcacttccgctttcaggcgacgcaccatactcagatagaagataagaaacagcgtatcaatgagaaaactgatggtccctgatgcgacaaggagacctgcaacctcccattcccggctgcttgccctcgcaagcagcataaccagctccgccgataaaaacacaaagccagcaatcataagttcggtcttgatgcggtcaatggagcttaaggcgatgccttcctccccctccttgtgtcccgctgccagtgtcaggtacacaagcgtcagaatccagcccaccacactgataattgcccctgcaatgctcaccttgatccacggatgaagcctttcatattctatcttggcatcccgcagatcatcctctgccgaaagctgtgtgtccacgccgatgacaagcaccacgtcttccaggggccagtagatctgattgccgttattgctgaaaaaataattctccagtcctcggatatccgtgccgaattccttgtcttccatatcgtaaagcagataatctcccatggtctttgcctccatgagaaccgtctgcgtatcgaactgctgaccctctctggtatccggctgattagtataccacgcaccattgatcttataccagtaacaaaaatttgtactcttctgcttaaattcattggtatactgcagatagcgtttctcatcctccgctgtccgaagcgcgcctttctgcgtcagaagcagataatcgttcagatcattgcacttctgctccatgcatttcagataatacccggaactaaggaaatcatcggttccaatatcggtaagctccagaatattcttgctgacaagcgatgccagaaggaacacggacactgtaagaacgattgtaaaaaaggaatgaaggagcactcccgttattttcattccgtaactgtaggatcttttctccataaagacgctcctctagttcttgtcaatcttatagcccacgccccagactaccttgaggtagcgcggctctttcgggttgatctcgatcttctcgcggatatggcggatatgaaccgccaccgtattgtccgcaccgatcgcatcctcgttccagatgctctcatagatctggttgatggaaaataccttcccctgattcttcacaaggagaagcagaatgttgtattcaatcggcgtcagcttaaccgtctccccgtccaccgtgacctcttttaaatcatcgttgatcgacagaccgccgacggtatatacggacgcgtcgttctctgccgcattgccaagctgcgtataacggcggagctgcgacttcacgcgtgccaccagttccagaggattgaacggcttttccacataatcatccgcgccgatattaagtcctaaaatcttgtccgcatcttccgttttcgcagatagaataatgatcgggatactgctctcctcccggatctttaacgttgcccggatgccgtccagccgcggcatcatgacgtcgatgatcagaagatggacttctttttcttttaagatctcaagcgcttcctctccatcgtacgcctttaatacctgatagccttcctgctgtaaatatatgtcgatcgcttccacgatctctttgtcatcatcacataccagaattgtctgcattctcttctctccattctaacgtggcagatatcgcactgcatatcagcctttctattgcctgttttcttcattttaacagacacgcgcaaattgttatagaggagatttcttaattatttttaaaaatctgcgcgcaaaattaagagaatctttattgcgggcggcatattcccgctttaagataagcaggtaacccaaccatgcttttattctggaggatctttgatatgaaaaagaaaaaaacgaagaaacgccgcagagtcattttgctgattgcagaaattattctgattcttctgctgactcttttgttgtttgcagttgtaaaactttcaaaaatacagaaaacaaagcttgacatggatcaggtcgccatcaatgaagatctgtcctccgaaacaatggatgccatgtcagactatcgcacagttgctctcttcggtctggacaaccgtacaaacaattccctgtccaaagggcggagcgatgtcattatgctcgccaatatcaacaacaaaacgcacgaggtccaactggtctccatctaccgggatacctatctggacaccggcagcggagtctttgaaaaatgcaacgccgcctacgcaaaaggaggacccgagcaggcgctctcaatgctcaataccaatctcgatcttgcaatcacagattatgtgacggtggatttcagtgcaattgtcgaatgtgtggatctgctgggcggcgtggaaatgacgatcaccgatgacgaagccagcctgatgctcggctatattcaggaattaaaccgccttaccggaaataccgcttcctgcccgtcttccggcggaacttacaccttaaacggtgtacaggcaacggcatttgcacgaatccgttacggcggcggtgatgattacaagcgcacggaacgtcagcgtgcggtactttcagctatgattgccaaagcacaaaaatccgatctgaagacgctcaacgcactaatcaacactctcttcagcgatattcagaccagcttctccaatgcggatctgcttgcactcgccaccaatatttttaattacaagctcagcgagaccaacgggttcccatatgaaaaaaccgcccaccgctatgacaaagtgggagatgtcgtgattccctgcgacctatcgtccaatgtcacggcacttcatcagttcctctatacagatatggcttacacgccttccgatacagtgaaaaacaacagtgaaatgatcaccagcaaaaccggttaccgcgagggcgacggcttctgatcccgcttcaaatgggctttctgccatatcagtgacaactgcgcctttaatgataaaaatacacctgctatgatattctttatcttcagcgggtgtattttttcatgtcctgcatattctaagtagtatcattttcaacttacagttgaactcttcataaccgcaagtatgggaaaagtgcactagactaagcaggaaagcgaggcgttgattatggacaagaatatggcagaccgtttaattgaattacgtgaaaagaatcatctgtcccagagtgcagtcgcaaatcgtctcggtgtaacgcctgccttaatcagcgcttatgagaaaacggagcgtaaccccagtctggagcgcctgatcgcactggctgatatctatcacacatccacggactatattctcggacgaaccacgaccgattcctacgctacgatcatcgaggtaaaagacctcaccgatgcgcagatccgtattctgcgtgaacttgtcgaagtcatgaagcacacggacgctacccggtcgtagtgtcactctttcttttgtctcttttgtctgtccctcctcttctcctgtgtcttttattcttatcccttttatctgtgtgatctgtattctgttccctcttcatctggtctttttcacttagttcccgcgccatctgcagaagaacctctgtgcggtcgccgagccgggcatacgcctgatcctcccggattcttcggattgcaaaatgcctcttggcaaagatgacgatcatgtcaatgatcagataagacagcgcaatattgggcgtaatccctgtaaaatagtaaaataggatgcaaaaaattgccggtccgatcaataccagcgaatacaggttgttgcgctgtatgttcgtcataagataaaaccagctctcttcgggatccgcatccacccagtgtgcgcgttcgtatgcaaatctttcccgccttttcagaattctatctctaatactcatgtcctgtcctttattctatcgaattgatactgttttagacattttaacatagagttgaaatatttgcaatctataggtgtagtttttatttcttaatttttccgttctccgccaaaataccgcacatcgtatgtgttacagattctgcgtatctcgatgacgcccaccaccgctgcaagcacgccgctcgccacattgctcaccgccatgacaatgccggcgctgacgtttccgagatccgtgaactgctgcaacgcccaaagtaccggcactcggaacagaaagacacggcagaagttcatgaccagcgtcacacgcgtctttccaaatccatagagcaacgccattaccgccgcgttgacgccgagcgggattgctccgaccgcctcaaaccggtaaatctgtttgatcatctcggcaaactctgcattgtccccggcaaagagacctgccagctggtttaagcataacagtgatgccgtcatgatgaccagtccgatgagcatgtcaatgtaaagcacccagcggaacgccaaaagcgcgcgcttcggtctgccagcccccagattctgactgataatggaggagcctccctcctgaaatccgttctgcgggtttgtcgtgatgccgccgatattgttggagattccaagcgctcccaccgtccaggaaccgtagacggtactcatcgaattgacaatcacctttccaaccgcaaacgcaatccgctccacgatgaccggaaacgacagcgtgagcatcgggcagatgacctccttttttatggagatggcacgcaatgagaagccaaacgcatttcccttctggttcatattgatgcacgcagcgagaagaagaaagctctgtgagatgatcgtcgcacaggagatcatattgatgcctccgtccagcccgtagacaaaccatgccgtcagccccagtttcactacgatgaccgccgtgttgagaatcagaatccgtttggaattgcctctggcacgctcaatggcgatgtagacgttattgaaaaacgtgatgaccattccgaacagctccagcctgaaatacgtgctcccgtccgcaataaattcttccggtgtattcatcaggcgcaggaactccggcgtgaacggcaccaggacaagcagtattgcgataccgagcgccccgcacatggcaaacattgtgctgacacgcttttttaccagcatgaaatcgccggccccatatgcctggctcaccttgatgctggcgcccaccgcaagcccggttcccaccgccgagatcatcatgttgatctgggacagatacgcgaccgcggacaccgcggatgcgccgatatgtgacgccatcatggtatcgagtatcttaaaaagctggttcaggctctcatagagcgccagtggaaatcccacatacaataccacccgccacatgggtccgttcaaggaaaactcgcgaaattgttcgtccttttttgaaagatctgcctgcatgttcttctccattctttttgtatctgcatttctttacttttctgttctcccatggtataacaaaaatatatttatttatacgaattttttccgttattttgctttgcactactgattttttgtcattgcaggcaaaaatcccggattaccattccgcagaaaccttcacggaaccaggaacaggagttatacctatgaacgatttcgcttcctccagctgtcacgaccgcattgccgattttaaaattacgcaggtacagcgcgattcgcattttgatatgggagaatcccattatcacccgtactacgaattttattacctgctgtccggtcagtgccgctgttttatcagccacagcatttaccggctctttccaggggatctgattatgattcctccctctgtgctgcaccgcgttctctatgaaaccaagcgtcctgccgagcgcatcaacatctttttttcggaagattacttacaccgggtgtctgccgccagcggcccggatctttgcgtcgggcttttttcccgcagcagactcaccattccgtcttccagccgtccgcagttagaacgcctgatgacgcgcctgcgccttgaatccgaaagcagcgatccttatgcacctctcatgaccaaaagtcttttttcagagcttctggttgagatcgcgcgctgccaggatgtccatcagactccgcaatttctggacgagaccagcaccgccatccaggaaagcgcgcgctacatctacgaacattacgaggaaccggtctcactggcagccgccgcggcggtcgcacatatgaatcccacttatttttccaaaaaattccgggagacaaccggattcggatttaaggaatacttaacgcacatccgccttcagaacgccgcgcaccttctgcgcacgacggagtcttcgatcactgaaattgccgggatctgcggtttttccgacggcaattatttcggggacgcgttccggaaacactatggcatgtcgccgcgcgcctaccggctgacgtaacaaaacgcctgagtcccccaagcacctcgtgagatgcaatataggggaactcaggcgtataacccggcaatacttcttccttgcttcctgtatgaaattgaatggtggaaatatctttctccggatctgctccttttgattctcttacttcggccgcttgccaaagaaagaatggcgctccggtttcttctcctctttcccgccgtcagcgtcttccttccatttaaagtattccgcatcaagatttacttttatctccgccccggtctcaccggtgttcttctccggctcttcctccggttcctctgtctctaacggaatcccgttcttctcaaaatactcttcgtttatcttgatctccggctttacggatgcatagacggaagtcgcctcttctttctcctgcccacgcttcgtgcgttcctttgcaatctccttgttgcgctgctcgatcagattcatgtatttgttcgtatcccgtaaatcctcaaggtggctctttaactccgactgatccctgcgcacatttgatttttcctgcgcgagcgcatcattcatcttatcgcagatctcccggacagagtccatcgcatcctgcatgatatcctgtacgcggtgaagcgcctcatccgtatacatgaccgatccggcatacacatcctccgccatgcggttcgcatcctcgacgattccgtccgtcttcttgcggaactgtcgttccgctgcatcgcggctctgctgggtaagctcatgttcctccatgagttcgtagatgcagacattcaggcgctgcaggagatttaacgcctcctttttgtctatgataacccgatttgtcgctttatcatacacctcgctgttggcatacatgatatgcatttcccgcaacacctgctctgtcttatcctgcgcactcataatggtctcctgtatttcaattatcttttatgtattgtatccgctttccgtctccgtatacgttttatcaattttaccactaacacaatcagtaatacaaccagaattatcacaatcagaatcacggcgataatcatagccccatatttattcgggctctttacaagatctccaagcgagcggctctcatccaccaccttgcggtcgtgcatctggctgtaataagacggcacattggcaataccgtcgccgtctgtatcctcaaaggactgcatatatctggcaatcgaatcccacgcttttaactcgcggtccccctccatcacgatgacgtcctcaaaatcctcgatcggcgttccgtccgcatactttggcacaagcgacaacagtccgtgcgacatatccgtcaccgcacttaacatctgtccgctgtagagatctgccacaacgcggtacagcttatcgtcctcaagctccacgcggcttccgttctcatcggtcagataaatatccgtcaccttatttaaaatcatgcggttcggattgtatgtaaaatgaagtccactcatataaagtctggctgtcgtcatgtaatcagagacagatgcgtcaatctccgcggctgtgcgaagttccttccctgtcagatagacactgatcagcgggtatcccggcacgccgtccggaccaatgccaagggaaaaagaattaaacacctgctccaccgtaatattccccgccgtgtaagtatcgcgcaccgtaccgctcggaaccacggcaacgtccaccggtactccgtcaaaatcatcggagttctccacggcatacacataggcgtccgacatcaggtcacccagattgtgttccgtgtgctcatactcgagatcatgcagcgtggaaaactgcacattattggttgcaagcacctcatccttggtgtaaccgaaatcagcgagataaccggtatccaccgcttccatgaagccatcgatcttctcctgggtcgccccgtccgcagtgatggtcgaaagaatcggaaccagcttataatccgtcatctcccatctgccatcgctcttctgggtcatggaaagttttccgatcttcttgccgtactctcccgtggatacaatatacgtgtcgccgtgcacgatcggctccgcgagctctgtgtgggtatgaccgctgataatcaggtcaagatccggcacgctcttggcaagaatctcatcctcggatttgctctcatcctcccacgtaccgctgtgagatacgcagacgatcatgtccacatcttcatttgccttgatctctgccaccgtctccctgaccgcttccaccgggtcgcggaataacagttcacaggtcggcgcgcaagcaagtgcgtccacaccgaacacacctgtcacagcgacattgatgtctcccttctgcagcacgacataatccttcacgccgtactcctcaaatccgctctggatctgctgctgtccgtcatttaatcccgcagcctccatcgcgtcccagtctacattgcacaccacaagctccggcagtacgtcgccgctttcggctgcactctttagcatctgtgccagtccgctggaacggtaatcaaactcatggttaccaaacgtcgtcacttcacagccgattgcgcccagcatccgaagctccgccgcctcatcctcatagacggtctgcaccagcgtacccatggaaaaatcaccgccatcaaccacgagcgtgtccggattctccgctttctgctcatcgatcactgtcttgatccttgcaaaaccgcccacctctgtggattctccgtcaatcactgtggaaaaactgttcagatgggagtgggtatcgtgtgtgaacaccacatccagtgtcttcccggccgcctccgtagccgcagctgtctgtgcgccgccggcaaacagcggcacaaccaaggctgccgcaagcagccctgtcagaattctttttttgtttttcattcaaaaaaccctccttaattatgaaatatactccccatttatactcaccgggtccccttagatcccaatcagttcataagatagctttattttaccacaaaatgaggtgcgacgcaatgtaacgcggtaacgcaaaaagagcccggcatgctgtggtgtgtctgtcagcatgccaggctccgatgtctgtgacagtctgtctccgtccgtctatacagcgtctatacctgtatacttgtgcgcctatgtatcagcaccctgtctctggcagcctcggactaagaaatcttcttgcccgagtacattgcaaaatactcctgcgccgtctggcaggatatgttcaatctctcctgcagccgctcaagaatctccttcttcgatacaccgtaggcacatccggtctccacaatcccctgtgccagcccccggttcagaccttcctgctcccccgcttcgtactccgctttgcgaagcttcttc

SEQ ID NO: 11620 - DNA, 1218 bp, Unknown
  gut microbiota DNA sequence
ccttatcgtattccagaatactcaccatttccacctccgcacgattcttccgaaggaaatccgctaagatcccttccgcaatacactccttaatcgcccgccgcaccgcctcttccagcttcatagaagcggtgtacccgcggactcttgccacatactgtgcatattccttcagcatcctgcactgctccataagctctgcattatgtccggcattgatgttgagtaccataaccttcaattccagattcggctctccctcaaagtgttcatatgcctgtgacagtcgaagctccgtgcgctcctccatgtcctccgcgccattgtaaaacacgataaacacgggagcaggaatcttcagcaatgcggacgaatacagcgacttgtcactcacatacttctgatattccagagaaatatagaacagatcccgcagcggcatgttcgggttcttcgtcgactgatgctcgtacagagagatgtgcagatccagtaaaaatgccagatcgttcttcatccccatgtagactgcattgtccaacgtgacaatctcaagttccttcgcatcctcatatgaccttccagtcacggcattgtaaagcgacaacagattcttctcgtctgagaagagcatgcggaataccgtatccttgtactcccgcctcgccttcggcttcttctcttccatatgcagttccccctttttgcaggaaccaccaccccagcgtccctgcttttctcgttcgttgattggataaaaagcatagacctctgaaatgtgataagaaaatagacggtgcgaacaccctgaactcgtaagaaatatgcttttgttgaacatattttaacacagaatgcgattgttctacaagagtctttttattaaagtccctatttacatttgtgtgtctgatgtatcaacagtataatgatacatttcacgaattgcgtatgcaattagaaaatcaagtagtccaaattccataaaatgaaattttagggcaaattacagacattggcttggctgtagtatttttaaacaacgtgtgttagactactgttatacaaatcgaaatttataaaggagaatattgatgaaattatttttatgttcgcacttttcaagtgtaggaagtctgataaaggaagaaattgaaaataagaaagtcgcatttattccaacagcttcactgcgtgaaggctacaccggttatgtcg

SEQ ID NO: 11621 - DNA, 94188 bp, Unknown
  gut microbiota DNA sequence
aggctacccagtcaaaaagattggatagcctttctttatgctttcaaccagaactcaaatttagtctgggaggatagctgggtgcagtatggtttagtaacccagcaaatcgctcaaatcgccaaaacagttagcgaaagtataaatattcatcaaattctctgataatagcatcagacacacttttcagaaaagggagaaaagaaatgtctgcttaaagcaccagcctcttttttgacagatgttattttctgcttccggccgccttatggtagacataagcggcgatgaccgaggtgactgcttcggtgatccagaaagcatgccatactccggttggtccaaagatacggcacaatacaaaggttgccgggatcatgagaattacatagcggaacagcgatatgacaagggactgcgttccttttccaagtccctccaaggcgccggaggctgtgacggacacggaggagatgataaagcctgcgctaatgatgcgcagtgcggttcctccggctgcgatcgtctcggcattttcggtgaacagttccatcagaccgcgcgatgccaccaggcataaaattgtgccgagcgccataatgacagcactcatcgcaagcgtaatctcatagatctttttcacgcgcttctgctcgccggcaccgtaattatagccgatcagcggacgcatgccctggacaatgccgtttgccggaagatagaggaaggtctgtaatttgtaatagattcccagaatgactacatagatctgggagtaagctgccagaataccgtttaagacggatactaacagcgatggcagggcaagatttaagatggcaggaactccgatcgagtagagacgatggtcggtttccttatgaaaagcaaggtattctttgcggattttgaccgggatcgggcgcttgttgtacaccgtcaggtaaagaaggagggtacacagctgaccgatcgctgtggcaatcgctgcgccggcgataccaagcctcgggaaaattccgatgccgaaaatcaggagcgggtctaagataatattggtaatacttccgcacagcagtccgatcatggatactttcatgcgtcccacggactggaagattttctcaaaggaaagattcgccatggtgattgtcgaaaacgcaaatacgatcaccgcgtactccattcccatctgatatacctgcacatcgttggtgaacatgtccaggaaagccggcatgatggagatgcttaacacagtgacgacaacgccgtggatgagtgccagaacaagtccctgtgtggcggcgcggtcggcgccttttttgtcgcctgctccgagaaaataggcaatcagtgcattgataccaacgccgaatccgatggcaagcgcgttgacaaaattctgaatcgggaagacgagggacagcgctgtcatggcattctcattgattctggcgacgaacagactgtctacaatattataaagtgcgtttaccatcatggatatgaccatcggaagcgccatggaggtaagcagcggcaggatcggtttttctttcataaatgtttcgttcatgtggtatttcctcctatataatagtctgggtttattgtatccaggataaaacagaaaacgccacacaatgactcaaaagaatcattgtgtggcgaaaaaaagtcagacttgaaaagtccacaccaagttttagcgaagagagtatagcacgatccataggaaaaagtcaagaattttggcaaaaaagtcaaaaaatctgttgacgaaaccaaactgctatgctattataatcgagtatgccgcacagtgaggtctcaaagtctgtccggattgcccgggcgacaccacaactggcgagtaatgataataggaggtgccatatgtacgcaattatagcaacaggtggtaaacagtacaaagtatccgaaggcgatatcattaccattgaaaagcttggtaaagaagctggtgagaaagtaacttttgatcaggttttagctgtatccgacaacggaattaaggttggttctgatgtagcaaacgcatctgtagaggcttccgttgtaaaagagggaagatctaagaaagttattgtttacaagtacaagagaaagaccggctatcacaagaagaacggtcacagacaggcgtttacacaggttaagatcgagaagatcaacgcttaatcctggaaggttgttatgacaaagataacgattttccgcaatcatgacggtgagtatttgggcttcgactgcctgggacatgccgggtatgccgatgaaggcgaggatattgtatgtgcgggaatttctgcactggttatcaatacgatcaattccatcggactgtttaccgacgaaccatgcgagacggatgccgacgaagacgatggcgagattcgcctgcgatttacttcaccggccggtcacgatgccggattgctgatgcagtcgctggtacttggcctgcagggaatacagaatacttatgggaatgattatatcattctgaattttagggaggtgtagaacatgatgaatatgaaccttcagtttttcgctcataaaaagggagttggttctacaaagaacggccgtgactctgagtctaagagattaggcgctaagagagcagacggacagttcgtgaaggctggcaacattttatacagacagcgcggaacaaagattcatccgggcgttaatgtaggcatcggtggtgatgatacattattcgcactgacagatggtatcttaagattcgagagaaaaggaaaagacaagaagcaggcttctgtttatccagtagctgagtaataagatgcagagtgtagacccgactatgcagcgcttacctgatggcaggcgtctatagccgggtcttcttgtatctggatttgtaaccgttcggtaggtggcagcatctgctgcctgaagttgaattgaggtagaatataatgtttgcagacagagcaacaattatcataaaatcagggaaaggcggcgacgggcatgtgagcttccgccgtgaaaaatatgtgccggatggcggtcctgacggcggcgacggcggcaagggcggcgacgtgatctttgtggtggatgaaggtttaaacaccctgacggattaccgtcatcgcagaaagtttgcggcacagcccggagaagagggcggcaagcgcaactgccacggcaaaaacggtgaggatctcatcttaaaggtgccggagggaaccgtgatcaaggatgcagagtccggcaaggtcatcgccgatatgtccggagagaaccgcagacaggtcattctgcggggcggcagaggcggacttggcaaccagcattacgcgacatcgacgatgcaggcaccaaaatatgcgcagccgggcggagattcgatcgagattgaagtcaagctggaattaaaagtaatcgcggacgtcggtctggtcggcttcccgaatgtcgggaaatccacgctgttatcgcgcgtgaccaacgcacagccgaaaattgccaactatcattttacaacgctgcagcccaatcttggcgtggtggatttagacggcgcgaagggtttcgtcattgccgacattcctggactgattgagggcgcttccgagggtgttggacttggacttgaatttctgcgccatatcgagcgcacgaaggtaatgatccacatggtggacgctgccggcaccgagggacgtgatcctgtggcagatattatcgcgatcaacaaggagctggaagcttacgatccggcactgttaaaaaagccgcaggtcatcgcggcaaataaaatggatgcggtctacggggacgagaatgagattatccagaagttaaaagacacctttgaaaaagacggaatccgtgtgttcccgatttctgccgtaagcggcaagggattaaaggaactgttgtactgcgtgagcgagcttctcgaccagtgcagcaaggagccggttgtctatgagcctgaattcgatccggcactccgtttctttaaggatgagccatacacgattacggtggctgacgacggtgcattcgttgtggaaggaccgaagatcgagaagatgcttggctatacgaatatggattccgagaagggatttcttttcttccagaagttcatgaaggagcagggcattttaaaagacctggaggcacagggaattgaggacggcgataccgtgcgcatgtacggttttgaatttgattattataagtaaagaggaggaagcaggatatggaattgacaagtaagcagcgcgcctatctcggcggatgtgcaagcaccttagatccaatctttcagatcggcaaggcaagcctgacaccggagattatccaggcgctggatgaagcattagagaaacgggaactgattaagatttccgtattaaagaattgtgcggatgatccgcgggagattgcacaggtcatcgcagagcgcacacattctgctgttgtaaaagtcatcggcaagaagatcatcttattccgccaggcgaagaaaaacagcaagtttgaacttccggcatgagaaagatcggaattttaggcggctcgtttgatccaattcatcagggacatctgaatattgcaaggagcgcctaccgggagttcgcgttggacgaggtgtggttcataccggcagggcactctccgaataaggaggaggcggagatgacacccgcgcaggtgcgcgcggaaatgacgcaggcggccatcaaaaatgatgcgtcatttaagctttcacgtatagaaatagagtcttccgggacaagttatacgtataagacgctgcagcatctaaaggaacagttcccggaggatcaattcttctttatcatgggagccgattccctggactactttgacaagtggaggcatccggagatcatctgtcagaatgccaccgtgcttgcagcggtcagggataccttagaactgccgcagattgagggaaaaatacggcgcatcaaggcgctgtttccggctgagatctatccgcttgcgggcggacggaccgatgtctcctcgacggcaatccgcgcacagatccgcatgacaggtgaatgtcccgccatgctcccgggcgaggtgtgggagctgatcaaacgctatcatctgtacggcgtatcgaatttgggagaataaaaatggaacagcatgagattcgtaaacgattaaaaaaagagttggataagggacggtatgagcacacgaaaggtgtcatgtataccgccggatgtatggcgatggcttatgagacatcgatcgagcaggcgatgctcgcaggtctgctccacgattgtgccaaatgtattccggacgatgagaagcttcagatctgtgaggaacatgacattcccatcaatgccgtagaatatgagagcccgtttctgctgcatgccaagctgggagcttatctggcagagacggtctatgaagtaaaagatcctgagatcctgcacgccatcaaggtgcacacaaccggcgcgccggatatgagtacgctcgataagatcatctatattgcggattatatcgagccgggaaggaacaaggccgcagatctgctgagggtgcggaaactggcatttgaagagctggatgcctgtatggcggagattctctgcgacacattgaaataccgctccagggtcggcggaccgttagatccctccacacagcttgcctatgaattctaccggcagtatcagaaggaacagacagatccggtttgacggattacctgttaaaacgaacaaagaacagatagaaaggaaacatgcaatgacatcacaggaatattgtaaaatagcagtagcggctttggaagaccgcaaggcggaggatgttaagatcattgatatccgtgagatttcaccggttgcagattattttgtgattgcggacggaacgaatcagaatcagattcaggcaatgcgtgatgcctgcgaagaggcattatacaaagcgggacttaagaccaaacagatcgagggaaattccagttctacctggattctcatggattacggtgacatcattgtccatattttttccaaggaagatcgtttattctatgatctggagcgtatctggaaagacggaaagatcgtagatgtggctgatctgtaagattccggagaaatggaaaggtcatagatgcggcggatccgtaagattccggagagacggaaaggtcatagatgcgtgtttttgaacttaagagtgtcgtaaaaagagtatgcctcccttctggctgacaggaaagggggcatacttttttctatataataggaaacttcgttcctgttacatagaaaagctccgcagggatgtgcactcgcgcgatgtcgctagagcaactcgccgcaggcggagaatcctgaaaagcaggattctttcttgtacattataataggaatctgcattttattccaggaataccgaacttcatcaggaaagaaaacggaaaataccaatgacctttccgagaatctggcaatctggaacaatgatcggatccatcgtgtcattctccggctgaaggcggatataaccgtcctccttataaaaggtcttaacagtagcggaatcctccaccagcgcgacgaccatctcgccgttgcgcgcggtcgactgcttctcaactaaaacattgtctccgtcgaagatgccgacgttaatcatgctttcgccctttaccctcaacatgaacgtctctgcgttcgggagaaattcggtcggaatcggaaagtaggtctcaatgttctcgactgcgagtaacggctgaccggcagccacattcccgagaatcgggacattgacaacctcgcgtctggtgaggttaaagttatcatcaatgatctcgatcgcacgcggtttcgttgggtcgcggcggatgtatccgttcttctcaagtgtctccagatgggagtggacggaggaggtagacttcaagtcaactgcctcgcagatctcacgcacagcgggcggatatcccttattcaatatctcctgtttaatgtattcaagaatctctctctgcttcgtgctgatcttgccgtatgccatgcatatacctcctgtcaatcattaccaatgctattatgtataatttagtttaacacagcatgcgtaaaaatgcaaacatatattccgaaaatttgttcgattttcttgttgacaaacggatgttctggtattatgataggaacataaacaaacgttcgcaacaaacgttcggaatgaacgttcgattaacatgacaggaggtattcttatgagaagcagaagagcagcggtaaaggcgcagagacgcacattcatgttgggattgatggttttaaccgtcattgtgatcggttctgtcctgctgggaacgatccgcacacaggcggctcctgcggaaccttcttataaatattacacaagcatccagatccagaagggagataccctctggaatatcgcagatgaatatatcacagacgattacgacagcatggacgaatatatggaggagatctgtgcgatcaatcacatcctgccgggggacattcattccggacagtatctgaccatcccgtattattcggcagaacatctcaagtaagatggtattttttgtgcagcgtctccggtcggttgtgttttttgggtaagtacggtataatgaattctgacgagctcatattgtgcgggaaggcagcacagagaatatgaattacggaggatgagttatctcgtatgataaagtttatctatgtcattttaatgaatcttttcagagcgccttatatgataccgaagatgcgcagggaggcggatcatcctgaaaagtatagtgtagaggagcgctacgcgctggcgcgccatgtgattcgcctgatgaaggtaaccggcggcatccacacaaaatcttacggcacagagctgcttccgacagaaggcggctacatgatgtatccgaatcatcagggaaagtacgacgcactcggcattatctacacccacagggagccatgttctcttgtgatggataaggcgaagtccaataccatactggttcgtgaatttgtggatctgcttcagggaaagcggctggataagaaggatgttagacaggcattgacgatcatcaatgaggtatccgaggaagtaaagcagggaaagcgttatattctgtttccggagggcggatacgaatttaacaataagaaccatgtgtgtgattttaaagccggcagttttaagattgcgttaaagacaaaggcaccgatcgtaccggtggctctgattgattcttataaagtttttaacagcttttgtttgggaccggtcaccacgcaggtacattatctgaaacctattttatacgatgaatatggcggtctcaaaacgcatgagattgcggatctggtgaaggtacgtatccaggaaaagttagatgaagttcttaagccagcagaagctccggtcggatgactggagcttctttgtgagctgcttttttataaacagctttttgtttgtcagagtcttgccagagccacggatctgataggacttaaggcgatagatgcatctccggggaacactagacatcacggagctttacatatttggctgcgctgcgtcgtcgatcatcgtcgatggcagcgtaatgcttccgcgtcgtgttgacgtccttatggccgagtacatccgcgaccagatagatatcccccgtctcgcgatagagggaggtgccgtaggtactgcgcagtttgtgcggtgtaatatgctttaagctggtcaccagttttgcatattttttgaccagattttcgaccgaacgcacgctgattctccggttctgcaaggagagaaagagggcgttgatactgccgtcttcggcggttattttctggcgctcagccatataagcgagaagtgcttcgcgtacttcttccccaaagtatacaacaacctctgcgccgccttttcggtgaatcttgatgccgttattgcgcatatcaacgtcttccagatcgagtccgacacattccgagacacggattccggttccgaggagcagcgtcataagggcgagatctcttgtctttgtgcggtcgtgatatttttgctggcggggagtcagactttcgccggattcgacttcgtctaacagtctcgcgacctcatcgatgtccagccggataatatttttgtcgtgaatcttgggcatgtccactttcacggccggatcattttttatcaggtcgtttttgaaatagtagcggtaaaaggagcggagagaggccagctttcgcttgataccgcgctcgtcgttcgtgtgttccacaccgtttttttcgtaatacttcagataggagagatattcctcaatatccataggcgtgagctcgtctaaaagcgagagcggaatatcctttacggtatagttctggcaaataggattcacatcgcagagatagtcaaaaaaacagccgatatcgtaagcatacgcgattctggtacgcgaggaagtggttggctcaatgccgatgaaaaactgtttgcagaaatccggaagctgttccagaagcttgcgcaattttacttcattttttacattcacattttcataatatgctttttctttcataaacgaattgaattctccttttcctcagcgacgcctgtctgccatccggggatatttccatgtaatactgcatgaaaaagctgttttttggctccgggatgatccagattgatctgtcggatcagatttttcacgtaagcacgctgtgtgtgcccgtctgcaggacatggattagcgacgaccggaagcttcatcttattccgaaatccttttacttccgcttcagagacgtatagtaaggggcgtatgaccacaagctgtgtgcggtctaaatgtgtgctcggtggaaacgcatagaatcttcccacaaaaatcatggaaagaaacgccgtctcaatcacatcatccatgtgatgtgcgtaggcaaccttattgcatcctaattccagagccgcctcattgagtgctcccttgcgcattttggcgcacagcgcacacggagatcccttgactgctttgtccgacacgctgtcgccgtgaaacaggatacgtgcaatctctgtttttacaatgtggtacggtaccttaagttcctcgcagagctgctttatgggagtaagatcaaaagagtcatatcccagatcgacggtgattgccgtgagtgtgaatttcttcggataaaagcgtctgagtccggcaagcgcgtagaggagagtgagagagtccttgccaccggaaataccgaccgcaatatgatcgccctcctcaatgagtttataatcgtcaaccgcctggcgtgtatagcttaaaagtttttttaattccatagattgcatatcacctcgtaactattttataataaaattatctgtcatgaaatgatctatcatgaaatgaaattcaggatcaataaagtaaataattcaaaaaggagattgataaaatgaaatttgtaatacagcgcgtaaccgaggcatcctgcacggtagacggcaatgtcaccggcgcaattcaaaaaggatttttggttctgatcggaattgccgataccgatacgaccgcaatcgccgataaaatgatcaaaaagctgttggggcttcgtatttttgaggatacggacggaaaaacaaatctatcgttggcggacgtcggcggaagtcttttgctgatctcgcagtttaccttatatgcggactgccgcaaaggaaaccgtccttcctttgtccgtgccgggaagcccgaaatggcgagccggatgtatgattatattgtcgcacggtgcaaagaacagattccagataccggctgcggtattttcggtgcggatatgaagatctctctgttaaatgacggtccgtttaccattctgctggattccgaagagatctgttaaaacagaacccgtaaaacatccggcacagcgtagaacagatttatggttgttttatgctggcaactattcgttaaacttgtgttttgcgaataaatatctgtatctctactatagcacaccgatgcccacatttcaaggaatatgtgcgtttttcctgcattttgccggtgtttgtttgcgcagacataaagaggcggcaccttaaatcaaataagtgccgcctctttgaaaccatttgaaaccagttcattcacattgtatgatattagccgatgatgttatctggatgcatcgaggatttcacgaaactttaagatcatatcaatacaaccgtcaattcccagtttaccggagtccaatgtcagatgatagctctgggaatcaccccattttttgctcgtataatagttataatagcttgcacgctgcttatcctgtttctggatcagatccctggctttgttttccgtaatattggcgcgttggctgataatcttaacgcgtttgtccatgtccgcatgaataaagatattgatgcagtccggattgtctgataatgcgtaatcggcgcatcttccaacaatcacgcaggattcccgctctgcaatctttttgatggtgtcaaactgcgccaggaacactttgtggtttaaaggcatatcgagaaacggtgccgaatgatagccgttcagcgaatatgtatccatgaccagggaatacaaaaagctgctggtcggtttctcatcatgattctcgaaaatctcctcacagaaaccgctttcctttgccgcctgctgtaacaattctttgtcgtagagcttaattccaagacgttccgcaagcttttcgccgatttctcttcccccgctgccaaattcacgaccaatggtatagattttgttgcccataaaagatcccgcctttcctaacattctatgaatatattataatacatttttttgaaaaacggaattattttttgaaattatcgcaaatcttttagaattttttcaaaatattctggaagaggcgccgtaacctccatgtactctctggttctcggatgaatgaagccgatcgtcatggcatgaagcgtctgcccctgcagcttatagggacttcttccgctggaatacagcgtgtcgccaagcagcggatgaccaatgctagccatgtgcacgcggatctgatgggtgcgcccggtctccagtttaaactccatgtatgtgtaccgctcaaagcgttccagaaccttgtaatgggtgatggcaggcttgccgtttttctcattgatcgccattttcttgcgctcgatgggatggcgtccgatcggcgcattgacggtaccctcttcctctttcaccacaccgtatacgatgccgcggtagcgccggttcacggaatgttccttgatctgctccgcaataaagacatggctctcatcatttttgcatacaatcagtgaacccgttgtatccatatcgatgcggtgtacgatgcccgggcggatctccccgttgatgccggacaaactgtccctgcagtgatacatgatggcattgacaagcgtgccggtataatgcccggcggacgggtggacgaccattcccttcggcttgttgacgactaaaagatcgtcatcctcgtagagaatgtcaagcggaatattttccggaagaatcggcgtctgtaccgcatccggaatctcaacgcagatcatatcatctgcctttaaccggtagttggctttctgcgccgtatcattgacaagcacatgcccctctttgatcagtttttgaaaaaaggagcgcgactgcgccgcatctgtctcgctgaaaatgagattcagatacttgtccagccgctctccctcatatgcaattcccgcttcaaatgtttctctagtcattgtcttttttctccgaagaatgttgtctggaagaacccgatgggaaaatctgttcaaaatcttcttctttgtaatagaacagacataaaaagatcaataaaaatgccgctactgtcacataaatatctgcaacattaaagatcggaaaattgatcaggctgaaatagaaaaaatctaccacatagccctgtctgacgcggtcgatgaaattcccgatggctcccgcaaaaaacagtacggcaaccgcattgagccagaaaaagtgtctcgtggcgggaagttttttgaaaaaaagatacagaataaacaatgtcaccacgacggtaacgggaatcagaatcatcagcttattctgcatcattccgaatgcagaaccgcggttctccagatagcgcagctcaaacacgccgtctatgagtacgttggatggctgatccttcaaatgggctaccgcaagcattttggtaaactgatcgaacagaatgaggagcactgcagccacacagccggtcagattgcgtttcaaaataggtgaatgatctttcatagataaattgtccttccatgttgttttccctgccagaccgggattacgcccggcatacataacgaatgccgtccagaatctgcgcgtcgcttaactcgcggtaaatataggcatctccgatggtatgcagcagaataaatttgacctggtttccgaccattttcttatcggatttggtggcagaaagcacagcatccgttgagattccatcgatctgtgtctgaaatccaaaggcagacaggcactgcctgatgccggcaagctgctcctcggtcagatttccctgctttttagaaagataagccgcagcaaggattccaagccccacgcattccccatggtacagggaaaaaccgcataatttctctatggcatgcccgatggtatgaccaaagttcaacagtgcgcgctctcccttctccgtcgggtcgtgctctacaacttcgcgcttgatctcacagcttcgggcgatcatctcttccatgacagccggctccagtgccaaaatggcatcatgatgtgccatcagccattcatagtaagcgtcgtctttgataagaccgtgctttataatctctcccattccggaaacaatctgccgggatggcagggactgtaagacggacaggttcatatagaccagtttgggctgataaaaggcgcccaccatatttttgtactgcataaagtctacgccggtctttccgccgatgctgctgtctacctgggaaagcagcgtggtcggcacctggataaaatcaatgccgcgcaggtaggtggccgccgtaaaaccggtaagatctccgacgacaccgccgcccaaagcgataagcagatcctgacgatcaaaatgctgctcgatcagagtctggtataaagtgtttaccgtctccagatttttattgtgctctcctgcttcaaacgtatgaagaatgaccgtgtcaaactctttttccaacagatcctgtacgtccctcgcatacaaaggcgcaacgttggaatcggtcacaatgcagattttctgtgtgcgtccgtatcccagctgctgcagaaacgtagggagcattgaaaaatcatgaaccagttcaatatgataaatgatactgtcgtttgcttttactggaatcgattgtgccatgaaaaactcctttcagtttgcatagaggtcgtaatgtattttgagccgtccttttccggttgttccgtattcccctcggtagataaagcgtccgtaaccgcggacagagataatatcatccgcatggcaggtataggatggattctgtatcagctttccgctgacaaaaaccttctcctggcgtagcaaaagcgacgcctgactgcgggacagatggtaaacgcacgcgacgacggcgtcaatccggtctgaggttacgattccgtcctgtgtctggaattcctgtgtcaccttaaggtctgacagactgcacggttcgacttttacgagagtgtggcgtatcttttcaagatgctccgcaaaatagtctgcaacggtctcttcacacagcagataggcttcctgctccccgaccagaatatcgcctaatttgcagcggtcaacgcccagctgcatcagcgatccgaggatgtcccgatgtccaagcttctcggcaaatttgggataagccggtgtgatttttaaagcggaaatgggatattcccaatcataataaagagcatcaggaagaaaggcaatcatctgacgctctgcacatggaataccgccaaaacattcggtcctcgtcgcaaacagcttctcggactggtggtatatattcaattcatttaaattgaggaaatcgctgaatagaacgattcccttgcgatccgcctgtctggagagatcaagcagacgcttctgacaaagatcctgttcgttcatagactctaaaaatcggtctggacactgcgtgtcgactggaacgtgtctaccagacttaagaaatcgccggaaatgtcaaccgatgccggtgtaatgataaagatatagttggagatcttctgaagattaccgctgattgcaaagcaggaacccgatgtaaagtcgataatccgctgtgcgatctcgacgtccagtccctcaacgttcaatacgaccgtgcggttattgagaagcgtctctgtaatctctcgggcatcttccactgaggttggtttgatgacacatacttccatgccgcttcctccctgcttcttgaccgggcgaatcggtgtgaccttcggagaactcttgacggctttctcgtggatagaatgatcttcttcataatcatcctcctccgccttcttcttgtccttgcggaaagaactcttcggttttaccggttcatcctcttcataatcatcatcgtaatcataatcttcattgtaaaaatcgtcgtcatcgtccggattaagacgcatgacatttaaaaatttatctaaaacactcatgttatactcctaatgcgattcattgctttttttgtaattgcgtgcaccgaaaattccggttccgacacgcaccatcgtcgctccttcttcaatggcaacctcgtaatctcctgtcatacccatagacagaatttccatagatacattatctatgtttttatttgttatgtcaacagataattgctttattttccgaaaataaaggcggttatcctccggattttcaacgaacggcgcaatcgtcataagtcccttgatccgcacattttccagtttggaaatctcttccacaagcagcatggcatcttctgccgttgtgccgaatttggtctcctcgccggcgatattgacttccaccagaatcggcacgatgatgccgcgtttctttgcctggatattgatctcttctgccagccggtatgtatcaaccgaatgaatcagggcaacctttccgacaatatatttgaccttgttgcgctgcagatgtccgatcatgtgccagcggatgtcggacgggagctgctccattttatcgcacagttcctgcactttattttctccgaaatcgcggacgccctccccgtagatttcatgcagcatttccaaaggttttgttttgctgacagcgatcaacgtcacttcctcgcgggaacgacctgcacgcttacaagcctcctgtacatgctcttccactgtttttaaattttcctttaacatatctatttcctccgtttaattgatcagatcattttcgtgaattttgcttccgtcgagcgctatatggtcatagagcgcaattccgtaggttgtcccggtccgcacgatggcgtattcctcattctgatagagaatgtcgatctgtttgaagatggcatatcccttattgatattataaacgccctgcaggctcgccgtgccggaaccgatctggtacgtctccgtagaatccgcctttcggatgatatccgaagcgccaacctcctcaccgtcgatgtaataatcggtatccgtctcatagtagatggtcggggcaatgaactccgcccctgctttcccggaggaatcgctcctctgcaccagaatgcccagactgccggaatcgccgcctttcatgaagaaatccttgggaacggtatagaattccttctccgtgatggcggaattggggatcttaagtccggtctcctcactaagcagcagctccacctcggcatagcgatccttggcatagcgcaccatccccgagcgaagcgtcagaatcagataggtggaaccttccttttccgtgatggtataggtcgcataggtcgtggtgttatccttcataaaacgcagctgcaaggtatcatcgtccgccagccgctttgccagatcggagccgattggaatgacaagcgaccagtattcacttgtaatcagcttatacagaggggctcctgccgcaacctgcagtgcccgctgaccgtccgtgcggtcgtaggatgcctcgtcaaacatggacgactgaaacgtatccgtggtaacgccctcatacccgtcggtggaatagacgacaatgccgggctgatcggcatgataggtgtgaaatgtattttctgcctgcgccgccgcggcgtaatcagagattccgtccagcgcggcaaggctcaaggattcattcagtgcagagtcaagatcttccttaaacgtggaaacgctataaaaattctgggcgctgtaggaaatctgaaattcgcttatggaatcctcaatctccgagagatcatgcgcactcagattggaagcgttgccggctgcctcctcgattttcttggacacactgccaccttcatcgacggagcagatcagatttccgtaacccacccgggaagcttcctttacatatacattcagcgcccccgccgtatccgaggaatagacctgctcctggcggagaatcagtccacggtatatattattttctgccatcgtgccctgctctacttcatacgtggaaatatgctccgtcgtcatgtaggagaaaatgttaaatatcagatagataaaaataataataaaaatgatcattccgatattgacattaaacggcttgcgatagcgaaccacttttttatttttactcaaaaaatgccccaccttttttcaaattcaacatttttattctaccattttcagccctggaaaacaactttttagcggcaataaattcgggatttgttcccggagtgaacaacaagtccggcaaagcagaataaaaccggcgcagcatgtccatactatgatagaaaaaggaggcatagaaaatgaatacaaattggttggattatacactgcttacgctggtgattatcggagccattaactggggactgatcggatttttccgttttgacctcgttgcctttatttttggcaatatgtcatggttctcccggatcatctatgcgcttgtcggactcggcggtctctatctgatcagcctgttcgggcgcatccgctctgtcgatcaggcataagaagtccctgccggcaaagaaaaagtgctgtatcgctacagcacttttcttacggcattttacattttataaggaaatgacaatttttgctttggcgcaatccggaagagatgcctcgttcctggagacgcttaaaacaaattttacgttgtatttttcactgatgatatccagtttctgaattgcatgacagatctcgtcatccgtctctacggaagcgatcgtaagaaagctgtccagatacatttcttccagatcatgatcctgtgaaacaataccacagataaatccgaggaactcatcacaattatcgatcggataatcggtaacattgatgagacgaatcttgttgctgagttcgtacatatgcttctgactcttatcaaggtatacaatgcttccggatgcagaggcaaccgcagcatttaccttggtcaaaagctcttttgtcttcccttttcccttttcgcctgaaataatctctatcatagtcatttcctcctgctgatgctgctttctacacaaaatccgttaatatgtataaaagcagttgattttataaattgattatagtctatatgcacataaaatacaaccaattttcaaataaatataaacaatcagggatccgccgtctaaatggcgaatccctgcagcatttcgttcattaaaagatagagattggacttaccgtccgctttgaatacgatcgatatgatcggctggccggatggattatacgaatacagtaccaggcagtaccccgcctcgcccgtggttccggtcttaccgcccacaatctgaaatccgtccggtgtggttgcattcccggtcagatactgattggtgttctcccacgtatgggtcactgcctcgccggaagcgtcggtataggtaacatcgtaggaggttgtgccgatgatggatacaaaggtatcgtttttgatcgcattggaaaaaatcagatacatatcatagacacaggtgtaatggttctcatccggaaggccgttcggattgacaaaatgggaccttgtcgcccccattgctgccgcctcctgattcatcagagccgcaaacgaatcgacatctcccgatatgtattccgcaatggcaactgcggcatcgttcccgctgcgcagcatcagaccgtatagtaaatcccgaagccggatcacgtcgccggcttttaaattgcagacggaagaatcggatgcctgattgacggcattctcgctgaccgtcaccatagcgtccagatcatcacaatattttaaggcaatgtacgccgtcagaatctttgtggtgctggcgggatagagccgctcatacagattcttggcatacactacggtatttgtctcaagattaaacgtgcctgcgccctctgccacctgggaatccgtggaatccgttccgatcgccacatcttccgaaacgcagagatcactcgcaaaataagactttgcctctgcggagccattcgaggacaacccgaaatccgctgcggttgcatacacgtcatagggctgttcgatgacagctgacgtcttgccgcatccgctgacgcaggaaacggcaatcagaagggacagacagatccatttatttatacatttcacgccactctaagtctcctctgtccagtgatttgattaacaactcggccgttgccagattggttgcaagcggaatattgtgggtatcacagatgcgcacaaccgtattgacatccggctcatgggacttcggagtcaggggatcgcgcagaaagatcacaaggtcgatctcattgtgttcgatctgtgctccgagctgctgtacgccgcctaaatgtccagccagatatttgtggacgtttaagttggtgacctcctcgatcagtctccctgtcgttcctgttgcataaagttcgtttttacataaaattccacgataagcaatgcagaaattctgcatgagttttttctttgagtcatgtgcaatcaatccgatgttcataatttaagtcccccctgttaatattttttcggctgcagacctacattaagaacaagccctataccgatatataatgaccatagcgacgtaagcccatagctgacaaacgggagcgtaacaccggtattcggcagtaatcccgtcgctacacagatattgacaatactctgaaatccaatcaatgccgccatgccgcagcagatcagtctgcccgccgcatcttttgcttttctagcaataaatatacactcaatcgtaatgaaaagcaagagaattataatggtgaccgttcccacaaagcccatttcttcccccgctacggcgaaaataaagtcgttctgcggctctagtataaacttgccgttttttacggaggtaggatcggtattgccgagtccttttccccacaaaaggccggaaccgatcgccatgatagagttctgctgctggtaggcaatatccggatatttatccggataaagccatcccataatacgtccgagctgatagctgtgtataaacggaaacttatcctgaatgattaacgtcaatacgataaaaaaggtcggaacgcacacggccagcacgcccaccacgatcttataactgagccccgcggcaaacagcatcgccgcaaaaacgagcgccagaacgatggttgtggaaagattgggctgtgccagaataagggcaagcggaatgccgatcagcacaaaagatccgaacagcacccgcggggaatttattttttcctcgtaccgcataaaatagtaagccagaaaaaggatcatcagaatcttgaccagctcggacggctggaactgaaatccgccgatcttaaaccagcgctgcgcacccttgctctgctctcctgccacaatgacaagccccagaagaccgatggcgcccagatagatcagccaggaaaaacgcagtataaaattataatcaatataggataccagaagcataatgatgatcccggataccataccgatgatctgctttttctggtcgcccgggcttgcacttcctaccagcgccacaccgatggtatttaagatcaccaccagtgcaatcaatatgaacttgtaattctttagtttgtattgtttgaacatatgtaatccttaagtatgattttaatttcaacgttttcgggttcaatatcgacatatctggtaacgatttcgccaatttcgtggcggatctgcgccatggtctcgtcatccagctgtttcctgcggctgtcgatcatcagcttcagccgctcttttgcaacacccttgcttctatgacacatcctacaccagctttccggcatgattccgccagaagaatctggagaacatccctttgtgatgaagataatccggtattgcgacttccatgccggcaatccggcgtgcaatattctggtaacaggtgtcggaaaccgtatgcttcccgatcaccggttccccgtggttctggctgatgataatctcctcgtcttccagaacaacacccagaagctccgcttccagaagctcacagatatccggaatatcgagcatgttgccgtcacgcaccatctgtctgcggtaaccgttgaccagcagatcgatccggggcacctttttccggtgcagaagctggattacacagtccgcatcgtgaatcgccgcaatctgcggcgttgtgaccacaataatgcggtcggaatccgccgtcgccagcttaaaaccgccgtcaattcccgccggactgtcaatcagaacgtaatcaaattcttttcgcaggtccgacagcagatttttcatttgtttttcattcagattgtttttggagtcaccggagcacgaagacggtatgatccagagattcggataccgcttgtcccggatcagcgcctgcttaacgcggcatctcccggtcaggacatcgaccagattatagaggatccggttttccagtcccatgactacatcgaggttccttaagccgatatcggtgtctaccaataccacctttttatctaacagtgaaagtcccgcaccgacgttagctgttgtagtcgtcttgccaacgccgccttttcctgaggtaaacgtaattacttcacccatggaagacctcctgtttttatagtctttacgagaaagaccttatattaataataccgtcacagaggaaagccattttcgcctgtgtggtcttattacgcttggaaaagatggaattttttgctttttccatcggactgccgtaaacgccggcaatgttatactgctcgggcaggaaagaaagcgccgtgatcgtggcattggtattgccgctcattccggcaaaggcgcttcccgagagttcgccgagcaccacgatatccgattgggataccaccaccgcttcctgcgggacatcaccgatgatgacgatgctctcctcggtctcaaggcgctctcccggcagaagggagccacggtaaaagcagccgcggctctgtcttctcgcctctttctcttcgtttgtctgctgcatctcgcggcatttctgttcgatcaccgcatcacggatctcatcactgtctaaaatacacaggattttgactctggtctgttccatgatggcgtctacgacctggtatttttcttcatcgcttaattctctgccctcaaaagagatggcaaacgatgcgttcgcgaaaaagcgctccgcctccgtaaatttgtgaagaatttctgtgagcagttccggaaacggcatcgatgcatccagcaccagattgattccgtttttactgcttttgataatgactgcctgactcattgtctgcgcctttctctcttaatcactgatctcgttggatgaagaattgccgtttgcagcctgaccgtttaacagttcatcttcattctcgacattaaagtagtaggcaaatacattccgggcgagtttcgccgcattgtgagaggtataaccgtatgcgatacgcgtcgcgatcgagatttccggatcgtcgtaaggcgcatatcccacaaataatgcgtggttcggccgatttaaattctgctgtgccgtaccggtttttccggctgcctcgatcggaaaaccgtcaaactcttttgtattctccaccaccatgcgcataccggaatggatggcattccactcttccgtatcaagcacgtcgatctgattgcgcacctgcggctcaaatgtctgtaacacatttccgtcggaatcctccaggcggttcaacagtgtatactggtagacggttcccccattggcgacggctgtcacatatctggcaagctgtaccgtggtgtagttgttattactctgtccgatagcggccatgaccgggaattcattggcgatctgcggcgccgcttcctcgatctcgattccggtgcgttcgtttaaaccgaagaggctcgcgtatttctgaagcttttcaatgccgagcgaatcgttatatgccgtggaataattgttcgtggcaagccggtatcctacctcgtagaaatagtagttacaggaatcacgaagcgcttcggagacattgatctccccgtgggttccgccgttggatgaaaaaatccagcattttggatggttgcttacgttctcatagacgccgagatcacggatgcgctccccgattgtgatgctgccctccgccagacctgccgtggatgttaccatcttgaaggtagatcccggtgcggtctcctgctgggtcgcgtaattgtactgcgggagtgatttgtcatcctgcagactgttaaagtattcggtgtcgacgttgtttgccagacggttgctgtcatatcccgggtaggtgacaagcgctaacacctctcctgtcttggtattcgtgaccacacacgatcccgagcacggatccaatgccagctgggctggtgtgatctccagattctgtatcttttcctttaagaacgataccgctgtcacagagccgttgtttaacgctgcaatctcttcctcgttgtacggaagcacgccctggtcgaatagaatcagacagagctgtgtcccggaaatctgcccgtcggtaatcagatattcataaatgatcttggaaaaatctttttcatagaaaagctcttccagaatataattacacagggcatcatatatttccgtggaatccgagtatttttcatccaccgtaaactgggtaatgtcaatccagttctgggcgatggcgtgattcagataatctttcggactgcactccccctgctgccactgctggtagacctcatcggaggtatcgatgttgctgtcggcaagaatattatttttgcggagtctccggataatataagtgaaataatcctgctcctcctcgctgagatccttaaaatccgtcggcgtgctgccggtaagctgctctctcaactggctttttaccacatcctgccgtgcggaaaaaatggcggataccgactgctccgccgtcgatgcgtcggtactgtcaaagtgtgagagatcgatgacgttgttattgattaacgcaaagtagacatctgtgatcgggatcggaatatcggaagaaggattatcaatattggaatatacgattcccgcaatctcctgctccaaaagattgtataccgcaatctgcagatcactgtccaatgacaggtacaggttattcccggccttggactccttgcggtcaatcacctcgatggcttttccgagatagtcgacatacagcttttcgtagcctttttcaccctttaagtaggaatccatatactgctcaatgccgcccttgccgacgacatcgttggtggtataactgtcatccgtctcggataatttggcgtattcctcggaagaaattttaccggtgtatccgagaatggaggcaaaatattcgctgttattgtacttgcggatggtgtcatccatcacctcaacgccctgcagttcctgtgcgtgctcgctgatgtacgccacggattcttcggatacgttggtcgcaatcgtggttgcgatatatttctggtaggcattctgcgccatggcaaaacgcacgatcgtgatcttgaacgccatctcgtcgctgtagctgtcgtcgatgccgtaacagtcgttgcggagatagtccataacctgatccacggtcgcctgggaggtgtcgtagccaagctttttgttcatgccgagatcatcgtagctgctctcgccgtaaacatccgccaggaaacgttttaacgaggtacctgtgacattgaattcgtaggtaccctctccggtgcggtcaatcttaaaatcatcggtgatcgcatcgccgtttttctccagtgcagtgataacctgggcaatctcggcgtttaacgattcgtttttcttatcggtgctgctgtaactgccgttgtcttcgatggtgatcgaataagccagctcattgtatgcgagcagttcgccgttgcggtcgtagatattgccgcgcgtactgttcaaggtccgctcttttacgatctttaaggtgtagttgtcctgatatttctcgccctttacgatctgcaggtagaacacgcgccacaaaagcacaccgaacagcaccgtcataagaacggcagcaacggcaagtctcgatttaaaaaacatgcggaaaacttcttttatattctcaaacaaacttacttgcactccttttttccaatgtctcaagccgctggttgactttcaggataatcacatacaaaaagatcgtaatcagcatggtgtagacaagttccggcaacatgatgttccacagataatattgaaaatgataacgattgcggaacaaaaacaagaaaaagtagatcaacagattgcatcccagatcactgccggcaatcaaaagcatgggcagctttaagtcttccgggtaaaacattttgcggaaacagccgttgatgtagccgatatacatatagagcagcgcataaaatccaagaattccgctgccgaagatatcaagcagaagcccacaggcaaaaccgatatacattccttcttttttcccacgcataaacccgaaggacgacacgacgataatcagaaggttcggcgagatcgatgcgaaagacaatgcctgaaacagcgtggtctgaagcaggaaacagattgcaatgataataaacacatttacttttcttctcataatatgaatcctactccccggctgactgcttcttgtccagaatgacaagaacctcttcgatatgctcaaaatccactgccggcgtgatcgtgccggatttggtaaggttgttggaatccgtcgaaagactgctgatgtagccgattaagattccctgctgatatttatctgaaatgtaggacgtgacaacagggtcgccaaccgccactttattgtcgctgtcattcaaattggaaaactcgatgaccatgttctcattcatgttcaggagacttccgtttacgatcaggttgtcggaggttgtcgtcaccataccgctgacctgcgccgtatcgttgataatggaagtgactttggcataattcggaccgacgtccgtgacaatgccgacaagtccgctgccggcgatcacattcatgtcgacttcaattccgtcgtcggttcccttgtcgatcgtgaaataggaaaaccagttcccgctgctcttgccgatgacattggcagccaccttctcatagctcgggtatttctggtccagtgccagaagctcgcgcagattctcaagctcatactgctccagattgttggtattcaattcggaggtaagctcatccacctgctttttgagcgcatcgttttccgccatgacatcgcttaaatttttaagattgtcggctttctccgtaatccatgcgccgaccgtgttgatcccgcgctgcatgggaacaaacacataaccggcaaccgcgttgagcggaccgccggagatattgagcgtaaagctggtaatcatggctgccacgcagacaacggtcagaatcagcaatatgtacttggcaggcaaaacaattttgggtttccgtttcataatttcctctataacaatatcttattcttcatactgaatgccagatgcttaaacttggcatcggatacgatctttaagagtccgcgcaccacacactcctccggctcctcgcaggtattgatctcgattcctgtaatatcgcggaacagctgatccagatcatgaatctgggagcttcctcccgtgatatagatgccggaatgaataatgtctcttgcaagttcaggcggcgtcttctccaagatcattttgatggaattgcagatcgtgttgaggttgtccttgatcgcctcatagacaacagctcccgacatctccatctcaatcggcagaccactcaccacgtcgcgtccgacaaccaccatggtctgggtgttgcccgggataccgcttccgagggtctccttcatgctctgcgcggtcttctgtccgatgacaagattgtacttgcgcttcacataagtgataatggattcgtcgatcttgttgccgccggaatgtaacagatcacttaagaccagtccgcccagcgagatgacggaaatctctgtggtatccgcaccgatgtccaccaccataataccggtcggctcgttgacgtttagaccgagaccgacggcatccgcgatcggcttctcacataacagcacactctttggctttaatttgctcttgtagaacatgtcgaaaaatgcacgcttctccacgtccgtaatatctgttggaacagcaacaatgaattccgctccgcgcagcttgcccttggcgtgggcctccagataagtctgaagcattacctgaagattattaaaatccgcaatcacgcctcccacaaccgggaatgtcacctgaatcgtttccggcgccttctcatacattgcataagcgtcatcaccgtaggcatacatctcattcttattcaccagagcgatggtgttcttctcgttcataatcttgttggacgccttacaataaatcttcatattgcaggtaccaaggtcaataccatacacgttattcgtcattgttctctccctttattgtattcttttgcattctctgtagctgtagtacgtgcggtcaccgataataatgtgatccacaagagggatgccaagaagcgctccgcactccgccactctctttgtcactgcatcgtcctccgccgaaggggagggatcaccgctgggatgattgtgcatcagcacaatctgaatcgcacttttgtccaatgcagcgagaaaaatctcgcgcggtgagacaagtgcagccgtcgcactaccgacagacatcataaccttctccagcaggcggcatttggcgtcaaagagaagcaccatcgtacgctctctgctctcatgccgcatatcctccatgtaataacttgcaatggagcccggatcgccaagacagatgcgctctttatagcgcgtcttcgccatccgtttggataattctgcaatgcattttaactggatcgccttcacctgtccgattccgggaatcttctgcatatcctgaacagataacgtgtagagattcaacagatcgtgtccgtcctgccgcagcaattcctgcgccacttccacagaacgcgtcccgcgcgtccctgaacgtatgatgacggcaatcagctccgcatcgcttaaggattcgaccccggatattaaaaacttctcatatggcttctccgagtccggcagttccttaaccgttgtaaaatgatgattcataaagatttcccgtctctccccggcaattccctatgatggtttgtagaatttatgtcaaccaattacgggacaaaaacttacatcatattttagcataacgcatccagattcacaagttttcgttccttaagtttttgtaaagatttcaaaatgccgagtttcgcatggtaccaggtcagaccgccctgaaaatacacggcatacggcggtttgattggtccgtcggcagacagttcgatggaggaaccctgcacaaatgcacctgccgccatgatgacatcgctgtcgtagcccggcatcgcccacggttccggcgtcacgtagctgtccacaggcgccgcagcctgaattccctcgcagaaggcgatcagtgcgtccggattgtggaaggaaatcgcctggatgatgtcgtgacggctctcactgccgtccggcacaacgtcaaagcccagcttttcataaatatttgccgcaaaaatagcgccctttaacgcgccgctcaccacggtcggtgccaggaacagtccctggtagaacgactgcagaatgccgagggaagcgccgacctccttgccgagtcccggggaagtcagacggtatgccgcattttccacacattcttttttgccgacaatatagccgccgatcggtgcaagtccgccgcccggattcttgatgagggaaccgacaatcatgtctgcgccgacctcgatcggctcacgctcctccacaaattcgccgtagcagttgtcgaccatgcagatcacgtccggtttgatgtccttgatgaatgcgatcagttttccgatgcgctccacagagagcgtcttgcgcggtgcatatcccttggaacgctggatggtgacaagatgcgtgcgctcgttgatggcggcgcggatgccttcatagtcaaactctccgtccgcaagcagatccacctgacggtaggtaatgccgtactcggcgagcgatcccttggaaggccggatgccgatgacctcctccagcgtatcgtatggcttgccgaccggggataacagttcatcgcccggccgcagattggacatcagagccagcgccagcgcgtgggtgccgcacgtgatctgcggacgcaccagcgcatcctccccgccgaagcaggaggcatagactttttccagggtgtctctgcccagatcgttgtagccgtacccggaagtcgtattgaaacattctgccgaaacccggttgtcctgcatggcttttaacacttttagctggttgtattctgcgcgtgcatcgatttcttcaaaacgctgcttcaaggaagcttctattttttccccgaatgcacttacctccggggaaattcccagacgctcgtattgttcctgtaataactgattcatatctctgtacctctcttttatgccggcaaaattcctttcgcctgtaacacatccatcatgtatgtaagtatttttgtatcgtcatactcaaaatccggcttgttcagccagatgacatcccgctccctgtggaaccaggtcagctgccgcttggcaaaatgtctcgattcgcgcttgatgatatagatggcttcctccaaggtgctggtgccgtttaaatacgccagtatctctttatagccaagtccctgcatggacaccatatccgcatggcagcccatctgctgcagccttgccacctcatcgacaagcccagcctttaccatggcatcaacgcgcgcatcgatgcggcggtaaagcttttcgcggtcgtcatttaagacaaaatacgcaaaattgtagggggatgtcttctggctctcccgctcgttatgctcggagatccgctcgccggactcatggtaaaattccagggcgcggatgacgcgcttgcggttattctcgtggatcgcctctgcagatgccgtatctaccgcctttagcatttcgtgaagataatgattcccgcgtgtctcggccagctcttccagctgcctgcggtatgcactgtcacactcctgctccgtaaaatcaatatcgtagagcagcgcctggatatagaatccggtcccgcccaccacgatggggatctgaccgtttgccgtaatctcttttaacgcctgctttgccatctccacaaaacggacgacatggaactcatcggatggattcagttcgtccacaagatagtgccggacaccgtccatctcctccggcatgatttttgccgaaccgatatccatgtatttatacacctgcatggaatccgcagatataatggctccgtttatttttttcgccagtgcaatggatagcgctgtcttcccgaccgctgtcgggccggtcagaattaccatgggatttggtttcattgtcatacaatcctcttaaacttcttttcaatctcatatttgctcatggagataatggtcggccgcccgtgcggacaatggtagggattctccagggacagcagctcgtcgatcagctgttctgcctccgccctgctgatggaatcgcctcccttgatcgccgccttgcaggacatggaagctaccttctccaagatcagttccggtgcttccctgccgcttatgttggtaaaatcgtccagcatgtccaagaacatgcctttcatatcaaccgcctcaaaatcggctggaatcgccgtgatggcaaattccttgccgccgaacggctccacctcataaccgaacagacggatctgctccccgtagcgtgtaagcatttcctgttcctcggcgctcaacgtcagaatgatcggcgggcttaaggtctgcgaggcaaaattctgtgtgcggacgcgtgccatggtgcgctcatagagcactttttcatgggcggcatgctggtcgataatgaacagcttatccccatattcaatcagccagtaggtgtcaaacactttgccgatgatccggtgccgtctggctgcatccggcgtgaaaaatccggtgtccgccgcctcgagcgtctgctgctcgtacacgaccgtgtccgctgtctcctgcggattctgcgtctcctgcacattctgtgtgtctgtctccggcatattcagattctccggcgtattcaaattctccggtgtatcaggagttccccgcacggcctctgccttaggaatcggctccggccgcacatccggctgttcatcaaccggttttgccggctgcccggtatccgccgccggtatgctttccacttcccgtgacatctcctgcatccggctgccgtcttcggtcgaagcagaacccgcagatgcggaatccgtatgatagctgctctcttcccgcaccagaagctgccggaacacgtccagattttccggtgttctgactggttccggcgtcacgttctgcccctgcggcagcacctgtgtctgcggcgggatatgcagacgttttgtctcaaatggctccggcaggctccctgtaatgaccggacgcttttcttctttcttttcctctaccgggacagccggaataaattccttgtgagtcagcacatcgcggatcgtctgatatagcttccggtacacttcctcattgttggaaaaacgaagctccatcttggtcgggtgcacattgacgtccaaaagctccgtatccatggtaaaatacagcacgcagaacggatactgatgctgcatcataaagcccttgtacgcctcttccaccgctttggagagcaggacgcttttgatgtagcgtccattgataaaatagctttcgtagctgcggtttccgcgggaaatcatcggttttccgacaaagccctttaccgagaaatattctgtctctgcgcagaccggaagaagcgccgccgtaatatcgcgcccgtagatatgatagatcagatctttttcattggagttgccggaggtatgcatcttggtctgtccgttgctgataaacttaaaagagacatccggatgggacaaggcaaggcgctccatcaggtcactgatataatttccctccgtctgcgcggtttttaaaaactttttccgtgccggcgtattgtaaaagaggtttctgacgatgaaggtcgtgccgtccggcgcgccgatctcatcgttgctcatctcccttgagccttcaatgacatagcgcgttccggtcagatcgctgtaagtcttggtaatcagctccacctgcgatacggcggcaatgcttgagagcgcctcaccgcggaacccgagcgaatggatgcataaaaggtcttccacactcttgatcttgctggtggaatggcgcagaaacgcgagcggtacctgctcacgctcaattccgcagccgttatccgtaatgcgcacgaacgttgtgccgccctccttgatctcgaccgtgacggcggttgcccgggcatcgatcgcattctcgacaagctccttgaccaccgaggacggccgttccaccacctccccggctgctattttatcgattgtttcctgtgaaagcagtgttatctgcggcattccattcctcccatctgcctttgccaaaggcgcttccggttaccagcggttctttaccttgttctgaagttcgtataatttgtttaaagcctcaatcggcgtcagatttccgacatccacattccgcagttcctctatgatgtcatcgtcccgcacggtatcaaacaacgacatctgcgtcagatccacctcgtccagtttttcttttttctttttgcttcccgtatcgacggagatatttctcgcaacttccgtgatgtcgttggcacttaattcctccacgatctccttggcacgcgcaatgacggaatccggcacgccggcaagttttgccacctggataccgtaactcttgtccgcgccgccctttacgattttgcggagaaatacaatgtcatcgcccttttcctttaccgccacgcagtaattgttgacgttgtttaatttgccttccagctctgtcagttcatgataatgtgtggcaaaaagcgtcttggcaccgaggagcttcgggttgctgatatgctccaccaccgcccaggcgatgctcagcccgtcgtaggtgcttgtgccgcgcccgatttcatccaagatcagcagcgagttggaggtggcgttgcgcagaatatttgcaacctcattcatctccaccataaacgtactctgcccgctggcaagatcatccgacgctcccacacgtgtgaaaatgcggtccacgataccgatcttcgcggatgccgcaggcacatagctgccaagctgcgccatcagaacgatcagcgccgtctggcgcatataggtggattttcccgccatgttcggtcccgtgataattgagatgcgatggttgccgttgtcgaggtacgtgtcattgtcaatgaacatatcgttgttgatcatcttctcgaccaccggatgacgtccgcccttgatgtcaatgatgccgttctcgttgattttcggacggcagtagttattctgatccgcgacaagtgcaagcgacacgaatacatccagaccggcaaccgccttggcggtccgctggatgcgcacaacctccgcagcgatcttactccgcacctcacagaagagatcgtactctaatgtgacaagcttgtcctccgcgccgagaatcatgtcctccagttcttttaattccggcgtgatatagcgctcggcgttggcgagcgtctgcttgcgcataaaataatccggaaccagatccttgtaggagttggtcacttccagataatagccgaataccttgttatatttgatttttaaattcttgatgcctgtcttttcacgctctttggcttccagttccgccagccaggtcttcccctccgtcttcgccttgcggtatttatcgacatcctcgttgtagccgtctttgatcagaccgccgtcccgcaccgaaatgggcggttcctccatgatagcccggtcgatcagtgcgcagagctcctccaacgtatccatgtcctcacggatttctcccagcagttcaccatggaaatcacctaaaaggctcttgatcggcggcagcatggcaatcgaactgcggaaggcaatgagatccctgggattggcggtcagatatgtaacacgcgtaatcagacgctccagatcgtagatcggatttaagtattcccggagttcctctctggtaatcacgtgctgattcagctcacagattgcatcctggcgcttctcgatctcagccttgtcaatcagcggctgttccacataggagcggagcagtctggcacccatcgccgtcttcgtcttgtcaagcacccacaggagcgatccgcgtttctgcttctcgcgcagcgtttccacaagctccagattccttctggtcgagctgtcgatgatcatgtattttccggtggaatacggatgaatcacggaaatgttgttgagatcgttcttctgtgtctcgtacaaatactttaacagtgctcccgcagcaatcatgccgcagtcataatcggcaagtcccagcgcctccaggctctttaccttaaagtgtgtaagcagtgttgtctctgcaagctcatccccaaaataccatgtctccagcgcataaattgtaatcttgagtcgatgccttaaatcttctatatcgacaccgctcatataaaaactttcgttgcatataatttcagatggcgaaaattttgtgatctcatcgaaaagcttccgctccgaatccacctcggtgacatagtagtctccggttgagacgtccgcaatggatacgccgtagcggtctgccagatacacgatgcacataatataattgttcttggattcgtccagcgcctgcatatccaggttcgttcccggcgtcacgatccggatgacctcgcgcctgaccagtccctttgccagcttcggatcttccacctgctcgcagatggcaaccttgtgtccgtttgccacaagtttatttaagtatccctccaccgcatggtacgggatgccgcacatcggtgcgcgctcctccatgccgcagttttttccggtcagcgtcagttccagttctttggacaccagttcggcatcctcaaaaaacatctcgtagaaatctcccagccggtaaaacaggatacagtctttatattcttccttcgtctgcagatattgctgcatcattggtgtaaattcagccacgttgctcctccatatctctcataatcgcctctgccactttcagtccgtccatcgccgcggacatgatgccgcctgcatagcccgcgccctccccacacggatagatgccgcctgcagccacaagaagcttcggatcgcgcaccaggcgcaccggtgaggacgtccggctctccacgccggagaggatggcgtcttcccggtcaaaagccggaatccggcggctgaatgcgtgcatcccctcgataaaggactcttccagtgcctgcggcagcagacctcttaaattgccaagcacacatgcgccctttgtggcgctctcaaacgccccgtaagacaccgaggcacgattgctgcaatagtctccaaaaagctgctgcggaatccgcccttttccgatagcgaatgcccgctcctcgagcatctcctgaaaacggacaccggctagcggatctttccccgcaaagtcgtcaggagttaccgccacaataatcgcactgtttgcgtttttcccgtcacgtccggaatagctcattccgttgaccgcaagcctgccctcctcggaggatgcgtttaccacatatccgcccggacacatgcagaaggaatacacgcctctgccgtttgcgaggttcgctgtcactttgtagggggctgccggaagttcgtgtgcatgcagcgctccatattgctgcagattcatcatctcctgcgggtgttccacgcggaaaccaaccgcaaacgcttttgcctccatgacaagatcctgcttctgatacagcatcccaaacgtgtcccgcgcactgtgaccgattgcaagaacgagtctggaagtctcgatccactccttgtggttgacctcaacaaacatctttccgtccgcttccctgcggtaatctgtcatacaactctcaaagcaaaacctggcgccgcgcgcttccatcgcctgccgcatgtttttgatgactccggcaagaatatccgttccgatgtgcggtttgttttcgtacagaatctgctccggcgctccgaatttcacaaaggtttccagaacaaaccggttcctgccggtgggatccttgaccagtgtatttaatttgccgtccgaaaaagttcctgcgccgccctctccgaactgcacgttggaaaccgtatccaacactccgctctcccagaagcgctccacatcctttgtgcgctccgtcactgaacgcccgcgctcaaggacaaccggtgcacagccgctcatcgtgagcgcatacgcgcagaaaagtcccgcaggacccgcaccgacaatcaccggcgggatggacggcgttggcgaaaccgccccgggcagatgataaccggtctgctttacgatcgtaacattcggatcgtttgccctttttatgattttctcttctccggaagtggaaacctccacggaatacaccaacgacagttccggtttctttctcgcgtcaatggattttctgataatccggtagcgaagctcctggcctcccgaaagtcccagacgttttctgattttctgttccagtgctgccgcattgtgatgcagcggcatttttatctgattgatccgtatcatctctgttctgacattccttcctctgctgcatgcatccccgccacaaagccgctcgaccacgcccactgcagattgtaaccgccgcaggtgccgtcaatatcaatgacctcgcccgcaaaatagataccgtctgccagctttgacgcaagcgttgtagcttcaatctcctccgtgtcaacgccccctgcgcatacctgcgccgcttccattccgttgcttccggtaatatcaacccggaaattcttgacacacttcaccagccggtgcaacgtggcgcgtgccacctccccggcatagagttccgaccgtatgccagcttcggagagcagtacctcgctcagctttctgttaaagagaccgatcagtgcctccccggcgctcttgccatgtgtattctcgtagaagcgctctgacagcagatcaaaaaactccttgtccgtaagatccggcgcaaaatcaatcagcacgtagggatgcttttcgtccgcaagcgctcttgtcgcataacggctgatctgaaagaccgggatacccgagattccggaagccgtaagctgaagttcgccccgctcactgcacaccacgtcaggcttttctccccgggctgtcccacggctgccttttggttgaagttgcgcattttccaggtagagtgttacctgcatttctgcacgaattcctgcaagtttcttgaaaaatgcctgttttccatgcagttgcacgagagctggcaccacatctacaaaatgatgaccaagtgcttctatatatggaaatgcacttccgtcgcttcccgtcttgggtgctgccagcaatccgggcgcaaaaatcactgttttggttgaaaacgcgccttttgtggtgcgtatttcatacccggtacaggttttttgaatggattgcagtccgcaggacgtccacagatcaacgccgaggtaatcgcattccatgccaaacacttccacgacagacaccgcctgctcactcgccggataatagtaaccgtttttgatcttcggatagattccaagctcttcaaacaggcgcacggtatcctcctgcccgaactgctcaaaaacaggcagcacaaaagcagggttctctccacgataacaggaaagcccctgcactgcatttgtgtaattacattttccgttgccggtggatagaatctttttcccaatccggtccatgtgttcgatcacccgtgttctcacgccgcacctggctgcactgaccgccgccataagtcctgccgcgccgccaccgatcaccgtaacatctatatctgtcatttcaacctcttatctaaccgctgtatcattctgtccgttcttcttaaccgtaacaattttaccacacagccctgtaacattcaatgaataacttctcttacgtcagctggaatagctttcgagcagatcgtacagttctctctcatcgtctaccggaattccgttggaaagctgctccctcgtctgcacggaaagccgttccgcacggatgttggtctcaaataaaagggttatcccgtccgcctcatagacttttaagatgccgtcgtcatccatgcggagcagatagcggcaggttttctggatctgcatgctctccgcagtccgctccgtctgtgccactgcgacatcttccgtgaccgcctccgtctcctctgccgtacggatccttcctgcatcaaatgcggttttcccgcacaagcctccgacaagcagcatcactgccgcaaaaaggcaaatacctatcgtccgtttcataatgtcctcccattctctgcgataagtatctgccagttctttcctttttattcaattaacgcaaaagatgcatcttccgcgcgagttttacaagcgttctgcctttcgggaagcgcaggatttcctgctcggtcagtcccttaagcatcaaaagcagcgtcgcgtaggtaaagacgcctgcaacaatcgatacaagcgttgcgatcagattgctccgaagcagatagaggaacagacggtaaacaagccataccaccacgcccattccagccgctgaaaccgccggcacgaaaaacgtgcgccgcacttcctgacggtatccgctgtaacggcggatcgagcgcgcatttagaatacacatgatcagtccgaagcatgcatttgcgatgatcaccgcaaaaatgttcagatccagcccaagcatcagcgccaccagaatgatcaagtgaagcgccagtgcaatcactgcattcttgatcggctccttcatccggttcatcccctgcagcagaccgttggaaagggtcgacagggagaagaaaatgatggccacggaaccggtctgcagcattcttgccgcaagctcggaggaatcaccaaacagcatctgaagaatcggggaggcaagcacgcccattccgactgcacacgggaatgccacgaccatgataaagcgtgtggcaagcccaatctgccgtttcgcctcgccccgttttccgctcgcataagcagcagagagcgccggcacactcgatgccgcaagggaggatgcaatggccagcggcacattgattaacacctggtattttccggtatagataccgttccaggtaccgtagtccgtcttggaatatccctgccatgccgcgatattcttgtagaccgcctggtcaatggtggcgttgcagttgtagatcgtgctgctcaccagcaccggaataatggtgatgatcagcagtttaaaaatctctccgtacgaatctgcgcttgtctttcgctccttgcgaagcgtctttttaaacacccgcagatagacaacaaggacaaaacccgcaaacagcagcgcactcagcgctccggcagcggttccgatcgttccgcccgccgcaccgtaggctgcgccgtaatcctcggcattgcctaaaagcgctccggctttggaaccgtaggaaaaaaggacatacgccgcccacacgctgacaatcgcatttacaatctgctctaagatctgggatacggcactcggcatcatcgtgccaagtccctggaaaaagcctcgcatcacacctaagaccgcaacaattacaagaaccggcactaaaacctttaacgcaaagatacaaagtggggttctaagcagcgtacccgtaataaaatccgctccgaaatagagaattgccgcggcagcggttccggacaccagcgcaaaaatcagcgcgcactttaagatgcggtagacattgcgccttctgccctgtgagatatttgccgagacaagtttggataccgcgagcggcaggctgtaggacgaaataattaacaaaatattatagatggtataggcactgccataatagtcgttgccggtatccccaataatcgccgtcagcggcatgcggtaaatcagtccgatcacacggctgatcagcgaagccgccgcgaggattgtgccctgcgccagaaaacttgtcgtatttttccttttgttattgcccataaaagtacctcaaatcctttcggaagcgccacggcgccgccgttcgttaatcacgcgagatgttcatctcctccagaatctgtctctgcttcggctccatgactgccgcgtcctccggcgtcatgtggtcatacccgaacagatgaagcatgctgtgcacgatcagaaacgcaaattccctgcgctcgctgtgtccgtaggcggcagcctgctctctcacccggtccaccgagatgacaatgtctcccagcatgatctccccggtatccggattaaaattatcctcataatcctcttccaacgccgagaaatcgcccgcctgctcataggagagcatcgggaaagacaaaacgtccgtcggcgcatcaatctgccggtacatccggttgatctcatgaattccttcattgtccgtcagcgtcagattcacttccgcctcataaggaaaaccttcatggtcgatggtaaaagcgacaacctcgcccgccagcgcttcataatcaaatgtaaatggcacgtccacttcgacttctaaattcaggctcataccagtaatgcctcctcgttcacaagatattcccgtattttcaaaaacatattcatgctaagcccggaacggtcatacagccccgcggcagaatattcattcaaggtctgatagatcaccatatcctggttccagttgctgccaacggtatcctcatccagaacctccagttttttcaacagcccgtccaccatatgtacaatcgccgactcgatggtggatggcagagcctcttccccgttgtattccccgataatgcggattaccttctccgggaagcaggctctctgtgccattttcacaccgttttttgcaagcggtgcgccctccagtacgccgatacggtaatacatccccgcggcgctgcacacacgttcgtctgccccgaccacagcagcacatcgcgccgccacaagcatcacccgccttgcatggctgtagtctgccctggaaaaactcgccagttcccgcgccagcggataggattcatcggtgatgtcgaccatgacctcatcgacttccgcatttcttgcatccgccagcttccggtagcacagatgcaaaaacaaaaagacgaccacaccgtccgccacggcagataccatgatccggacgctgatctcccggtaggtcagatagtagaacagaaccggaagaagcatgccggccatgccggcaaaccattcataccagaactgctttttgctgttttccactgcgtccgctgccaccgctccgatcagaaccagcaggatatacatggagaattcctggatggttccaccgcacaaaagaccgagcaggctgcagaaaaagagtccgctgcacagggaaagctcgatattccccacaccgagcatcaaaatggcagatagcatcacaggtcttgaaaattccggaagtacaagacagaccgccgtcacgccaagcgacgccagataccctgcaaaaatacgccggtagcttgtctcacgattttccgcaatgctccgcttcatccggcagtgctccaataaaaagaaccacaacgccagaaataccagattgatgataacaaggacgatccactcgtcgagatactgtcccctgataaatgccgccgctgtcgtaaacaggatcgttgcggcagacatgccaagcagatatattactctctttgccacatagcgatcatccattcgtgttctctctcctgcttctcgcaccggttctgcccgctccggttctgctcgtgttctttctcgtgccggacgtcttaccggcgcgcttctcataatcctcgtatgccttgacaatcttctgcaccaccggatgccgcacgacatcctggcttgtcagttcgcagataccgatctcctccacattgcgcagcactttcagcgcaatgtccaagcccgatgcggcatccggcgccagatccttctgggtggcgtcaccggtgatgaccgcctttgaaccgaaaccgattctggtcagaaacatcttcatctgcgccggcgtcgtgttctgcgcctcgtccagaatgataaacgcgttatctaacgtacgtccgcgcatgtaggcaagcggagccacctcaatcagtcccttttccatattcttctggaagctttccgcccccataatctgatacagcgcgtcgtaaagcggtcttaagtaaggatcaaccttgctctgcagatcgcccggaaggaagccaagcttctcccccgcctcaatcgcaggcctggtgaggataatccgcccgacctcctcgtttttaaacgcggtgattgccatcgccatcgccagataagtcttaccggtacccgccggtcccatgccgaacacgatcatcttttcgcggatggcatccacataggctttctgaccgagtgtcttgggctttaccggcttgccgttgatcgtgtggcagatgcagtcgcggtcgatctccacgatcgccgactctttttcctccgccatcaatgccagtgcatagttgacattctgttccgtgatgacatttccgcgtttggacaattccagaagctgcatgaaaacatcctgcgcgcgcctgcagcgtctttcgtctccgaggattttcatatcttctccccggacaaccaccgtcacatttaaggtacgctcgatttttttgatatagacatcaaactgaccgaacacattcgccatgtggtctgtcggtatatttaacgaaacttcagtcagactcattttcattctgcctttcttgcattgtggtatcgtaaacctctgtcggctgataggaaacaatggattcgtgcgcccacagatcgccgcttaccacatatttttcacccgtactttttataataacattttttgatataatttgaatacctttttcttccaaatctttgatgtaatccgagagattctttgtggcaatctgacggatctcctcttcggtgcgctcgtgccgcacctgctcgacctctgtgaactcacttttattcagccacacgggcagataaaaattgtccgccacatggagctgcctgctctccgtctgcacctggtattctgcaaacggattccggaaaaacggccagtcgaacacgttatcaagcagcgtgatgctgtagcactccttcgtgttcccggtcggcgccatctccacccaggtgccatcaatcacatcccggtaggaatagagtaccttcgccttgatgtccgcatcggacggacggtagaggtactgcatgatctcaccgtcgtcgtttaacacttcaatgcgccccgagactaagatgtcgcctttctttacctccgctcccaccgcggtaagcggcgtgcccacgcgtgtcaccatctcggtaatcacgccgtctttggcggcgacaatgtcctgcggttcatcgctcttcgcctcatattcttcctgcggcaggaggttttcctgaatatcgaccgtcatctttgtaccataaatcttgatggaagtccagatgacatcccggtagcggctccgcatggcttcttccagatcctcgcacgaaatccgggattttttcgttccaaacgatgcgtgttcctcctccaggaaatccagaatcgtctccgtggtcagataggaattcccgttgatttcgatattccagatgaatccggacagatcatacagcaaaaagcagaaaaaaagcaggcctgccgggaaaagataccgtctgcggtagcgaaacgcacaaaacggcatccccacacgcttctgaatccggatctgcgttttggtttttttcagaatgggcttcagctgtcggaatgcatcgacactgatacaaaaagtatatccattttcacacggttttaaattccagatcaggatattccggttcccgcacagatttaagaaccgttccggtgcatatcccgtcagcttcacatgaacataaccgcgaaaatatttgatcacagagagcaacatcgtctcagttctcgtactctatcgtatcaatgctgcccgttattttcatttcttcattcgtgtaataatctatggcaagacggacaccggtaatccgtatcctgcaggtttttgtctgcacccggataaaggaatcctcgtattccaggattcctttataatttgaaatcacagcttcccctctgccggtgacggtcacgatcgccgccccgagcatgaggtctttgggaagctccaggttatctacaattctttcgcgcagcgaaatctgtgaccccgctgaagttctgctattttttctcatatagcactatatgaggaaaaataccgtcttattctggaaagatatattctctgaccaccggcacgaaagccgccggctctttggcgatctcgtaggcatgggcaattttttcatacgccgcctgcattttggcatcatcattgccataaatcgtcgcaagcacttcaccgtcacttaccgcatccccgttctttttctccagaataataccaacggatagatcaatcgcactctccttggtctctcttccgcctcccagggtcatgcaggcaattccgatgtcttccgccagaatccggtgcacatatccgctctcttttgccgtgacctctagtgtcttccccgcaaccggcagaagggatgtgtcatagaccggtgcagcatctccgccctgtgcgcgcacgaactgggcaaatttatcgagtgccgatccgtcttctatcacgccctccatcagtgcgcgggcttccttttcgtccgccgcccgccctgcgagcataagcatctggctgcccagtgcaaacaccacttctttgaaatcagccggtccctctccgcgcagggtatcaatcgcttcccggacctcaagtgaattgccgaccgcgcgtcccaacggctgatccatatccgtgatgacagccaccgtcttcttgcccgccatcgtaccgatggagaccatctcttttgcgagcgctctggaatcctcaagctttttcataaaagcgccgttgcccgtcttgacatccagaacgatggcatcgcttccggacgccagctttttgctcatgatggagctggcaatgagcgacatctgatccaccgttgccgtcacatcacgcagcgcgtataatttcttgtccgccggcgccagattggcagtctgtcccgcaatggcaatcccgatggtattgacattcccggcaaactgctcctcggagagcgcggtcgtaaacccgtcaaaacattctaacttgtcgattgttccgccggtatgccccagtcccctgccggacatttttgcaaccggaactccgagcgccgcaatgatcggcgtcagcgccagcgaggtcttgtctcccacgccgccggtgctgtgcttatcgacctttacccccttgatccccgagagatccagcacatcaccgctgtccctcatggcaagcgtcaaatccaccgtctcgcgcggcgtcattccgcgaaaacagatcgccattgtcatggcggacatctgataatccggaatgcttccctccgtaaaaccttctatcatatagcggatctcatccgtggaaagttccccgccctgcttcttttttaagatcaaatcatacattctcatactgcaatcccccttatttctaaagtatactttattgtaacaccgtttaaccgccgattcaacatttgccgcgcggacgcttgacaagtcgtgcggcggacttctatactgatgatagatttttaagcttctacagggaaaaggagaccgttatgaccggatatcaaattcaaagacacagaatattactgtgcgtgctcgcacttttttgcttgggaatggctctgatgggatgtaaaaaagcatcgctggatgactggtatgccacacaggcggatcagtttcaggagatgacagacgccgtcaattcccaggatctgggatacaccctggacattgtcaccgcagattccgatgcgttagtgttccagtacacgctttctaaggcgtatgatatgtcggatgacgccgacgccgacgcactgacgcagctgtatgacgccatttttgacagctatgcctccactttttcctcgctgcgcgcgcagattgcagatgagaccggcataaacggcatcgccatccggctgaccgccttaaatccggacggaaccgttctgtattccagggactttaccgaatagcctgccgctatttgtggtagggttcccggttcatgatgcggtagccgcggtagatctgctccagaagaatcacgcgcatcagctggtgtggaaacgtcattctggaaaaagagagcttaaaatccgccgccgcaagcagctcttttgacatgccgagtgacccaccgatcaaaaagatcacatggctgatcccgtcagttcccagtttttccagtttctgtgagagttcgaccgaatcgagttccctgccgtctatggcgagtgccatgacataggagctgctctgcctgcatttctcgaggcgggcaagcacacgctccccctccttttgccggatctgcatttcttccgtggcacttgcgccgtctggcgtcttttcatctgcgacctcgatgatttccagcttgcaatagcgcgtcaggcgcttagcgtattcctcgatggcatctctgtaaaatttttctttgatttttccaacgcataaaattgtaatcttcatagcaggttcattataacattctttggttgcggcagtctataaaatctcctataatataggaaaagaaaactaagaaagcgagaacttattatgtggtgtccagaatgtaaaaacgaatatgtagcgggaatcgtccgctgtccggactgcggcgtggatctggtggagtcgctctccatatcagaggacaaatcaaaagacagtccggatgccttctcccctaatgacatggaagaactttcggcagcttccaccgtcagggcagcggaaggcggcagaggagatactccgccgcttactgcacattcacacgcctaccggtccaaggcttcccagaccgaagatatgaagtctaccgcctacacctttaccggggtcggcatcatcggactggttcttttagtgctgtttttctgcggcgttcttccgatccatattaccggtgccgccagaattctgacgggtcttgtcatgggaatcatgttcgtcatatttttgtggattggcatccgttccttcggccagatcaaacagctcaaagatgcaactgcaacagaagatgcgctgcaggatgagatactcaaatggtttctggatacctaccgtgccgatgtcattgatcagtccgtcgacaacgatcagccggaggaggcgctgtatttttcccgctacgaagtgatggaaaagctgctgcttcatcagtatccctccctttcggaatcctttaccgatcatatgattgaactgctctacgccgagcttttctaaaatcgggacatttctccaaaacagcacttctttcatgcagcgacttatggtacaatagaaccatcaaatatactattgagaggtgacgattttgaaattactggaagaaaagattctttccgagggaaaggcattaaacaaagacattcttaaggtagacagttttatcaatcatcaggtggatccggtgctcatggcacagatcggggaggcatttgccgcacattttaaaggcagaggcatcacgaaagtggttaccatcgaaagttctggaattgctcctgcactcatgaccgcatctgcactgggcgttcctatggtaattttgaagaagcagccttctcagattttaaatgataatctctaccagactgtgatcacatcctttaccaaagagacgaactacgagctgacgctctccaagaagtacatctccgaggaggatcacgtcttaatcgtcgatgatttccttgcaaacggtgaggctgcgaccggagcgatccgtcttctgcgtctggcacatgcgaccatcgccggtctcggcgttctggtggaaaagtctttccagcccggacgtgaaaagctggttgatcagggaaccgaagtgtatgcacttgccagagtcggtgcaatggatacggaccacgttgaatttttaccggcggacgacgagtgatcttcaaaaaggggattgtcgcaataagcgtattgtactttgcgctgataagtaatattattaaaagaccacaccgtgggatttcagatggaaatgcagatgaaaattcggttcaaaaaatgtggcatttctaaccagccggatgtttgcaatctgcgatgatccatgtctttccaagtttggagcactccacggactgtgtccgcaaatcatgagacaatttaagaactttcgtgtggcgcttttgccgctgctgaataaaacataatcgcgcgaagccgatgtctgagttgccatctgccttattttcaatagcagatggcagcgagtttcggttcgcgcgattttatagtgtctgtgaagcagcggcattagccgccactagaaagtttgctcattgtctctgatttggcggacacactccgggagtgttcaaacgtggaagagacacggaatccgatgcaaacattcggctggaagaaatactcacatttttctcaaacgaatttccagctgcatttccacatgaaatctccaagtatgtttcttataatattacttatcaccccaaagaggttatgcttattgcggcaattcctttttacgggtaatagataaaattggcacggtaaacaccgctgtccaatcctgtcgtgttgtccaccacaagtacggacaggacattgttgccctccggcacctcaaacggctccgtgtagcgcgcagacgccgtggtaggatcggttccgtcccaggtatagtaaatgctgcatccatcctctgcggtcagcgtcacgagtgtcggctcataaaaacggcctccgtccggcgacacctctgcaaaatccggtggtgcaagttcgatctcaaaatcggcatacgtcacggaactgtagattcccttatcgttccggcagaccgccgcgatggtatatttgccactctcatcaaagacgagcgggtttccgacaaaatacctcgttccggtcttggcatccagttcgttctcatctccattgatcgtatagtagatggcatccccgtctgtcgacgcaatctctacctcgagcgcctcatcatactttccagacggcacatctccctccggatccgtaatcagcggtgcagatgtcatgtaatccgcaaacaaatccagaatcttatccttattcttaagatcctcggcatcgacctccgcttccagatccagaatgctgtcgtaatcttccctcgcatcatagatagcgatcagatctctgtatgcgtcctcattggcaggatcaagctttatgatctcaatcaggagcaccattgccgcatcggtatttttctgtttttcatagatttcaatcatcttctcacgcgcggtaatatcgtttggatacagatacagcgcacgctcgtaatagtcaagtgcctccccgtcattctgcgcatcagccgccatggccgcctgttccatctgatagtcgtaagaattggcattccggtgatcaattgcagccttaatcagaattcccgccagaacgagaagcaccagcagaattcccccgatgagaaatggcagccggcgatttttcttcctctgcggctgtttgggcttttgctgctttgcctgtgccggcgccggttccttcccggcagattcctcctcttttagaagagagcgcagatagtcatcctccaacacactgtaatccggcacaatctgtaccgcatttccacacacggagcagtagatacatccctctttgatctctgccccacactttgcacatttcatatgaaacgattcctctcactctttcatccatatggattctacatctgttactgcaacatggactccacacaattatgcatcagcattgcaatggtcataggccctactccgcccggaaccggtgtgatcgccgacgtatgcggcgcaacctcatcatatctgacatccccgcacagcttgttgttctcatcgcggtgaattcccacatcgatgacaaccgccccttctttgatgtaatctgccgtgataaactgcggctttccgattgcaacgatcaggatatccgccgttttgcaaagttccggcagattctgtgtcttggaatgtgcaatggtaaccgtggcattctcgcgcagcattaaaagtgccatcggcttccccacgatattgcttctgccgattatcacacaatgttttccttccatcttaattccggagcgctttaagagctggatgattcccgccggtgtgcaggagacaaatcccggctccccgatcacaagctttccaacgttttccgggtggaatccgtccacatccttttcgggtgcgatcgcacgaatcactttgtctgcgtcaatctgtgtcggaagcggaagctgcaccagaattccgtttaccgaagcatcaccattcagcttctccacaagcgcaagaagttcttcctccgtcgtctcctccggcagttcataggacagggaaccgatgccgatataggcgcaggctttctttttgttattgacatacacgctggaagccggatcggttcctacctggatcactgcaagcgccgcttcttttccaagctttttctgttccgcaacctgctcgcgcagttcgtccttgatctcctgtgaaatcttttttccgtcaatgatctgtgtcatacgtatcctccattctgtctcttagaataatccggtaatgactccgtcatcattgacatcaataccgtacgccgccgggttcttggaaagtcccggcatcgtcatgatcgaaccggtaactgcaacgacaaagccggctcctgccgatacgtaaacctcgcgcacattgatggtaaaaccgtttggtcttccaagcttcgtctggtcatccgaaagagaatactgtgtctttgccatgcagaccgggaaggatgacattcccatatcggcaattctcttcagttcctttttggctgctgcggaataggtcactccgtcggctccgtaaatctctctcgcaacagttgcgatcttatcctcaaggctcatatcatccgaatataatggcttgaaatggctttccttctgctccagtgtaagcagcaccttgttggcaagctcaatgccgccttcaccgcccttttcccagacctcggaaagtgcaaactcacatccgcgttctctgcagaactgctccacgtaatccgtctccgcttttgtgtctgtgacaaaggagttcaaggtaaccacaaccggcacaccgaacttctgcaggttctcaatatgcttctccaggttgacaatccccttcttcaatgcatccagattctctgtgccaagatccgctttcgccacgccgccgttgtatttgagtgcacgcacggttgcaaccagcacaacggcatccggtgccagtcctgctttccggcacttgatatcgaagaatttttcagcgccgagatctgcaccaaagccggcctccgtaatcacataatccgcgagctttaaggctgtctttgtagcacggacactgttgcatccgtgcgcaatattggcgaacggacctccgtgaacaatggcaggcgtgtgctctaacgtctggatcaggttcggctttagcgcgtcctttaacagtgccgccatcgcgccggtcgctttcagatcgtccgcggtcaccggctttccgtcaaacgtatatgcgacgataatccgtccgagccggcgctttaagtcatgcatatcgtcagccagacaaagaatagccataatctccgacgcaaccgtgatgacaaagtgatcttctcttaccattccgtccatcttgcttcccagaccgacaacaatgttacggaggacacggtcgttcatatccatgcagcgtttccagacgatctgccgcggatcaattccaagctcattgccctgctggatatggttgtccagaagagctgccaggagattgttggcggaggtaattgcatggaaatcaccggtaaagtgcagattcagctcctccatcggcacaacctgcgcgtatccgccgccggctgcacctcccttgattccaaaacacggtccaagggatggctctcttaacgcgatgaccgcccttttccccagtctgccgaatgcctcgccgaggccgacgctcgtggtggtctttccctctcccgccggcgttggattgattgcggtcacaagaatcagtttcccgtcttttctgtcggaaacccgacggatcagctcgtccgaaagctttgccttgtactttccgtacaattcaagatcatcctccgggatgtcaagctttgcagccacctcgcgaatatgtaccatctgggcttcctgtgcaatttcaatatcacttttcataatgtctcctccattccgccgccagagcggctttgtatgttttatatgaatcctgttacagatattcctcttcgtactgctcaaactgctcgggcgacattaaaacccgccgcggctttgtgccttcctcaggacctacgatacccgcttcctccagctgatccataatgcgggctgcacggttaaaaccgattttaaaataccgctgaagcatgccgatggaacctttttccttctccatgagaaggcgcgccgcatctgcaaaataaacgtccctgccgtcccctgcatccgcgccagaatcgatcgctacggtggtgttggcggattccatgttgctcagcttctcctccatctccgcactgtaggtcacctgaccattctgttccttgataaaccctacaacggcagatacttcctcatccgatacaaatgcgccctgcacacgcaccggctttggaattccctgcgggctgaacagcatgtctcccttgccgaggagcttctcggcgccgttcatatccagaatggttctcgaatccacgcccgaagtcacggcaaaggcgatacggctcggcatattcgccttgatcagaccggtaatgacattgaccgacggacgctgtgtcgcaatgatcaaatgaatgccgcacgctcttgcgagctgtgccagacggcagatggattcctcgacttcgcccggcgataccatcataagatccgccagctcgtccacgataatcacaatctgcggcagcttttccggcttcggatcgccctcgatcgtcggcagggattcgatcttcgcattgtagccctttaagtctctcaccgaggcattggcgaacttctgataacggtctgtcatctcatccaccgcccagtgcagtgcacccgccgcttttttcggatcggtgaccaccggtatcatcaggtgcgggatgccgttatagacactcagttccacaaccttcggatcaatcataatcagcttgacctctttggggttcgccttgtagaggatgctcatgataatcgtgttgatacatacggacttaccggaacccgtcgcaccggcaatcagaagatgcggcatcttggcaatgtccgccaccgtcacctttccgccgatgtcctttccgacgccgaaagaaatctttgacggatgctttttaaattcttccgactctaccagttctctaaaagaaaccatgacgttttctttgttcggaacctcaataccgatcgccgcctttccggggatcggtgcctcgatacgaatatccgccgctgccagattcagcttgatgtcgtcggccagattgacaatcttgctgacctttactcccatctccggctgcagttcatagcgcgtcacggcaggaccgcagctgatgttggtaatcgtgacattcacgccgaaattctttaaggtctgttgcagcttcatcgcggtctcctgtagatgctgtctggaatccccggctttgtttgccgcctttgtcagaagatctgccggagggaacacatacggacgctccggagacatctgctccgccgacacactttcaccggatgccgcaggtgcagatgtggtatgtccggcattttccccggtgcctgacacagcctttgtctctgcgggcgatacggctgccgatgcttcctgcggctctttcagctgtactttcggcgcagccgcctcccatgcgttttctggtccggccgcactggcccatgattctttctgttcctgcgcagatgcagtgctccacggatcttccggttcggctgcgctgctccacggatctttctgttcctgcgaggctgtagtgctccatggatcttccggctctgttgccacatcccacgatgcttccgccggcgcagtattccaggatgctccctgtgcagtctccgtttccggagtccatgcagatatgttctgtgaagcctccggtgtcacagccgcaagcgcttcgtctgagaacgccgacggcgtcagattctctgcaggcggatatccgccgtccgacgtgagaggcacaatcttttcttcccgtacctccggcatctccagataatcctccgcattcaattcactgatctcatcggaatgttcaatgacattctgccgcggcagcacccgggtgtcaatggcaaccccttccaccttgcgatccatccgccttaatgcctgttcctctctgcactgctcccgctcttcccgctggattctcacgcgttccttatggcgttcacttccgctgcgcgcggattcgtagacctttttcccgcctttttgcattccgcggagcgcagagcgctctgtaattaacaccagcgatatgattaacatgatcgcatcgatcacataagaaccagccagaccgaaattcgggcagaaaatccatgccagaagtccgccgatgaagccgcctcccgtccggtgctcaaaactgtagctgtatgccgcagcggcaccgtcaaccgcagaccctttggtcagcagttcgatcagcatacataagaacagatcaaacagaatcatcgccacaagctttacggttgccacccggttgcccctgttcgacacggcaaaaaaagtaccgacaagaagaagcaccgggaacacatacgcgatcagtcccatgatgccaaaaaagaaccggctcactgcattgccgatggttcccccgattccgaaattactgataaataataaaatagataccgctacaatgatccagagaatgacctccctggtaaaatcctcctgctgctgtgcagccgtctttttcttccgtcctgtacttcccttccggcttgtctgtgcctttcgtttcccagatgtactctttttattccctgttgccaaaacttactaacctccaaaaccgttatgccagataaaaatacccgccgatggacaatgcgccaacgagcagacagtagatggcaaaaacggtgaacttctttttgcggacgatgacaagcatcgtcttaatgcagatatatcccacaaccgccgcgaccgccataccgatcacatagtagacaacctccgttcccgacaccgccaggtctgtggcatcttttaattcgagaacaagcgcgccaagaatcgccggtatcgacatcaaaaacgagtatttcacggcaaaattgcgctgataacccgcaagcaggcaggcggtaatcgtcgtaccggagcgtgaaagtcccggaagcgttgcgattccctgtgcgattccgacagaaaacgcatccgtgtaggtgacgttcttcggaagtttgtcgccgtccttgcagtgatccgcgatcaaaagcagcactgccgttgcgataaggcagatgcctggaacaatcagaatctcggaagccatctccacgacatccttgcagaaatagccgataattccagtcggtattgtcgatacgataatcagcatggcaaatttgcggtagctgctgttgatcacgcgccgatacgccatctgctctttgccggtcttattccggaagaagacaatcacattgtatccggcgtcgcggatgatgcagcatccatctaccaccagttttaagatgtcccggtagtataccagggagattgcaatcaatgtaccgacgtgaagcagtacatcatataaaattcccgtgtcggtattgacatcaaacagtattttaaaaagtgccagatgcccggaactgctcaccggcaaaaactcggtcagtccctgtataatgcccatcaagatcgcctgtaataatgacatggcagcctccttatccgattcgtaaaaatctgtcaaacttatacatacatgaccaattttaacatatttgagggcggttgtcattaaaaggtttcttaataattttttccctttgcggcatcaatcatcgcatgcagttttaaaaacgcggcatcgattccgcccacggcatcgatcagcccttcccgaaccgcttcctccccgactaaaatggttccaaggtcttttgtcagcattccagtgttcatcatcagttcctccagacgctcttccaccgcctttgaatgcgacgcgataaaggttaaaatccggttctgcatctgtttaaaataatcgtaggtcggcttggctcctatgacagttccgctcatgcgcacgggatgaatcaccatggtgcccgacgggacaataaacgagtaatccgtggagacagcgagcggtacgccgatcgaatggcttcctccgagcacgagcgataccgtcggtttgctgatcgacgcaatcatctctgcaatggcgagtccgctctcaacgtcgccgccgactgtatttaagagcagcaggattccttccgtatcccggttgtcctccatctccgccagcttcggaagcacgtgttcgtacttggttgtcttagtcgtcgccggcagacaatcgtgtccctcaatctctcctataatcgttaaaagtgagatccggttgttctcccggttgttatttaacgcaacctgtccgaattcccggatgtcctcatttttctgttcctgtttttctgacatagtttctccttctccttcggtcttctctttttactaattgcataaaaatgcagggtgcaaaattgcaccctgcttagtatgtatcatccagcgtcatattatgtcagttcacgctacacttctcccagaagatagcggtacaatccctcatagcgtcccttggaattgttccaggaatagtcgtttgccattccgcggtcaatcatctggttccactgcttcttgcggtcaaaatagatatgtttggagtagttgatcacgcctaacatctcgtctccgttatagtttgcaaacgagaatccgtctccggtgttctcgtactcattgtacggctttacggtatcccggagtccgcccgtctcacgcacgatcggcaccgtgccgtaacggaaagagattaactgcgtcagtccacacggttcaaaccgcgacggcattaagaacgcgtccgcagccgcgtacagcttgtgggcaagttcgtccgagtagcagatattcgccgagacacggtcgccgtacttccatgcatagtggcggaacatattctcgtactgcggatcaccggttccgatgaccacgaactgcgtatagtcgtccacaatgcggtcgatcgcgtaattgatgagatcgagtcccttctggtccgtcagtcttgagatcaggccgatcatgtattttttcttgtcgacggcaagtcccagttcctcctgcagcttcatcttattggacggctttttcttgcggaaatctgcggcgtcgtaattgacatagatctttggatccgtcttcggattgtaaaccgtatagtcgattccgtttacaattccctgcatgtcgtaatgtcttgccgagagcagaccgtttaacccttccccgtaatactccgtctgaatctcattcgcataggaatcgctgacggtcgtgatgtaatccgcatacaccagtccaccctttaacatgttggcgtccttctggaactccagcttatccggcgtaaacagatccgccgagaaaccggtcagtccctgcattgtcttcatgtcccagattccctggaactttaagttgtggatcgtgatgaccgacttgatgccccagtaaaaggagtccgcctggaactcatttttcagataaaccggaatcagtcccgtctcccagtcgtgacagtgaatcagatccggccggaaattgatctgttttaaaatggagagtaccgccttgtcaaaaaaacagaacttctcaatgtcaaaccggatgtccccataaggcacgatgcagttaaagtattcctgattatcgataaaatagtaggtgatgccatcaagcacatactgaagaaccccgacgtacttgtcctggatataagtcccggcgctcatataaaaatgcgtcacatactcaaactggctgcggtatttttccggaatacagctataattcggaataaccacccgcacatcccactcttccttgtcaaattccttgggaagcgcgccgcagacgtccgcaagtcccccggtcttgataaacggaacgcactcagaagctgcaaaaagtatttttttcataaaaacctccttgtatcggaaacatcctgtttttcgcagaaagcatatacaatattatgatataccatttcaccctacaattccagcgttttacaaaaaaaggacaaaccatctgttatggtctgccctccttttgtaaatttattattcatcccagttgtgaaatacttcctgcacatcatcatctgcatccagaagatccagaatacggttgatgttggtcagatcctcctccgctgttagctccacatagttctgcggaagcatggtcacagaagcttctgccatcggaatacctgcatcctccaacgctctgcggacatcctcaaaatcgtccggcgctgtaaggatctcgtagctgtcttcctcctcggaaaaatcctcagctcctgcgtcaagagcctgcatcatcagctcatccgcatctccctcgtaatcttcctttgcgacaataatctgtcccttctcatcgaacatataagatacacagccctgtgtaccgatactgccgtgtccctttgtaaacgcgttgcgcacattcgcagccgtacggttcttattgtccgtcaggcactttacgatgatggcggttccgctcggaccgtagccttcataagtacagaattcgtaattgaccgagttgccgtctccagcagccttcttgataccgcgctcgatcgtatcgttcggcatattgttggatcttgccttggcgatgacctgtgccagcttgaagttgttggcagggtcaggaccgccctcttttactgcaacagcaatctctcttccgataatggtaaaaatctttccctttgccgcatcatttttttctttcttgtgcttaatgttggcaaattttgaatgtcctgacatgttttttcctcttttctgttgaaatccggtttattattttaacatttattcttcattctggcaagtcccgtctgccagttcgacttccgaagccttctcctccggaagtttgatcacgtgtaccttctggatcatcttgttctctacagaaaggatctcaaacagatacccgtatgcggttgttgaaaacacctcgtcgtcgctgggaatcttatcgatcagtgagatcaaaaaaccgtttaacgtctcgaaatcgtcctcttcatccagcggaattcccagcacttccacaacctcgtcaaacggagccataccgctcatcagatagcttccatccggctgcagttcgaccatgttcgtctcctcgtcgtgctcgtcctcgatgtttccaacaatctcttccagaatgtcttccatcgcaacaatgcctgccgtctgtccgtactcatccaccacgatcaccagatgacttttggctgcctgcatcatggcaaacagggaattgatgttgcgcgtctcggggatgaagtccacctcgcggatcagacccttgatcttagagaccggcgtgtcataaaccgccgcatccaggctcagttccagagcctccttgatatgtaggacaccgataatgttatcgatgtcgtccagaaacaccgggaatctggaatagttgttctccttgatgaactccagggcctgtcgaaacgttctggttccgtcgagcgcacagatattcttgcggtgcgtcatgatatccttggcttccttgtcgccaaactcaaagatgttatgaatcatctccgcctcgcttgcaaggagcacaccctgctcgtgaccctcgtttaccatggagataatctcttcctccgtcacatcatccgtatcgcttaacggatcaacgccgaacacgcgcgccagaaggttggctaaaccgtccgtcaggaatatgatcgggtaaaaaagaagctccaccacatgtaccggtcccgccagacgcagtgcccaggcttccggctttctggacgccactttctgcggcgtgtagattccaaacaccagcacaatgagaatcaggatcacaaaaatgaggacatccacaagtaccgacatgacgcttcccgcatcttccggcagaaaatacgcgcgccagagcggtacctccagaaaaccgagcagcatatgcacgattaaaaccaccagttcgcagacatgcgtatatcgttcattcttatccgtatagcgccgcagaagtctcgcaccgcggtcttcctctcccgccagacgttctatggcagcctcattcaaattctgcatggcggcgataaagccaaaaaccacaaaatctaatatgacaaatcctgcaaaaatgaggatgcccacagtggggctgcaaccatcatccatatagtatcctttctttcgtgtctccggtattacacactaaaacatcagaaatcataacattttcgcgcataatagtcaagttatgtatagagttccagactgatctccagcgccttgtctattttcacaaggatctggtgatccagatggcacactttatctttcagtctcgtcttatcgatcgtccgcagttgttccaacagcaccacggaatccttgaccagcgcatatttctggctgtcaagctccacatgtgttggaagctttgctttattcatctgcgatgtgattgccgcgcagatgaccgtcggactgtgtctgtttccaacatcgttctgtatgatgagcaccggccgcacaccgccctgttccgagccgaccaccggtcgcaagtctgcataaaagatatccccacgtcgaattaccatactttccactccatttctctctggatcttttacggatagtattgccatttttcacgggtgtattccattttgtttttattttcccaacactatgatatgccatcttttcccggctgtgactgcgtctgttccagtccggccaggatctcgcacattccgtcatgaatgtccgatgccgtcatgccgcgcatggagcgccgcgcacctgccgcttcgcccgcctttccgtgcaggtagacgccgagcggcgccgcctgctccacacggattccctgcgccatcagtccgccgatgataccgcttaagacatccccgcttcccgccgttgcaagcccggcattgccggatacattcagccatgtctggctgtacggaatcgcggtagccgtgtgttcgtccttcaagacgcagatcacattatactgtcttgcgaattcatccgccgcctcaatcagatgattctgcagatacgccaccgaatcccccgtcagccggctcatctctccaaggtgcggcgtcaccacgagttccgtgtgcggcagaagcagcaggtttgtatcttttgcaatcacattcagcgcgtccgcatccaaaagcaccggaaccgccgcattcttgatcactgtgcgaaccatccccgcagccgtatccggcgtgccgatccccggtccgcacacgatcgtgtccgcccagctcattgcctccaaaagctgcggcgcctccgcctttttggaggaatatgccgtgattaccgcctccggaagctgcgtctgtaaaatggcgcggttttcctccggtgtaaaaatgcgcaccagcccgcagccgcttgcatatgcggctttcgcgcaaagatatgccgctccggacattccctggcttccggcaatcacgagaagtctgccgaacgttcccttgttggagtggctctcccttgcggcaagaagggacagatccgcgtcttctaacgctgccaccgccggtttgcgctccccgaatgcatccggcgtaatcccgatatccgccacaacgactttcccggcgtactgattgcccggccacagcaggcatcccaccttttcaaacgcgaatgtgaccgtcagatctgcccggaaagcggttcccagcacatttccattgtccgccgaaatgccggaagcaatgtcaaccgccgccttcgccccttccatggcattcatccggtcgattaacgatgcgtattctccctccacactgcgcgataatcccacgccgaataccgcgtcgatcacgagcgtgtaggacttcccctccggaaattccgtgaggatcttaccgccgtacgcaagaaagatcttcttctggagctgattgccgacggacgcttttcctgtgtgcggcgcttccaatacatcgacggtgtttcccgcctgcatgagtattctagcgatcgcatagccgtctccgccgttgttgccgctgccgcagacgacgagtgttcttgacgtattccgtttttcccggcgcagtgtctccacaaaggaaaacgccgcccgctccatcaacactgcctgcggcatatgaaattcctcgattgtccggctgtcataaagattcatctcccggctgtttacgatatatcgcatcttttccctcccgcctgccggcatcacacccggcattttatttcggtaaaacactggaacaaagttccctatagagtaaaaaagagatcctgctatgcaggacctcttttaatctgtctgacggctgttctctttggcgcgctgattcttcacaatattgtaggataactgcatcaggctgtccgagagatggacattttccacaacaacgtccttattgatcaattccagatccacatgtgcaaaattccagatcgcatgaatgccaagaccgaccagacggttggcaatggcgtccgctttttccttcggcatggtaagcgctgcaatgtctactttgttctctctacagaaatcttccagctcatccagcatacggatcttgatcccgcgcacagtcacaccgtccaacgccggattgacatcgaacagtccgatgatcataaatccaagcttttcaaacttcacgtaattggcgagtgcctgcccgagatttccggcaccgatcacgataatattgtgctgctggttcagtcctagaatcttgccgatttcctcatataggtattttacgttatatccatatccctgctggccaaatcccccaaaattattgagatcctgacgaatctgggatgcggtgacattcatcctgaggctcagatcatttgaagaaatacgttctaccccggcgtccagcaattctcccagatatctgtaataccgcggcattcgacgaatgacagcctgtgatatttctttttcctgcatggtgatgcccacctttctatcaaaacatctcttttattatagtgataaaccagatatctgtcaatgtgtcaaaaatttaacaaccagacggcatccctcacgactcaagctccatcgatacctgctcccattcctcgtagcatttttccagctcgctccggtattcattctgtctgccggtcagctcgccgagcttcgcggaattggttgcattggcaggatctgcgcactcctcatcaatgccggcgatcagatcctccagctcggcaatgcgctcttccgccttctttagcgtattctcaagcttgcggatgcgcgcctgctcggctttctgcgtctgccagtccgctttcttgtctgttccacttccgtcctgcgccacggtctgttccgtcatctgcgccgcctgcgccttcggctccgcctccacatagatccgggtcagctcgtcatgtttttccagatagtaatcgtaattcccgatatagttgacaatcgtccctcccgtcaaatccagaatccgggttgcggtctgattgataaaataacggtcgtgcgacacgaaaaagacggttccggtgtactggtttaacgccgactccaaaatctctttggatgtgatgtccagatggttggtcggctcatccagaatcagaaaattcgcatcggaaagcatcagtttggcaagggagacgcgcccgcgctccccgccgcttaagtctgcaatccgcttgaatacatcatcgttcgtaaataaaaacgccgccaggacattgcggatcttcgtgtggtttaactgcggatagtcatccgcaatctcctcaaagatcgttttctccatatggagcagctgatgttcctgatcgtagtacccgatgtgcacattcgacccgagcacgatggttccgccgtccgccagaagcagttcgttgatgatcttaagaatcgtcgtcttgccggttccgttattgccgatcagcgccacgcgctccccacgcttaatctcaaaagagagatcgtcaaacagcgtatgtgtgccgaacgctttccttaaatgctccaccgtaagaacatcattaccgcttgtcacatccggctcgagcacaatatggatgtccgtgttctcatccgtcggcttttcgagacgctcgatcttatccagcatcttttcacggctctccgcccgcttaatcgatttctcgcggttaaaagacttgagctttgtgatgacctcttcctggtgcttaatctcccgctgctggttgtaatactgctttaacagatcttcccggatcttcgcctttttcttcgcaaattccgtgtaatttccctggtagacatacccctgatgctggaaaatctccaccactttggtgacgacgcggtccagaaaatagcggtcatgcgacacgatcacgaccgctcccttatagttcatcaaaaatccctccagccactggatcgattccatatccagatggttggtcggctcgtctaaaagcaggacatccggctttgtcacaaggagcttgcccagtgacacgcgcgtcttctgtccgccggaaagttcgctcatctgccggtcaaattcactctccacaaagccaagtccctttaagattcccgtcacttcactgcggtaggtgtagccgcccagcagttcaaactcgtggctcaaccggtgatacccgtccagaagcgcttcaagctcctgccctgtgagcgcattcatctgcgcctccatcccgcggagacgctcctccatctcgatgatgttcttctttgcgtcaaggacttcctcgtagatggtccggtgcccggacacatcctgatactgcgccagatagccgatggtggcgtcttttgcaaggatcacctcaccggtatccggcgtctctttctgcataataattttaagtagcgtagacttgccggcaccattgatgccgacaatcgctgctttttcatttgcttcgatatgaaaacttacatttttgagaatttcgtctgtcccgaatgacttggaaatattctgacaggataaaatcataacaataacattccttctaacgtgctgcgaattgccttgataaaatcttcactgtttaatacaaccggattagaaatggttgtgatcagcgcaaggtcttttgtcattttaccatcctcgatggtcttaacacaagctttttccagcttgtcggcaaactcttccagctcgtgactgccgtccagttctccgcgctttctgagtgcgcccgtccatgcaaaaatggttgcgacggagttcgtggaggtctcctctcccttcagatgcttatagtaatggcgctgtacggttccgtgcgccgcctcgtactcgtactttccgtccggtgtgacaagcacggaggtcatcattgccagcgaaccgaacgcgctggataccatatcgctcatcacatcgccgtcatagttcttgcacgcccagatatagccgccctccgacttcatcacacgcgccaccgcgtcatcaatcagtgtgtagaaatatgtgattccggcatctttgaacttctgcgcatactcgctgtcataaatctcctggaaaatatccttgaaggtgtggtcgtattttttggagatggtatccttggtggcaaaccacagatcctgctttgtgtcaagtgcatagttaaagcagcttctcgcaaagctctcgatggaattgcagagattgtgctgtccctgcaccacgcccgcaccggtaaaattgtggatcagctctcttgtctcggttccgtcctccgccgtgtagaccagttcgcatttgcccggtcccggaatcttcatctcgctcgccttatagacgtcgccgtatgcatgtctcgcgatcgtgatcggctttttccagttcttcacgcacggctcgatccccttgacgataatcggtgcacggaacaccgttccgtccagcatggcgcgaatcgttccgttcgggctcttccacatctccttgagatgatactccgtcatacgggcggcattcggcgtaatcgtcgcacattttacagcaaccccgtactttttcgttgcatttgcagaatctacggtaacctgatcgtccgtctcgttgcggtgttccagtccgagatcataatactccgtcttaagatcgataaacggatacaacagttcgtctttgatcattttccagagaatccgtgtcatctcatctccgtccatctctacaagtggcgttgtcattttgattttttccatggctgcttcctttctgtgctgtgattctgttctatctgacatggcatcttccgctcttactgcttgagcagattgtcccagccgtaatgatccatattgttaatggtgttgcgcatatgtgcgtccgccagttcttccgccctggccccgtcatgctgctttagcgcctccacaatcttgcgatgctcctcatttgaattgaccgctctctcctgcacggcgagcgtcaccttgcgcacgcgctgcacatagtggtgaaaatccctcaggatgtggcgcagctccttgctgcctgacgcatcgtataaaatttcatggaacttgttgtcaagctccaccacctgctcggaatttcccttggacgagtggaaatcggacagataaatgttctcctccagctcatccagctgatcctttgtgatgttatcgcacgcccacctcgcgcaaagtccctccagtctggagcggatctcataaatatcgcggatatccttctgggagattccgacgacatatgctcccttgttcggaatgatggtcacaagaccctccagttccagctggcgcagtgcctccctgaccggagtccggctgacacccagttcctctccgatggatttttcttttaattcctcgtccgtcgcatatttcccggacagtatattttcacgtattgtgtgaaacacgcgcgaactcagcgaataattatcctcactcatctatttacctcatgctatatcgtgatgttcaactctttgcagcactttccgatctcttccacaagctcggaatccgtaagtaccgtcacacgtccgtcctcatactgtgcatccacccagacttttattttcttaaccagatccgaattcttatcgacccatttctccttcggcagatgatagtacgaattgatccagtgtgcaattccggcaagacccgatgtgttggacaccgataccagaggcggtctgtttaagaatttccccgtatcaaaaatgttgtaaatctcctcgttcttgagcagtccatctgcatgaattcccgctctcgtcacattaaagttgcttccgacaaacggtgtgcggctcggctgtacatagccgagttctttttcaaagtattctgccagttctgtaatgaccgttgtatccatgccgtcaagtgttccctttaactgcgcatactcaaagaccatcgcctcaagcggtgtatttccggtgcgctctccgataccgaacagggagcagttaacgccgcttgcgccgtaaagccatgcggttgtggagttattgaccgccttgtaaaaatcattgtggccatgccactcaatcaactccgacggaacgccggcatgggtggtcagtccgtaaataatacctggcacgctccgtgggatcacggcacctgggaaattcacgccgtatcccatggtatcgcacgcgcggatcttgatcgggatcttgtactcatccatcagcttcatcagctccacacagaacggaatgacaaacccataaatatccgatctcgtaatgtcctccaggtggcagcgcgggctgattcctgtctcgaggcactcgcggatcacgctcaaatacagattcatgacctcccgtctggtcatcttcatcttataaaaaatatgataatccgagcagcttaccagaataccggtctctctgagtccgatgtccttcaccagctggaaatcctgtttgcttgcacggatccagctcgtaacctccgggaacttgtaccctctttccaggcacttgtagaccgcatccctgtccttcttgctgtacaggaaaaattcactctgacggaccagtcctttcggaccgcccagcttatgcagatagtcatagatcgttacaatctgctccgttgtataaggagctctcgactgctggccgtcccgaaacgtcgtgtcggtaatccagatattctccggcatgttgtgcgggacaatacgatcattgaatgcgatcttcggtatctcactgtacgggaacagattgtggaatacgttcggctcttccacatccacgagctgataaaaatgctcttccaactgtagcaggttcgttttcttattcattacgacttctctcatagctgcactccttttgccatcatccaatgcggcggttccttcacggcttctctccgtcgtataatctttcttgatcgttgcataaataaccgcttgcataattgtatacaattataccgtcttcttatactatacatttcttgttctatttgtcaatgaataaaaagttatagcaaatataatgttttgttatagcaatggcagacactatgacattcagcgccgtaacgccagattaaaaatcgtttcctgctctttgttcatgacaacagatttgtatccgagcgcatcgatcgcaagttccgttgcgcgggacaatccctcccgcaatgttgtatttttaattctgaatgaatctttatacatctgtatgcgcacacgaagcacatagaccttttccatcggctccaggattgccatgattcgatagccgtttaagatatccttacacagtccggtaataatccgcagaatataagtgacctcgttcatccgttccgggtcgaccacctcatcggcagtacacctcaattcaaaatattcctgctgttccggtttattgccaaatgccgcaagcccctcgactgcggtcttaaactcgccagtcccgcacgaaacgcagttgatatattcggatacaatccagacataccagcgtccaaggcgttcctttcgttctgcttccatatctgaaaaagaaaggttcaccttcatcagttccgccagcacgtcctgcgctctcttattgttgcttgcccgcatcagccacatccggcggtgctccagatacgcctgctccgtcatgctgcacgcagtctcctgttcctgctcctgtccggcagcccgctccagctgttccttatagcgaaaggctgcacggatcggagccatgaggtcatctgccacacggcacggcttgatgataatcttaaaggtacggcattcattcataaatgccacagtatctgcaatccgtgcgccgtcagtcatcacgatccgtattgtctccggagacatcatctcaatcattgaaaacagttctgttcccttaatcaccggcatctgcatatccgcgataaacacatcggtggtattctgctccacaagctgtatcgctgcttccgctgaaccgacaagtgcataggaaaaatccttgtccagactgtctaatatcgtcttaatgcgcgccgcatttacttcatccggttccgcaattacaacaaatcccatgttcatccctcccgccatctggctctgttttgctacgttcatcatagcaaattagagaacgcataacaattgttttagaaaaatttgtaacaaatctttccggatgccataagatacagtgtaagaaaaatttggaggatttaatatgagtgatttagctgcgacaaactgtggtggtggatgttcctgtaacgagggcggatgcggttccattctctggatcatcttattgctgtgctgctgcggtggcaacggctgcggtcttaattccggcaatggctgtggaaatgacagctgcctttggattatcctgcttctcttctgctgcggcggatgcggaaacggcaacggcaacggattcggctgctgctaataaaaacgcacacggattctaaaagggagcggcatttgccgctcctcatttttattattctagcgttcgctctttttctcgaggccgctctccgcatcccgttttctctgcatctgcaatttctgtgccgtctggcatttttcagggacttttctttttcgcacacattcctcatcaatctcgtatacactgttaccttctattataagcataccaatctccattccacagacgcgtatatgattgcgctccggcaaaagtcctgcctcttttattccatgcttccttttgcctttgcccacattatatgatatgcgttaccggtcataaagtctcttctctgctcataaactaaaagaaaaagggttcttatggatcataacgaaacatccacttttacaccgtttgattatatgacacagacacgggaactgcagatgttaaaaaccatgctcccctacatgaaagatacacaaaaaaagcaatttgccatattgataaaatatatggagctgcaaaacaccgtccaggtgttctcgcaggaagacaaggtgatgtccatgtgctccgtcgatgagggcagcaataatatggttgccatgttaaacgatctgcgcgctttctgcaccagcaaagagcaggaaaccatcgacatgcttgcgaatatgttctccatgcttgagacctacgaaaccatcttcagctaaacagaaaggaattcctatgccctacgattttttgaacaacaatccgcttctcgccgacatgtctccggaaaagctgcagtttctcatgaattttgccaccgccaaaaagccgaccgacatcaaggagatgatgccgtttctgctctctgccatgaattccgcaaaatcaaataacatccagttcagtgaaccggagacggatctcttattccagatcctaaagcagaacatgtccgcagaagaatctgccaaagctgacaaaatcatgaacctgatgaaaaacagaaggagcggctcttaaaaccgctccttctgtgctgttcttctattttttaccagatcgacgccaccgtcacttccagcaccttgtcaatcggcgagctgctgttgcccttgccgtcggttccctcaaaataacgcaggcttgcagattcaaataacacatacacattatcatccgcaattgcgatctcctccgagcatggcggcatctctacctttgccgacggctcattgggatgcttcgtcagcgtcagaagcgatgcgtatactttcaggtaggaggaactgttgcgtccaaaagatgtgctcagatatacctgaccgcctttgtcaaaggcaattccctgcactttgttcggaatattgtagctgctgagtgaggtaagcgtatccttttcctcatcgtagctgtaggaaagcatctcggaatcaaagaatttggtgtgggttgccacccagattcgcccgccgtagcaggtgatgcaggacggaatattgtcgagcttgtattcgtcggaaagtgcagatgcgtccacacagtatccgggtgcatcggctccgattctctcaatatattcatatggaatccgctccagcgtctttgaattggaatggcagatccatacattctccccgtcaaaggcaattccgccgaggtggctcttctccttcatgccaagcgtcgccagataggttccggtctcacgctcaaagatcattaaggagcctttcgtgtcagatccatccgcatacgccgtcataagaatataatccggtgtgaagcagagtccctgcagacactgtccctcgctgctgatcagattgtcgagatagtctttctctctggtggacggcattcccggaatgtccagctcatccagaaacgcataattgcactcttttaattctttttgattgcggcttaacacgctcgcggtctgataggaatacatctcgacgttgtagcggttgtcgatcggcctggtccattttgcaaacagaaccatattcgctgcattttcttccgtgatctccgtgatcttgtgatcgtaggagctgtccgtataccagccagcaaaattataaccgtcccggacaggaatctcaagcgcaaacggaagttcttccgctgtaatcacatccggattggcattgtgattcaccccgccgtttaactcgtacaccagatgtacagcgtcatcgttcacaccgaggaatggatcaatccaagctgtcccactctgctcccatccggcgtcatccgtcgggaccatcatataagcctgtgccaccatcggatcattcaaaaggaggacaaacatcgataccagtgcaagaaattcttttctcatctctgctcatcctcctttcttttctatcgcctgctcttttctgctgcttttacatactgccgttactcttccgcgcggtctaccttggatgcccttgcctcgatctccttctcctgtacatcggaaggtgcctgctcataccttgcaaattcataagaaaatgttccgcttccgcctgtcatggaacgcaggtctgtgttgtacccgtaaagttccatcaccggaacgtccgcgatgatctcctgataaccgtgctccgtcggattcatgccgagcacgcggccgcgtctcttgtttaagtctcccatgatatcgccggtgtacttatccggcacaaccactttgagggaggcaatcggctccaacaggatcggggatgcatccataaatccttttttaaacgcctgcatcgccgctaccttgaatgccatctcggaggaatctaccggatggaagctgccgtcgtagagaactgccttcactccgacaaccggatacgctgccataggtccttttaataccgcttcctgcacgcccttttcgactgccgggaagtaattcttcggcaccgcgccgcctacgacacactgttcaaatacatacggctgttccagatctccggaaggttcaaaggtcatctttacatgaccatactgtccatgtccgccggactgctttttgtatttatactccacatcgactttcttgcggatggtctcgcggaacgccactttcggacgttttaattcgatctcaactttgtagcgctcgaagagcttgctcgccgcaacctccagatgctgatcgcccatgccgtataaaagcgtctgtccgttctcgctgtcattgacagcttttaatgtcagatcctccagcatcagcttctgcaatgcctgcgagatcttatcctcatcacccttgttcttcgccttgtagcgcttgcaggtatagggtgtggagatggttgttctaatatacagaatcggattcgcctttgtggagagagaatcggtcgtcgtcgcaccggaaagctttgccagggcaccaatgtcgcccgcgtgcagctcctttacctcctccggcttgttgccccgcatcacgtagagctttcctactttttcctccacatccttatgctgattgaataagatgtcgtccgtctttaacacgccggaattgactttaataagggaatattttccaataaaaggatctgcgattgttttccagatataggcggattttgcctttgcgaaatcgtaatccgcattgtaaacctcattggtcttggcattgatgccggtgcaggtgcgcttttccgggcttggcagatatttcacaatgtccaccagcagcgtgtagatgccgcgtgccaaaatattggaacccataagcaccggaacgatgcttccctccgccacattcacacgcagtgcctgtcggatctcatcctcagagaattcctcaccgccaaaatagcggtccatgaactcctcgctcgtctctgcaaccgcctccatcagagcctctctgcagatgccaagattctcctttgaataatccggaacgtccgtcttctcaacctcgccgttctccttccagcgcttcgcccgctgctgcagcacgttgacgtagccgacgaactgtccgttctcacggatcggcagatggaacggtgcgatcttttttccgtagagttcctgcagatcctgtaccacctggcggtagctcgcctcatcgatatccatatctgtcacaaaaaccatgcgcgggagcttatactgctcacataattcccacgccttgcgcgtgccgacctcaatacccgccttgccggaaaccacgatgatcgccgcgtcagctgcacttaccgcctcctcggtctcacccacaaaatcaaaataccccggtgtatccagtatgttgatcttggtatcttcccagataatcggaacaaccgaagtattgatggagaaatgccgcttcatctcctccttgtcataatcactgatggtatttccgtcctcaacctttcccatacgtgatgtcatgcctgccagataagccattgcttccacaagactcgtcttaccacatcccccatgaccaagtaaaaccacattacgaattctgtcagttgtgtaaacattcatagcaaaccctccatattctgtaattgttttatgtatggatatattttactaaattccgtctttttttacaacttatttattcaatattactaactgtatttataatatcagaaacatttagcaataatatgtattacttttgaacatttttggaatacttctttttattatttacacaatatttacaatttggacatgttctcgccatacacgccgcatctttccgtactctcacagattaacgtgttgactttccaggcggaaatgtctatgataattgggtatcaataacttgtgggggattcatttatgagacttcagaaaatcggatttatcgggcttggactgatcggcggttcgattgccaagcgccttcgtattctacataaagatctggtcattatcgctacagccggtcatgccgcgacgatagaggccgcttacaaagagggactgaccgacaacgccagcccctgtgaactgtcggatttctatgactgcgactatatttttctgtgcacgcctgtccagaaaaacatggaatatctgcgtcttttaaagggacacgtctgcgaccgctgcatcattaccgatgtgggcagcgtcaagaccgacattcaccgggaagtgaccgccctcggcatggaggcgcagtttatcggcggacatccgatggcaggctccgagaagaccggtcttgccaatgctagggaatttttattggaaaatgcttactatattcttaccccgaccgcccagaccgatcccgctgcgttagaggactttaaggagcttgtggcatctctcggtgcgataccgatggtgcttgactacgagcagcacgattatgccactgccgccatcagccatctgccccacatcatcgcctacagccttgtcaaccttgtaaaaagctgcgatgaccgccaagagaccatgaaaaccatcgccgccggtggctttaaagacattacacgcattgcctcctcctcccccgtcatgtgggaaaacatctgtctttccaatcaggaacagattctaaggctgatcgactctttctgtgaggagcttggtcagatgcgctctgccatcgctgcttccgacagcaaagtgctgatggaggcctttacctcggcaaaagactaccgggattcactgactcttcacgcgaacggcaccttaaagcaggtatatgagctgtacatggatcttctggatgaagcgggcggaattgccacagttgccaccattcttgcgagcaaccatttaagcatcaagaatatcggcatcatccacaatcgtgaatttgaggacggcgtgctgcatctggaaatgtacgacagcgaatcgctcgccgccgccatcacgcttctaaaaaagcaccactacaccatttatgagcgctgaatatatgtctgcatcgaaaaacgaccgctttcgcggtcgtttttcattggggcaatctattttacagaatatggttacttacaaagttttttaaattcatcagccacaaactgtacctgggtaccgataatgacctgtactgttttctggcttgggcgaaccacacctgccacaccggcagatttgatctttttctcatctaccttagtgtaatccctgatctccagacggagtctcgtaatacagttatcaatgctttctatattctctttgccaccgacaccttcaagcacgattcttgccacttcggtgtaatcattattctcaagctttgcacctttctctgcatcatcatcgtcatcttcacgtcccggagtctttaaatcaaacttcgtgatcataaaacggaatacaacatagaatacgacaaatgctgcgattccgagcggaagaatcatccaggtgttctttgccgccggaagggaagcggaaaagatcaggtcggttgcacctgcagaaaagctgaagcctgcgcggaagcctaccagaaccgtgataaaggtaaaaataccgtataataatgcatatactacatagagtgccggagcaaggaacatgaatccgaactcgaacggctcagtaacgccacagatgaatgaacaaagtgctgcagaaccaaccaatccgattgcgatctttttcttattgctctttgccgtgtgaaccatggcaagtgccgcacccggaataccaaacatcatacacgggaagaacccggacatatacataccgagatcccatgatacatccgccgatgtcttgcccttccagaagttggccagatcaccgagtccgatcgtatcaaaccagaatacgttgttcaatgcatgatgcagaccggttggaattaaaagacggttcaaaaatgcgtagataccagcgcccactgcatccattcccacaattgcctgaccaagagcgatcagtgcgccgaacacaaccggccatacgaataacaggatagctgacacgacaatcgataccacaccggatacgatggcaacacagcgtttgccgctgaaaaatgccagccagtccggaagcttcgttcccttgaacttgttataacaggttgctccgatgataccggcaagaataccgataaacgggtttgcaatcttgtcgaatgccagcgtcttatccgcattctctgcgattgacggcatcaatgtggtaacaacgcccgtcgagagcagattggtaatcatcagccaggacgccagcgccgcaagtgccgcggtaccgtcattgtcgtctgccataccaacgccgacgccgatgacaaacagccatgccatattgtcaattaaagcgccccccgcttttacaaggaaaaatccaatcagcgcctttgcacctgtaatatcaccaccctgcatggttgccgggcagagtgcatatccgattcccattaagataccgcagatcggcaggcaggcaaccggaagcatcaatgcttttcctaacttctgaagatatttcatcataacttcttcctccttctttttctggcacagtagactttctcactatgccatatatgatttgcccctttattttataccggaaagctccggttaaaataccattgaataactgattacttcgatgtgagaatcagaaccgtatcctgcggcgtcacctccgcacccgtcaccgcttttacttctgcaaaacagtctgtattgcagacaatcatcggtgtgatcacatcatatccggcttcccggatcgcattaagatccgcctccaacagcagatcaccctttctgactttatcccccgtctttacatgcgccttaaaatgcgcaccctttaatgcaacggtgtccagtccaatatggagcagcagttctgccccggtatccgtcgtcatgctgagcgcatgcagtgtatcaaataacaaggtaatctccccatccgccggcgcgtaaatcctgccatccgtgggtcttaccgccacgccttttccgagaatctccccgccgaacgtgggatcgcttacctcctgaagcggtactgcctgcccgcttaccggcgctcccagttccagcgctttctgttcttttttatgaaataatccaaacatcagcctctctcctttctcattcatcgctgtctgtcgtaattctccggatatgaattgccaggtacatgatctcttccttggtcaccgtgcagtcatactgcgcttcgatgtaatcggcaatttttctggcacacgcatattccctcggatatttcagttcaatcagatcggagaactcctgctcctcatcggagagcatttccttgctgaagaagattcttctcgcgaaaaatttcagatgcgccacaaaccgctcgtagtgcatggatttttcatccagcgctttctgatactctgcctttacaatctcgattcccttctgaatcacatccgtgatcatataagtgtcatgtatatccgtattatattcggcattcacaaaatgcagtgcaataaatcccgcctcatcctccgggaaatgaatatccagtctctccgcaaaaaggcggagcgcatactctccgacgagatactccctgcggtagaactgccgtatctcccacagaatagcgttcgacagcgcaatcccattcctgtatcgttcaatcgcgaaattgatgtgatccgtcagcgcaacgtaaatactctggtttaactccatgccgcactcgttcttggcgtaggagataatgtccgccgagatctgcatatgctccatagggatgttggagatcatttcctgaaactgccttgagagcgccgaattttcgatgcagaacactttctgtacccggctctcgtcaatgtcgtctcctgtcttcgccttaaacccgagtcctcttcccatgagaacgacttcctgcccgttttcatcaaatgccgacaggacgttgttattaatcactttacttatcttcatgatttcattcccatatcctaactctgacaggaaccgatcagcgacagcgccgcctcatctcccaccagtgtcacatcgttgtgaagctgtaataccgatgcaggcacctccggtgtgatcggtccgaaaaaggcacgttttacaatctccgccttgtcttccccgcttgccaccatcagaatcttattcgcctgcatgatcgtcttgattcccatcgtgtacgcctgccgcggcacgtcctcctccgatgcaaaaaagcgtttgttggcctcaatcgtgctctgtgtcagattcacacagtgcgtcgtgcggtcgaactgtccgttcggctcattgaagccgatgtggccgttgtgaccgattccgagcagctgcagatccactccgccgagcgcttttatcttcgcctcatagcgcgcacattccttgtccgcatccgtttccattccatttgggatattgacattctgaaaatcaatattgaccttgtcaaacagatgctccgccatgaagtaaaaatagctctggtcgttcgactggtcgagccctttatattcatccagatttaccgtctttacctctgaaaaatcaagatccccctttttgtaccactccacaagctgtgcataagtgccgacaggcgtcgaaccggttgcaagtcccagcacacagtccggcttcataattacctgcgcggatatgatgttggctgcctttctgctcatgtcataataatcttttgcccgatagattctcatctgactccctcctctttcaaacaacagactcctcttggaaaaaaagaaaaccggaaaacttcatacatgcctaaatagcctgtattcagctttccggtttagtgcaccttgcggtgtgaactatcctttaactgtctttgattataaatttaatgaccactattgtcaatagtgtcgcaccatttcattgtcatttcgtatataatgcacacaatcatccgtgtctttttgtctattttcacggtcagatgtcgtgaaagacctggtaaatatcaatctttaccgcattcgaatccgatatgccgataaattctccaccgtagtaataacccttttcctgctcttccacatgtacgatttccagcacagcgtcaatcatctcccggtcaaacaggctgatcctggtgtcatagtagctgccaacctcgaggctcttgcgggacaaaaatccgatcccgccgcgtgagatattcaggatatccgcattcacaacgccgtcgtcggcagtgccgtccgcatttaaccgcgccagttccagcgcgtgttccatcttaaggcgcttatgttttctcttttccagcatggaaccaactcctcctattttgcggtaataaacatcgcatcaccaaagctgaaaaaccggtaacgctcctgaactgcaatctcatatgcatgcagcacatgttcccttcctgcaagcgcagacactaacatcaccagcgtcgactccggcagatggaaattcgtaatcaaagcatcgatcaccttgaactgatagcctgggtagataaaaatctctgtccatccgctcgtctcatgaagcatgccgtgttcatctgcggcagactccaaggttctggtgctcgtcgttcccacggcgataatacggtgtcccgcctgttttgcccggttgatcttgtccgcctccgactgctcgatccggtagaactcggaatgcatgtgatgctttaacacatcgctctccttgaccgggcggaaggtgccaagtcccacatgaagcgtcacctccgcgatctccacgcccatggcgcgcacctgctctaaaagctccggtgtaaaatgcagtcccgccgtcggtgccgccgcggaaccgtcatactttgcatacaccgtctggtagcggttcttgtccttcagctggtgtgtgatgtacggcggcagcggcatctgtccgagctgatccagaatctcctcaaaaattccttcgtaatggaactggatcaggcggttgccctcctccacaatgtcaatgacctcgccggtcagaagtccctcgccgaaattgattctggttccgatcttgcatttttttcccggtttgaccagggtctcccagacatcgttttcttttctcttgagcagaagaatctcgatctttgcctcagtgccttccttcacgccatacagtctggcaggaattacttttgtattgttgatgacaaggcagtcacccggtcttagatagtccacaatatccttaaaatggcggtgttccacctctccggttgccttgtcaagcaccatcagtctggagcttgagcggtcctccagcggatcctgtgcgatcagttcctgcggaaggtcataataaaaatcttttacgtccataactactcctcttacgcacgaagtctgatatccagtgttgcttcgagatgtttcaaaatcttcttcacaaatccttctaccatctcgcccgtgagctcttcctcctgcggggtaaatacaacagagaatgccatgctctttttgtccggtccaagctggatgccttcatacacatcgaacagattcacatctgtcacgtatttgcaggcttcccggatgccgttctcaatctgtgcacaggtgatatttttatctaccacaaacgcaaaatcgcgcttttcctccgcaaacttcggaagcggagtgaaaatctgctctttgccataccatttcttaagcgccgcgaggtcaatctccatcacataggcaggcacacgcatgtcaagttcatcctgaatctcataggaaagctttccgagataaccgacgcgctctccctcacagaagatctccgccgtctggtacgggtgcaaaaaggttctctccgccgcctcataggtaaagcttacgtttaatgcatccgcaaccgtctccgccagacccttgagtgtatagaaggattccttttctccgaaaacgcccgcacagagggtctctctctcatccgggtattccgtgagcggcagtgcctttggaataaaaacatttccaagctcaaaaatgcgtccctccagaattcccttcttctggtttctggaaatcgcgtacagcatctcggatgccagcgtggttctcatcagggataaatccacgttgatcgggttgatcagcttgatcgcctttctctccggcgcgtcttccggcagtcttaacagatccagatcggacggggagaagaatgagtaatggactccctcgtaagcgcccgctgcgcagagtgcccgcttgatcttaagctccgtcttctgctttaagttaagacctcccagggtcacttttgctgtcggcataaaggtcggaatcacatgctcataaccgtacatgcggatcacttcctccgccacatccgggtaggaatccatatcctcgcggtatgccggaatctgcagggtaagttcatccccgtcgatggacggtgcgaactgaagcgccgataaaatgcgcagcatgtcctcctccggaacctcaatgccgagcacaccgttgacacgctttacgctgaccttcatctctttcggctcgatagaattgccggtggagacttcaagctgtgtggacgacacttttccgcatcccagttcttccacaagatgcagggcacgcttcatcgccatgaccgtcgtgtactcatagacgccctttgcgtacatcgcactggaatcggaggactgtccaagcgctcttgaactcttccggatattgtcgcgcgcgaactttgcggactcaaacatgacttccgttgtcgtgtccttgatctcggagttcagaccgcccatgataccagccagtgcaaccggctttaccccgtcacagatgacaagattggaagaattgagcgtaaattctttttcatccagcgtcacaatgcgctcgccctcgtttgcacgtctgacattgatctgatcgccctccagataagcataatcaaatgcatgcatcggctgtccgagctcttttaacacgtagtttgtgatgtcgaccatgttggaaatcgagttgattccgactaacgccagtcttctgcgcatccacgccggggactccccaatcgtcacgtcatggacatagtgcgcgatatagcgcgggcagagatcttttgcggatacttccaccttaaagtctttctgtaccgccgtctccgtgtaatctaacgccggctccctgcactcttttccgagcactgcagccacttccctggcaattccgtaaatgctctgacagtccgggcggtttgcggtgatcgcaatatcaaaaatccagtcatccattccaaggatcggctttacgtctgctccggcttccgcatcttccggaagaactaaaagaccgttgtatcctgcccccggatataaatcttcgttcaatccgagttccgttccggaacacagcataccgtaggattcatagccgcgaagctttcccttcttgatcgtcatgacgccctcgatcgtcacatgatcctttgcggtcgcatagactgttgcgcccacaagcgccagcggatattttcctcctgcacggacattgtctgccccgcagcagatctggaaggtgccgtgctctccggcattcacctggcagagacttaaatgggtatccgggatcggctcgcaggattccaccagtccgaccacaacattgctgatgtcttttccgacttcaatcagctcctccacctcaaagccgcaggaaaacaacttttcctccagttccttcggggtaacatcaatatctacataatcttttaaccagcttaatggtgctaacatgataactctccttttctattcgtctttaatcgtcaatctgctttaatacgcgaagatctgactcaaacagcagcttgatattgttaatgccgtattttaacatggcaattcgctcaataccgataccgaacgcaaaaccgctgtactcattcgtatcaatgccgcatccttccagaactttattgttgacgacgccggctccgagcacttcgatccagccggttcccttgcagagcttacagccgcatccgccgcactggaagcagcttacatctacctcgacggacggctccgtgaacgggaagtaggacgggcgtagacgcgttgtcgtctcttttccgaaaatcttcttcacaagctcatctaacattccctttaaatcgcagagggtaattcccttgtctaccacaagaccctccatctgggtgaacatcggagaatgtgtcgcgtcgtcatcggaacggaacaccttgcccggggagatgatcttgatcggcggtttcttcgcctccatcacatgaatctgtccggcagatgtctgggtgcggagtaaaaattccggtgacaggtaaaatgtatcctgcatatctctcgccggatgatcctgcggtgtgtttaacgctgtgaagttatagtagtcggtctcaatctcggttccctcgtacacttcaaatcccatggatgcaaaaatgtcaatgagctggttgcgcacctgtgtgaccggatgcagattgcccttttcgtgttttactgccggcattgtgacgtcgatcttctccgcctcatatctcttccggagcgcctcagcctccagttttttcatcttctcttccatgatcgtctcaatggcggtgcgggtgtcgttgacccactgtccgaccttcgggcggtcttccggcgctacgtctttcattccctttaacaccgcagtaagttcacccttttttccaagcactgcctggcggacttcattcaggcggtctaatccatcagacccttcaatctctgctattgctttttctctgatctgctgcaatttttctttcatttctaattctcctttaaactatttcagacatcaaaaaaggaaccatccatccctgctctagggacgaatgattccgcggtaccaccctgtttcttctcttcatatcaccaaagaaaagctctcaattcatacgtaacgtgtatccgacgtcatccactactttcacttcacagatgcagctcctgtgcgaacttcaagtccaggtcttatcctaaacgggcttccagccgatgacccgctctctctgaaagagtctcctgcactctactgatatcttacgatacccggaatcgcttccgtacacattcacagcctttgatttttctgaattctgtatagcattttagcacagcaggtgcaaaacatcaagcttttttattcctgctggttttaaagcgcttccaccatttgcggaagtaagcgttgaacaccacatttacctcggcggacatcatcatgatgtacatgcagaagtaaagccacagcataatcaaggcaatagtcgtcaggctgccgtacatggaaaaaccgttaaaatagtccacgtagacagacagtccgaaggaaaagacataccacgctaccccgcagatcacagcccccggcagctgcccgcggaaggaaagcttccggttcggcagcgccgtaaagattacatcgaaaaatgcgatcaaaagcgccagcatcacaagcccgcggaaatgtgccagcacccgcgaggcatgttctaaaatcggaacgtactgtgtggcaagtacctttaactggtttccgaacaccagaaccagcagggtaaaaacaatcgccaccagaaaaaccaccgtatagacgaccgcccagaatctgagcacaaaccagtttctcgtctcctccagatcattgaccgagttcagtccgtccgtcatgtactggacgcccttggccgctgaccagatcgcgatgatcgccgtgattgagataattcccatggatctgctgtacacctcatccacgagcgatatcagaaacggagagacatactccggcatcagatgacggatgatctcaagcagcatggactctgtcaccgatgtatattgcagcagagacgagaacaccatcagaaacggaatgatggataaaataataaaaaacgccgactgcgccgaataggcattgatcttgtctcgcttgcatttatcaagaaaggatttgacattaccaataagcttccagatcatattgctccccttcaaaaagcgaatccgtcaggattcattatttcatggtttccagtttaacgtcattataaaaatattgcaagatctcttcgtaattcattccggccttcgccattccgttcgccgcgttctggctcatgccgagtccatgcccgtagccgcctccatataaaaccatgccgccgtcctcctgtttcgttatggcaaaaaacgcactcggcagcatcgtcacatccgtctgttccgcgccgtctgcgcatgtcagttttgcggtacagatccccagaacttttcggatattatactccgtccgcacaagagcgcttcccttctcatacgtgatctttaaggcaagcagtgcaccggagctgccgcgctccgccgcgctcatgccggtcacctcccccagtgccgccactgatgccgcatcgggattctgtatttccgtagtctgaccggtcggataaaagtttatattctttggtgaactcttccaccgttccagcagtatggaattcacttcatctgttttcccgtggtaatccgcctccgctctccagcggaaataccggcagtcactgtcgtatccatctgcgggactctgaatataagcaagaaacgcctcctccccggagagatcctgcatctttccatccgtaaggagacacgccggtgtcagatagccgtattccgccggatcttccacattccacacatcagctgcggcggtgtatcccatcgacgtggaaaaataatacgcctccacgatgtttccctgataggacagcacttccccctgtgtggcgattaccgcctccctggctgcgtccgcgtccgtcacccggttgtatacctgatacgcggtgctgtcatcaatatgtgcgccgtattccgccagatcgccccgaagcagctggatacaggcatagctgcgcgcgcagaccgcctgtgctttcaatgcctccggttcataggatgccggcatttcactcggaacgacgtcctgcagataccgttccagcggcagactgttgaccagcgtatagccgtcccccaggcaccgcacttccatgctgcccccgtagccgttagaaagctctgcgccatctgcatcacagatcaccacacagccctcctgctccggcgtcaccgtaaatgttccctgtgtatctcctgtcatctgatcggatgcagcaatcagcgtctgcgctgccacctgtgttgtctctccctgccaggtgaccgctgcgtctgacgtacatttcaggtagacggactgacggcattttgttccgtcatcccccaggagcagcacacggatttcgcggatgactgccggctcgcggattaaaatggcgcagacctgcttctcccccgtcacatactccacgttcatattaccgagggtcacatcggaaatggatttttccgacacttccccataggtctggtacactggcagttttccggtatggcaaagcttcccgtatcctttgatctcgatggtctcatcgtcataggacaacagttctccctcgatggtctcctgctttacacgcagtgccgtaagttccccgtccgccagcacaatatcacagacacagggggcaacatcctccgctaaggataccgcatccttgtggtatgccgcgcccgcatacagaaaatccacgccgtcctcggaacagtccgtaaggtatgcattgtccagcgtaaattccttcttcagcgttcccgcgactccgatgcaccggttttccacgcagtagccctcatatccgttccactgcttaaaatatgaagctggaagcaccgtgcaaaaatctcccttgtttgtcataatcacattctggttctccgcttccatgacatccacaaccagaaactccgttttcgtcacgacatgttccatatcaagcagatccagaatctgaccgtagacgtaattccagtcttcccggcatactttctgctgttccctcatgacagggagctctatgtaatcggacagttgcagctttgcgagcagttccccaagtacttccccggtcagcctgtcttcgggaaatgtctcaaaaaaggctttccaatcttcctgcccgtatactccaaaggagagttcctcttttatttccgcaagttccacccactcttcgggcaatgtttcctgctcccttaactgtctgtcccgatatccagacgcaagcgtacccgccgcaagcaaaagcaccagacatacgatggcgatgtatgcctttacgcctctcttttttgttctctttcccattttccacttcccatcacgctttatgccttgccccagaattctctgcaaaagagtaaaaaaacagaagctgcctcacacaaaggcagcttctttcttccgtaacttttcaactctttggtacctgatctatctttcgtatccgtcatccttcgtatcctgacaggttctctctcgtactgtaaacttctgttgtatccctcagaatcttttgtatcacccaaaatgccgtttcctacgtttttgactcctagctgccgctaggtgggtaaccgcatgtcagtttctgtcttccactgctcgcgtaccttgcggtactggtggcttgacatctgcctccaaatataagaatcccataaaagtaaatgtaggttcaaaaatgtagggtgtcgcacatcccaggctgtttcttactggttttattatactttaatatgccccgatctgcaaccaaaaattagtgccaatttctgtgcgcatttctattttttttctgaatgtaaaatgcgccgcgcatctttaatgattattgctcgggaaatacggacgcagcgtatttgccatctgtgcaatcggcatgctctgcagccacactcttcccggtcccgtaatcacggtattaaaaataccctcgccgccgaagagcatattcttcactcccggcaccgtcttcacttcgatcttacaggagcctgtcatggctgcaaggtatcccgtgtccacaacaatctgctgtccgggtgcaagttcatattctttaatataaccatcaaattccagaaatgcggttccacttccggaaagcttctgcataataaatccctctcctccgaaaagtccgctcccgattctctgctgaaagaacacggacagatccacgctggatacagcagcaagaaatgccgatttctgcacgatcaaatcctgtcccggtacaatatcaaacgcccggattgatcccgggaacgacgatgcaaacgcgatcatcccattcccgttcattgccgtgtagcggtttaagaaaatactttcccccgaaagcgctcttccaaacatcttgccgatgccgccaccagtcgtctccattttcatattcggggacatccacgacatggcaccactctccgtaatcattacctctccctgctccagattgcagattacaaccggaagcggttctccctcaatcgaatatctcataacgctctccttcctctgttgcggacgccctacatccgctgtccttttttcagctctgtctcagtaaaagcgcccggcagaagctcctccaaggtaaaaatcttatatgttccgtcctcctttaccaggatgatctgaaacgtatccgccttgcagaactccgacattacctgtctgcacacgccgcacggatacagataatcgtccgcgtcaccgctgatggcgattgccgtaaaatcacgctccccttcggataccgccttgaaaaacgccgtccgctccgcacagttcgtcggtgtgtacgcggcattttcgatgttgcatcccgtataaatcttaccatctgcagtaagaagcgccgcacctaccctgaaatgggaatatggtacatacgcatgttcctttgcctcgattgccttttctgccagcaactctatattcagatccatcctgtatcctccctttttacatctgatgatccttttttattgtaatagactcttctgaaaaaagaaagcattttttggtactttccctttttaaggtaccagttttcttttaaattttaaaattttcattaaatataattcaattttcttgtataaaaataagtacatatgctatgatgaaaagacgaaaacattaaggagggctaacaatgaatcaattctgtgaaattacacccgaactgcgtcggctggccgcaaagtctgccgaatgttcaaaaatagacccggaattatacacaagatacgatgtcaaacgcggtctgcgcgatctgaacggaaaaggtgtcctggtcggactgacggagatctcggaagtcagttccacaaaaattgtcaatggtgaatctgttcccgcagacggcgagctcttctatcgtggttacaatgtcaaagatctgattgccggacttcccgaggacagccacttcggctttgaggaatgtacctatctgctgcttttcggcaagcttcccaagaagcatgagctgcgcgatttttcggctctgctgagcagttaccggacgctgccgaccagctttgtgcgtgacattattatgaaggcgcccagcaaggacatgatgaatacgcttgcgcgcagtgtccttaccttatattcttacgatgagatggcggatgatgtttcgcttcccaatgttctcagacaatgtctgcagttaatcagtcttttcccgcttttatccgtgtacggttatcaggcatacaagcattatcatgacggcgcgagcctgtttattcattccccgaaggaagaatattccaccgccgaaaatattctgcacattttaagaccggacagcaagttctcgccgcttgaagcaaagcttttggatattgccctgattcttcacatggaacacggcggcggtaacaactccacctttaccacccacctggtatcttcctccggaaccgatacatactccgttattgcggcatcgttaggttccctcaaaggtcccaagcacggcggtgccaacatcaaggtggtgcgcatgttcgacgatatgaaagccaatctcaaggactggacggatgaggaggagatcagccgttacctgactgccctgctccacaaggaagcgttcgatcacgccggtctgatctacggtatgggacacgcggtctattcgctgtccgatccgcgtgcacagatcttccgcggattcgtaaagcgtctctccgcagaaaagggctatgaaaaagaattcgcactctacacggcagtggaacgtcttgccccgcagatcattgccgccgagcgcaagatctataaaggtgtcagcccgaatgtcgacttcttcagcggattcgcctacagcatgctcggacttccggtcgaactctacacgccgattttcgccatcgcgcgaatcgccggatggagtgcgcaccgtctggaggaagttgcaggcggcggcaagatcatgcgtcctgcctacaaaaatgtcggtgagcataagatttatgtcccgatggatgagcgtgtctgattttcacagcacacctcattctaaaaaagccgccccggactgacggagcggacaaaatggaatactatggaaaatacgcgagatgagagaactccgtctgtaatggacggggctcttctttagaggaaaatgcgagtgtttctttcatgccgcgtttgacatcttattctgtgtctttgccacgtttgaacactccgccggctgtgtccgacacgccgcagacaatgagcgaccttcctagtggcgctaatgccgctgcttcacagacaatataaaatcgcgcgaaccgaaactcgttggcatctgctattgaaaatatggcagatgccaattcaaacatcggcttcgcgcgattatgttttgttcagcagcggtataagcgccacacgaaagctctaaaattgtctgtggcgtgcggactcatccggcggagtgctccaaacttggaaagacacggatcatcagggatgtcaaacgcgg

SEQ ID NO: 11622 - DNA, 928 bp, Unknown
  gut microbiota DNA sequence
acattgtattaacgtcaggatatgcgcagaaggcatcgaggaaaaagaatggcttctgaaaatgaaagaaatgaaggttgattatctgcagggatattattttggaagaccatgtggaaagaaacagtttctgcagcaatatgtcagtggcatcaacgttaaataaagagagtaaggcagactcagctatgcggggctgccttattttatggtcttatcagaaggatggatccataacggcttctttcagtttttccgggtcattggcatcagggtgagacaatgcacagtcaaaattctggatcaatacatcaagatttgccggatgagcaggagcttccttcattttcaagtagcgttcccagacagactgcggcattctgccctgacacatatactctccgacgataacattgcttgcgtcaatgatagagcagttcggaagaagggatcactgtgtcggacacaccgaaatactcacattcatcctgaggtaatgccccgtggattgcatcagccagcatcttggtattacctgttaaactgctataaacgatggaatattttttattcatcgtggatgcaaacatccggctggttagaaatgccacattttatgaaccgaatatccagctgtatttccagctgaaatcccacgatgtgtgcttccaataatattacttatcactgaaaggcagacgtgtacctgatgcggattttcagcccacaatctttccgtctttaataagagacaagaacaccggtaccagttcgggatcgaactgcgtgccgctgttttttttcagctcacctgccgcgtagtcgatcgagcgctcctgtttgtaggggcgtctggccgtcatcgcgtcaaagcagtctgcaatggttaagatacgtcccatgaggggaatttccgttccttttaatc

SEQ ID NO: 11623 - DNA, 1125 bp, Unknown
  gut microbiota DNA sequence
gagttctgcacgctgaagtatcacaccgagttccctcagatgaagaaatccgacgtcaacggcgaacatcagcttccactgtatgcgtacttaaaatccaagaagggatttgccggattcggaaaagtggcgaaagcggcggcgttgggaataatgctccgcaaaatagataagaattataaggagaaccccgacatcaaatggaattttacgaagttccttgtggacaggcagggcacggtagtggtaagatttgaaccaacaggagatatgagagaactggaagaacagattcttacactattatagaagcaaaataacacaggaatggagaacggtatggaacgagtggatattgccattattggaacgggaccggcaggtgtgtcggcagcgattaccgcgaaagtgagaaataaaagtgtactgttaatcggcagcagagaactcagcgagaagatgagcaaggcgcatcagattttaaactatccagggctgccggaagtttcaggagcagatctggttgccgggtacaagaagcagttagcaggtcttggcatcgaggtgacggagaagcgcgtgaacgcggtctatgcgatgggagattattttgggatccaggcgtccggcgagattcttgaggcgtccaccgtcattctggcagcaggaatcgtcatgggaaaaccgttcccgggagaaaacaagctgcttggaagcggcgtcagctactgcgcgacctgtgatgcgcagttcttccgcggaaaggaagttgcggtgatcggatacggcagggaggcagagcaggaagcagactatctggcggagattgtcggaaaggtgcattatttcccgatgggaaaagaggagccgcagctgtcggatgccgtagaggttgtgcatgagcggccgaaagcgatcacaggcacgcagacggtaagtgcgcttgagacggacgcgggttcccatccggtggacggcgtatttatcttaagagacgcgatcgcaccgtcacagctcgtgccgggacttgcgacggaggagaatcacgtaaaggttaatctccagatggagacaaaccttccgggactctttgcatgcggagacattaccggaaagccgtatcag

SEQ ID NO: 11624 - DNA, 13327 bp, Unknown
  gut microbiota DNA sequence
aatctctaccatagtcattccactttcataaccggcaacaaaatcattgtaaatagccatccattttgcattatgcttctgccttccgcttaatttacgatttttataatattccaattcttcacgtaactcagcgttctcattttccaactcttcaattctttttaatgcttcctcaagtgttataaccttctccacttcattgtttctccgttcatgtcattttcgttttgtctgtattatatattgataatcagtattagtcaatttgattttgtcatgcacgaacacttttcatattcatcatgtgaataaaataccgctgataccttttgcaagctatgtctttccatagactctctgcctgaatattcctaatccactcgtttagattccattttcgttttaaagccggtccatattttagaatcaaggatgttattacatctgcacatctttcaaaggctgcattctcttttgcatcttcataatacttctttctcattgttgctcccctttccgaacataatttgttttggcaaccagtttgaattatctgctttgcgcaaatcataaacctaaatcttatttggtcttcccaatccctggtgtcttcggtaaatcaagccatgctcctccagctccttcaacattttgttaaccttcttattccccaggttcatcaggttcataatttcttcgattgtaaaaatgatataggtaattccatatttatcacgccatgcgtctccattggagtctgacaggcacttgtgatccagcagtattccatataatacttagtaaaatcgaacatcctttttgtaaatgtgtgtttctatcgccttttagattaaaataatgtgaacatttatttttacacgttttattcatttttgctttggaattataatcatttcgtgaaattgaatattagaaaaggctatctcactttagatgtgaggtagccttgacttgaaaaattatacactatctgttcttttaatttacaatttatcaccatacggtaacgacttaatataatcttccataaaatgccaatctggaacatatccttcttctgaatatttatgtttgtcatcaataaaaatcgttccgtcagtattatgttgcacaggaagttttataattgtatccgaaattctttccattaagaatgctctgccatatgaatatttatattgctctttttgcaatatgctcacaataaacattcctaataatttgtttaaccactcagctctaactactaccatatggtcacctgtaataaattcatccgcttgataaaaacaagtagctgttgtatcgcctatcgagattgcatttccttcttcgacaaattcactaggtatatcttttttattaacaattaactcacaaccattattttcactcgttcttgtaatgtaatgaattccaaaatcctgctctgttgtttcttctaactcgtctttattaaatgcttttgctttatatggtttctgaatcaaatttcccaaacgaaactccttccatttgacaactttcaactccacagtttcataattattttgtgtcgtcaacggtttatgatttaatgattttatataatcttccatgaacttccaatctggaacataaccatcatccgaatactttttatccacatcaataaatggtgttccatcagcattatgctgaataggaagattgatctttgtatcagccaaatgagttttccattttcttccaaatgaatattttggtctttcttgcgaatatatagttgctaaaaatatacctgtatattcattcaaattatcattatatcctgcaacaatatctgtggttcctataaaatctacatccatataatttgcatatccaacagaaccttgtccgttgcaaatgaatataatacaattaccctttgtcattaaactttcatctttaacacaatgcaacataactccattgtcatcttttttcgcgcctacataaaaacattcatttccattttcaagcatttgttgatttgctttaccattttgcatatcataaaacaattttgatgttttaaactctttccagtcattaacattaagattcataaatcttgccctccttgataagatacgcaagataactattcaatgtccgctgaaaatcttcttcacgaagttttgtgtaatcagttttcatatatgcttcgcaaagccattcatctttcccggttacttctgctgttgcagataagcccgcaactgatttatgattacggaataaacgaagccattcttcttcaatagccttccatttactatttccatcatcatcaaactgttctacgcgtccgagatttttctttttcttgaaaccatcttctttatagtaaccaaaaaatgtttcttttgtggttccatcaactttaacatgtggttcacctaaagtaaaaaccatacaacaagccgatgcagatgctcccggataaaaaatttcatttggaagtgtaaacacagcttctaatgtgttattttctaacattgctattttttcattttgaataatggattttgttcctattgctgttgcaactggaagcaatactgccattttcaccgtcttacgaggtttaccatctttttctcttttatcattcatttctttgattacatcagataaataatgaacaaatacaaacccctttgttgggtcttcttttccattctttgaatttccccaacttgctttgtatttagctggtattccaatcggtttcgcattatatggcggattcataagaataatatcagggtttgcatctttgataaactccttgcaatcaaaacaacttccaaatttaatattgctgtttccatcaccatgaatcagcatatttgttgtagaaagaccataggcattctcctcaacttcaatgccataaatatgttcttcttttaccttacgcataaggtcttttgcctcttcctcacgtttaccacgtctacaatcagcaagctcttttaccatcgcttgtacaagaaaagaaccacttccacaagttgcatcaagaacacgctttgttctatctacgcccgtagcgcgacacataaactctgtaatatgatcaggtgtaaatgcctgattcttatctgcttttcctgtgtatttattaaaagcgatgaagaacatgttcagaatatcctgcccttctgaactgtcagtatcaatatatctgtaaatatccaacataattgtttcaagaatttctacccaatcagttgttttcaaagctctaaccttttgatttcccagaacattcttttgaagtaattcaatcttcttagctttattgtcagagtcatccaacaaatcagataatacgccttcaatagcacctctgatgccctttggtgtcatcagactccagaactctttcattgaatcaacaaattcttttgtaatcaaaacagtacctttcttttttacaaggtctttgatatacaagagacttgttcctacgaactgactacgaagattctcgtcaatatcctttttatgcaaaagttcatttaatgaatatgtatttctaagaactgtttctcggtcattggatttattgattctgaacaatcttacataatgggccattctgtccagcatagcttcatctttcaatacatgttcatcatcaacaaatgatttccatactttgattttatcgttatttgtattggcaagaacacaaatagctttgtttcccggatgaattgcacgttcttcctcaagatattcacgcaactgcttttcgtcatcatccacatagttctgctttgtctcaatcaaaaccaccacatcatccatttcaaatcgaatatccaatttgaagtgtgatacaggatgaccaacctttgcttccagttgtgcttttccacctgccgcctgaacataactgtattctcccgcttctatattgcttgtcagaaattcctttccgacaatttctaccatgtcatgtctaagcataatatccttaactccttttcatgaaacaatctatataattccgaaatgcttaaacgcttgcatgattgcttcttccttctccggtgtgcattatggctgtctcgcattttctgatttaggtaaattaaaattctctctcacatccagtccgcatttcttcttaatctgtgcaatatacaacgaagaaaccttcagtcctgtctgttcgagtacataagtctttatctgttcataggttgcttttcccttgaactctgataaatccatatcctccaacgagatgtcaaccttcactttcctactgtcgaccagtctccgttccacttcggtccgcgctgagcaaagccacagtctccacatgtgtcgtgtgcccaaactgatccaccggacgcactttccgaagtgcatagccgcccccgcacaggatcttcagatctcttgcaagcgttgccggatcgcagctgacatacacgatgcggtccggttccatacgaagcatcgtctccaggcacttctcatcgcatcccttccggggcggatcgacaacgatcacatccggatgaagcatgtccgcatctggcttccggctctccttttcatagaactcaggaagaacctcctccgcttttcccacgaaaaaggaggcgttggtaataccgtttaatgccgcattgctcttagcgtcttcgattgcctgcggcacgatctccacgccgtagaccttccctgccttctgtgccagaaacagggaaatggttccaatgccacagtatagatcccagacggtctccctgccagtcagacccgcgtaggaaagtgccagactgtacaacttctccgtctgcaccgggtttacctggtaaaaagactgcggagaaatgtgataggcgattgccgtatctgtcagtgcaaaatcatggtcacagtcgcgcagatgaatctgatccgtgatataatccgatccccagacggtccgggtctcctcccccagaatcacattcgtattcttccggttgatgttcacggaaatgctggtcatgccatctagtttacataaagcattcaccagcttctctttctgtggaagtgtctctccattgatgaccagacaaaccatcagctcttttgaggtgaagccatagcggatcagcacatggcgcaccagcccccgccctgtcgtctcatcatacggacggacctcattctcacgcatataggaaagcaccactccaagaatctgctcattctgcgtaacgcccagcttacaatcctccaccgggataatgctgtgcgtgcgcgctgcgtaaaatcccgccaccggcatcccgtccctgtccgcgccgatcgggaactgtgccttattgcggtaacgatacggctgctccatccccacaatctcctccatcacggaatcaatgagttccggcgcaaatcctccgatacggatcagattgccgcgcacctttttctgcttatagcaaagctgctgcctatagtccatcgcctggatctggcagccgccgcagcgcgcatacagcggacactccggctgcacacggtacggcgacggttctaaaatctcctgcaccctggcatagccgtagttcttcttgagcttcgtgatgccggcacggatcgtatccccgatcacagcatctttcacgaaaaaggtcatcccctcgtattttccgatgccctctccgtcaacgcccatatcttcgatctttaactcaatactgtcgtttttcttcatatcctgtgatatacctatgactctcttcctgatctgcggatattgctctccagcaggcggttatatccctgccactccagattgttctccggaacacttgcaaaaatctcccatattgtctccatcttggcgtcaatattgtccgcaaaactgagtgccagtgcttccgcaagtgccggtttcttcggcgaaccgtattccagttctccatgatgagctaaaatgcagtgcttcaactcattggcggttcccttcgggaatcccggaatcgtgcggatccgctctccgaccatctcggcaccgatcatgatatgtcctaaaagctgtccctcatccgtgtaatcgttctccgggaacgtcgagagttcctccagctttccgatatcatggaaaattgccgcagacacgatcaaatcgcggtttaagatcggataagtttccgcaaaataatcacagttcttcgtcacagaaagcgtatgctccagcagtccgcccacaaatccgtgatgcacgctctttgctgcggaatggaacttgaaccgtttttcaaaatccttatcctcgacaaaaaagctctccagaagctttcttaaatacgggtgcttcacggaagcaatcagtccgagaagctctgtatacatcccgtcgatgtcctttttggataccggcagataatctttcggatcatattccccttcctgcaccttgcgcacacgctttacgttgagctggagatttccctgaaaacttgtgatgtctcccatgactgcgatgtagtctaacgaatcaaactcatcgattccaaccgagcccggctcccagatcttggcatccagtgtaccggtcttatcctgcaggatcagattatcataaggctttcccgcctttgtcagcgctgactgctttaccttgcacaaatagatttcgttgattctctcgccctcacgcaggctctcaatatacttcatttctgacctcatttccataatatggcggtgccgcaaggcaccgccttctgttactatcctctactttaacactccgacctgtaccgtgcaggtgatctcctcatacttttcagcgccctgccgctgtacaacgatctccacctcgtcgcccggttccaatgccagaagcttgctctcataactgtccaccgtgtagacagcctctccgcccatctctgtaatgacatcaccgctctgcagccccgccgccagtgccggtgaatccatcttgacatccttgatatatgcgccctttggaatatcgtattccttggcggttgccgctgataccgtcgtcaactccagaccaatatacggaatatcctgattgttggacagtttttcgatcagctgctttaactcggagatcgaaatcgctgtcagtgtcgtctgatcctcctcatttccataatcctgcatgaccagaccaatcacttcgccgttcacgttgatgatgacgccgctgccgctgctgctgccaacaatatccgtcgtaaagacggtataattattgtcaatcgtggaaatcacattattggtagatgtgatgttgcccgtgaggatcgagtagttcgttccaagcggacttcccaccgcaataaccatggttccctgcatcgtcgtcaatgaattcccaagcttcgccaccgagatcgcattcatggtatccgtatccacctgctccttcggtaccgagagcactgcaatccccgtattgccgtcgtagtgcttcatggacgcttccaccgtcacatcattgatgaaagtaacatagacctcctgtgcatctgagatgaccttgcgctccgttaagatcagaagttcctgaccgctgtctgcaatgataatgccggatgcctgtcctctgctctcgtaagaattgttgaaccagtccgtgtcgctcttgacccccgtcacggtcacgacaaagcggtttgcttctcttcccaccgcatacagcttgttctgcacgttctgtacatccgcaatctcaagctcctggggctgctgtagcggcggttcctcggaaggtgcctgtggttcctcggatgcctccgtctcctcggatgtctctgtctcctcagtcagctccgtcaccgcaaccgaatcctgcggaatggtgaccaccggttcctcctcggggtaaaacagtgattcaaacttaggctgaaaatacgcaaaaaccagacttgctatgattccaaaaacgactgccatcagggcgataaaacctgcctgcatcagcaatcgcttcttattgaccggcttttctttgattttttcgttaataaaagaaaactgatcgttatccttttgctgcatgatttcctcttttctgcatgtatttacacacgaatttctgaaaaccgtaccagtaatcattataaaatgaatcacatacgcttgcaataggattctacaattcttttcaggttccgctttccaagactcccggaatcatatataataagaaggacataaccatgtgacaatcaaatcaaaggaactgctatgaacgaaaaagtattacacaccttagaatataacaagattctcgatcaactgaccgaatatgcgttcagcgccgacgccaggtcgcgctgtcagaagctgcgcccgatcaccgaccgcgcgcagatcgaacagctgcagcaacagacatcggatgccttaagccggctgttcaaatacggctccctgtccttttcgggagttacggacatccgtgattcactaaagcgcttagagatcgacggcgccttaagcgccattgaactgctgcgtgtctgctccctcttagaatccgcgaagcgcgcgaaggcttttgccagatcacaggaagacaatgatcagccggacgattccctgaccggtctttttgccggcatcgaacctctcacaccgctgtatgacgagatccggcgctgtattctctccgaggacgagattgccgacgacgccagcagcacgctgcactcgatccggcgctccatgcgcggaatgaacgataagatccgcgcacagatgaactccatgatcaacaacaccacgaccagaagctatctgcaggacaccgtcattaccatgcgcgacgggcgctactgtctcccggtcaaagcggaggcaaagtctctcgttcccggcatgatccatgaccagtcctccaccggctccacacttttcatcgagccgatggctgtcgtcaatctgaacaacgaatacaaagagctgcagctccgtgagcaggaggagatcgaggttatccttgccggcttaagcaatctgaccgcctcctacgccacacagctgctcgccgactatgaacttctgaccgagctggactttatctttgccagagcggctttcgctcagacatacaacggggttgccccgctgttcaatgatgacgggcggattcacatccgcaagggacgccacccactactcgatccgaaaaaggttgttccgatcgacgtacggctcggcgaggatttccgcctgctgatcgtgaccggtccaaacaccggcggtaagacggtatccttaaaaaccgtcggactgctgacgctgatgggacagtccggcctgcatattccggcgtccgagcgctcggaactcggtattttcgacgaagtgttcgccgacatcggggacgagcagagtatcgagcagtcgctcagtacgttctcctcccacatggtcaacatcatccgtatcttagagcaggtcaatgaccgttctctggtacttttcgatgagctctgtgccggaaccgatccgaccgaaggtgctgcgcttgcgatctccattctctcgaagctccacctttacggagcacgcattatggctacgacgcattacagcgagctcaaggtctatgccctctccacaccaggcgtggaaaatgcctgctgtgagttcgacgtggcgacgttaagtccgacctaccgcctcttaatcggtattccgggcaagagcaacgcgtttgccatctctgaaaagctcggtcttccgtcggatctcattaccgacgccaaggggcgcatcagcaagagtgagggcgattttgaagacctgatcgcagatcttgagaagagccgcagcacgatcgagcgggagcagttagagatcaaccagtacaaagccgagatcgagtccttaaaggaaaagctggagcagaagcaggagcgtctggattccagccgcgacaagattctgcgcgaggcaaacgagcaggcatacaatatcttaaaagaagccaaggacgtcgccgatgagacgatccgcaattttaacaaatacggcaaggcgggcgcaccggtcagcgagatggaaaaagaacgtaccaagctgcgcggcaagatggacaaagccgcacagaagatgtccgagcagaaaaaagcttccgtaccgaaccacaacgttccgaagaagctgcgcatcggcgacagcgtcaaagtcatcagcatgaacttaaaaggcaccgttcattcccttccgaatgccaggggcgacctgtatgtgcagatgggaattctgcgctctctggtcaacatcaacgacctgatccttctggaagaggatgccgcaccgggcaccaagaagttccagaagaccagtgccggcaagatcaagatgagcaaatccgcctccgtctccacagagatcaatctcatcggtaagacgaccgacgaggccattccgcttctcgacaaatatctggacgacgcttatctggcacatctgccgtccgtgcgcatcgttcacggaaaaggcacgggcgcactccgcaacgcggtgcaggctcatttaaagcgcttaaaatatgtcaaatcattccacctcggcgagttcggcgagggcgatgccggtgtcacgattgccgagtttaaggattgatatttaaaataaaaatgaggagatgatgatatggcagcaaaacagaaaattctcatcgtagatgatgacaataatatcgcagaactgatttccctgtatctcacaaaggaatgtttcgatacccggatcgtcaatgacggcgaggaagccatgatcgcttttgatcagtacaatccgaatctgatcctgctcgatctgatgcttcccggcatggacggctatcaggtctgccgtgagatccgtgcgaaggcaaatgttccgatcattatgctgtcagccaaaggcgagatttttgacaaggtactcggtctggagctcggcgcggacgattacatgatgaagccattcgactccaaggagcttgtcgcgcgcgtcaaggcagtgctgcgccgctatcagccgtcaaagccggaggaacctgctgcagagttaaaatgcgtcaagtacacggatctggtggtcaatctctcgaactactccgtcatctacatggggcaggccgtcgacatgccgccaaaggaactggagcttttatattttcttgcggcttcgccgaatcaggtttttacaagagagcagcttctggatcacatctggggctatgaatacatcggcgacacacgtaccgtggacgttcacgtgaagcgtctccgcgagaagatcaaggatcatgccaactggagcctcgcaacggtctggggcatcggctacaaattcgaggttcgtgacctatgaaacgtaccctttaccccaaactgctcgccggctatctgatgtacggtctgatcggttttctcatcatcacaacttttacctaccacattacgttcgcctttgtggaaaaaaaggaggctgccagcctctaccgggaatccgccctgatctcctccaactatgccgggaattatttttccaagaccatgacgttggacgagatacagacacagctttccaccttaagcacctatctctccagtgaaatctggattgtggacacgcacggcaacatcattctgaacacggcggcgccgggctgtgatcccacaccggttcccggcttcaacattaccgacttcggaagccgctattatcagaccggcacgttttataaccagtttacgtcagagatgctaagtgttttctcaccgatcaccgtcaactacaaagtgcgcggttatgtggtcatccacaagccgaccagcagtctcgtgtcctacgcgaacggacttgtcgccatcgcttatgagacgcttgggcttttgtttctggcagcctttgtggtactgattctgtttacctatgtggtatacataccgatccgcaagattacgaaagcggcggacgaatatgccgccggaaactttgaaaaaaagattgatgttcactccaatgatgagatcggctatctcgccgcctcgctcaactacatggcaaacgaactgaataccctggaggacgaccagaaaaagttcgtctctaacgtctcgcatgatttccgttcgcctctcacttccatcaaaggttatgtggaagcgatgctcgacggcaccattcccgtagagatgcaggacaaatatttaaacatcatcctctttgagaccgagcgtctgaacaagctgaccaagagccttcttgagttaaacaaattcggctcacacggcacgatgctggacatcacggatttcgacatcaatcacacgatccgcatgacagtccagacgttcgaggggcgctgcatggaaaagcgcattactttcaacctgatcttaaccggcgagaagctttttgtctccgccgatatgagtaagatcgagcaggtactctacaacctgatcgacaatgcaatcaaattcagccacacggactccgcaatcacaatcgagaccacagagaagaacgacaagatcttcgtctccgtcaaggacactggcatcggcatcccgggcgacagcatcaaaaagatctgggagcgcttctacaagacggatctctcccgcggcaaggacaaaaaaggaaccgggcttggtctctccatcgtaaaggagattgtccaggcacacggcgaaaacatcaactgtatcagcacggaaggcgtgggaacggaatttatctttaccctgccgttagcaaagaagctgtcccatcaggcgggcagttgactttggggcgataagttatattacaggaagcacttgatacagatttcggctggaactgcatatgaaacattcgttggagaaaaatgtgtgtatttcttccagccggatgactgcatctgattccgtgtctcttccacgtttggactctcccggagtgtgtccgacaagccacagacaatgagcggactttctagtgtccctaatggcaccgcttcacagacaatataaaaccgcgcgaaccgaaactcgttggcatctgctattgaaaatagggcagatgccaattcagacatcggcttcgcgcggttatgttttgttcgacataaagatggcataaatgccatctgttgtctggtgccgcaagggacacacaaaagtcctaaaattgtctgttggcttgcgaacatagtccgtagagtgctccaaacttggaaagacacggatcatcgcagatgcagtcaccggctggttagaaatgc

SEQ ID NO: 11625 - DNA, 7010 bp, Unknown
  gut microbiota DNA sequence
gtcgcaactattacatcttcgagatagcgaaaaatactaaaagaaccaacacccttcactacgcaataaagaggatgaaataatagctttgatgtgactcggttttgttggtgcatttatcaacatcaagagttttgtgcatgagacagatatgtcgaagaagcaaaggtaaagtagttgaagttgtggacacacaataatgaaatatatattccatgcgaacgaaatcttctgtaaaatcccccgaaaatctgttgaaaattcctaaaaaatgttattattttgatgttttttcttgaaaaacgccacttacattttgtgagataaagcgttagaatagctatgctataaggatactttatacatatttaataatttattaacagaaagggagtatagatatggaatcgtattcatttttactgttcttggcgattattatgatctcaaccaagattctgggtttatttacccgcaagattcatatgccggcggttgtcggtgcattagttgcaggtgtgatcttaggaccgtcctgtctgaatttgattacattgaccggagataccggcgtctttcttgagcagatggcagagctcggtgttatcctcctgatgtttaacgcaggactggagacggatctgtccgaacttaagaaaaatggtgtggcatctttcgtaacagcattgatcggtgtgattgttccgttgattggtggattcctggggtatgcatttttcttccacacagacttcagcgattacgatgaggtgttaaaggcagtgttcgtcggtgttgtactgacagcaacatctgtaagtatcacagttgagacgctgcgtgagatgggcaagctgaaaggaaaagtcggaacgacaatccttggcgcagctgttatcgatgatatcatcggtattatcgtactcacaatcgtaaccagcttaaaggataccagcgtaagcccgatcacagttgtgttaaagattgtactgtatttcgtatttattgcagtattgatcttcgtgcttacaaagttaaaggtatttgtggaagagcaggatgagaagagaagaaccgctatcatctgtgtagcgctctgcttcattctttcctatatctcagaggaatacttcggtattgcagatattaccggtgcttacttcgcaggactgatgctctgcacgatgaaagttggaccgtatgttgcaagaagatgcgagatcccgtcttacttgattttctcaccggtattctttgccagtgtaggtcttaaggtaacactcggcggaatggatgccagcatctggatcttcgcaatcattctgcttgttatcgccatcttaagcaaggttgtcggatgcggactgggtgcaaagatatgcggatgtaccggaaaggaagcgttccaggtcggtatcggtatgatttcccgaggtgaggttgcactgattgtggcgcagaagggatatgcaagcggtatgttagatgatgtcctgtttgctccgatcgttctcgttgttattgtaacgacgctgatcaccccgattctcttaaagcttgtcatgaaagacaatgattctgagaaagctgctgcataggggcatagaacagatattataaaatcaggatttaagaagccgtcacttttgtggcggtttcttttttcactctataggctatgtgagtttattgcttcttttgcaaaaaacagttaaaatagacacagaaaaaagaaatgaggagattgcaatgttacgggatctgcaggaaatatcagatggaaaaatatatggctgcaatgatatggttcgggcggcgtgcggagactgcgcgggatgccatgcctgctgtgagaaaatggggacatccattgtgcttgatccctgtgatatatggcgtctgacgaccgtgaccgggaaaaattttgagcagctgcttgccgatacgatagagctgcaggtagtggacggcgtgattcttccgaacctgaggatggacggagaaaaagagcagtgtgtgttcttgaatgaacagggaagatgcaggatccacgcaatgcgtcccgggttgtgtcgtgtatttccacttggcagaatctatgaggaagacagaatccgctactttctgcagatggatgcctgtcagaagcccgggcgcagcaaagtgaaggttgggaaatggctcgatactccacagatggaacgatacgaacggtttctgctggactggcatgccatacggaaacagttggagaagcagatgaaagacggaattggtgaacaggaggcaaagacgatcaatatgtttttgttaaatctgttttttataaaaccatatgaaccggagcgggacttctatgaacagtatgaggagagaagagcgatggccggtcaggcagggttaaaataaactgcggataatgtatggcaggagatggaagtatgataatcgacagagaattggatcagaaagggaaagatgagaatattggaaccagccgcgttaatctcacgcagcgttatgtggaatccgtcaaatacaacggtctgggggattttaccgaagaattgcgtgaggaagcagactaccggaagcgcattgaaaagattttctcggaaattcatatgaccggggagacgtatgcggatctacagccagaggcattgatggaagcctactggcagggagaggaaatgatatcgcgttactactgggcaaagaggcgggacacggacgacattatctgggtgcgtgtggacgtgaggattgtaccgcagctggatacgggagatttgtttgccttttacaataactgggatgtcacgcatgagaaaaaccgtgaccgtatgatgcagctgatcattgagttcgactatgattatgtggaatacatctgtctgcagaatggtcatttcgagattatggcgcaggaaaaaagttccatgtgtccgagcgccagaggaacagactacgatgcggatatccgtgattatcttacaagagtcgcagtgacggatcagctggaagcacacatccgggcaatgcagacagaggaaatccgtcgtaaccttgaggcagagccactttacatacaggaaattgatgtgagagagtctgatggctcagtgcggcgtaaaatgatccgttatacctatatggataagcagatggggacggtattcaaaagctgtgtggacatcgaagacatcgtaacggaggagaagaagaagcaggaacgtctggagcgggcaattgaagaaacggagcgggcgaattgcgccaagagtgaattcctggcccatatgagtcatgacatccggacacctatgaatgcgattatcggcatgacatccgttgcaaggcaggaatgtcaggatgagacgatctgcggatatctggataagattaaatcctcaagtgagtttctgctcggactgatcaatgatatgctggatatttcacgcatagagagcggaaatctgaacctgaagtcggagcagatgagcagaaagacgtttggaacggcaatcagtaccacgatcggcccgctgatggagcagaaaaacattacgttccagtgtgatctgcagcatatggaagaaatgatatacactgatgcggtgcggttcaagcagattttcttcaatctgctgtccaatgcagcaaaatacacgccagagggcggaaatgtgtggcttctgaccgaaaggctacgcacggaaggaaacgttgaatgggtgcgttttacggtgcgggatagtggaatcggtatgagtgaggaattcctggagcatgcgtttgaaccgttttcgcaggaggggaaccgcacgcttgccctgcaatggcagggaaccggtcttggacttgcgatcgtaaagaaactggtggtcatgatgcacggcacgattgaaattcacagtaaattaggagagggtaccggggtaatcctcgatctgccgcttacgatctcgggcgtcgatgctccggaaaaaatgccacaggcagtcatggcaaaacagaacctggaaggcagacgggtgcttctggcagaggacaatgagatcaatacttttgtggccagacgtattctggaatcaaagggaattattgtggaacatgcggaaaatggaaaaagagcggtggaaatggtggagcagaatccggagggatattttgacgcaatcgtgatggatatccggatgccggtgatgagcggactggaggcagccagacagatccgggcaatgagccggacggatgcacagactgtgcccataattgccatgacggccaatgcctatgaggaagatgtcagccagtcgttggcggccgggatgaacgctcatcttgcaaagccgatcgaaccgcaggtgattctggatacacttgcggggtatataggcagtaagaactagaaagttgcactgtaaatggaaaaagaaaggcatgcatttcgtcggaatgtcgatgtaaaagttgtgatactgttgctataataagttccgatgagaggagacggcaggatgaagcatttgagacaatttttgattattttacttttttcatttcttggagaaggattaaaggcattgcttccacttccggtaccggcaagcatctatggactggtattgttgtttgcggcactggagcttggaataataaaactctctgcagtggaagatgcagggaaatttttgatagagatcatgccggtgatgtttattccggcgggggcggggctggtcgagtcctggagcgctttaaagccgatctgtgtgcaggtggttgtgatcatgtttgtatccacgattgtggttatggtgatttcgggaagagtgacacagtttgtaattcgcagaaacagaaaggcataaaacaatgaaggaatttttaaatcagtctgtatttttcggtgtggcaatcagcgtattgacctatgaactgggagtatttttgaaaaagaagctgaagtggccgatatgtaatccacttttaatttcgatcgtcgcggtgatcatttttctggtcgcgtttgatattccttacgagagttataacgcgggagcaaaatatctgagctatcttctgacgccggcaacggtctgtctggcgatcccgctctacgagcaggtggagcttttgaaaaaacattccaaggcaatcgtgcttggattgatctccggtgtgattacgagtcttgtgtgtgtgcttgtactggcactgttgtttcattttgatcatgcgcagtatgtgacgcttctgccgaaatccatcacgaccgcgatcggcatgggaatatcggaggagcttggcggttatgtgaccatcacggttgctgtgattattattaccggagtgattggcaatatgctggcggagacggtctgccgtatatttaagattgaggagccggtggcaaagggaattgcaatcggagcgtcatcccatgcggttggtacagtcaaggcgatggagataggagagatcgaaggtgcgatgagcagtcttgccattgcggttgcgggacttctgacagttgtgctggcaccggtatttgcaggaattatgtagcacgcggtctacctgccctatatgcagatcattatgcaccaggatcttatatctgacataagataaagagagaaaacaaagaagtggaatctttatgtattgtcagaatagaatggtacacaccgtgcaggagggggattcactgtatcgccttgcgagacagtaccacacaaccgtcacggaactgatactcggaaatccgggggtaaacccctacaacctgcaggtaggaatgaagctctatgtctgcccgggggaaagctacgtaccgccccagggaggcagcgcaaacaccgggaacacgggaaacagcggaagcaccgggaacaccggtaatgctggaaatggtggaaataccagtaatgccggcgtgggcggaaacatcggtatcggagtggtgattccgggtggacagcgcccgggcggaaatcagacagcgggagagaggcagaattcagtgaatcagctgtttgagacaatgcgtctggcgtggctggaactgatctactggacacggatgtatatgatgagtgtggattccggggcagatgcaaaagagcagtatgcagtggagggacgcctgttggaaactgcagatgcaatcacggatgtttttgcagagcggctgccggtagctgtcacaagacagctgcgcaatctgctcgtggaacatgtggagatgacggggcagatcatccgcacgttaaaatccggggataaggagaattatgaacagcagatccgggagtggtatgctaatgcgaatcagatcgcaacacttctcgctgaccagaatccctactttgcaggaaaagagacgaggaatcttctgttgaattatctggatatgacgcgcgagattatagaacatcagatgaacggtgagtatgaccagagcattgataccttccgggatttaagtgatctggtgctggaactcgctgattatctcgcaagaggacttctggcgcgctgatgtgctttgcaaacgggcggtgcctcttgtgcatcgcctttctggtactatttgcggcgctactgatcctggcagtagtgcacagagtgcgggcgaagaaaaaagttcttgcattgactcccggggaacgggtgcggctgctcaatgaactggcggaaccctttggatttgcttatctgccgtcggaagatatttttacctcaaggctggatgcctggcagcgtgacaagggatatgaggcgaaatatgataccatggcggtgggtgccgggatggtgattgacgcatttcccgtgtactttaattatgagggaagaacctggctggtggaattctggaagggacagtacgggatcaacaccggcggagaggtcggaatttaccatgcgaagggcgtgattccgccgcacgcctatcacacggcgcattttgaagcggtatcggatgcagaactcccgag

SEQ ID NO: 11626 - DNA, 3678 bp, Unknown
  gut microbiota DNA sequence
cccctaactcccgggctgtaagctttgcaaaaggtgctacttccaatattgtctatcttaccaatctggagaaagatactgcttatcggaatccgcatatgtttgacattatgtgcggcgtacaccataccttgtccgaaaacaactattccctaacgcttgtcaacacttctgaagagcactatcccggagaaaaagtcagcgaagttatcaaaagccgttcctccgatggtcttatcatccacggctctgccattaataaagaaattgcaaatcttattctggatgcaggctttccacacattatcattgggcatccgagttttgaaagctgcttatgctgggtagataccaaccacgcccttgccggtgaatatgccgctgcccacatgatagcctgtggttatacagatgttgcctttatcggagagcgcaaaaccgattatatttctgcccagcgtcaaaaaggatttatggcaggcatgttggacagaggctttcacattccggctacccgtatcggaaataccgattccagttgccagaacacttatgctgttacttctgacatgctgacacagcctgtaccgcctcgcgctattgtatgtgaaaataacaccctcgcattaggtgtcgtccaggcagtcaaagaccggcagctttccatcccggatgacattgccatactcacctttgacgtctacccatattccagcatcatcgacccacagcttaccattgtagatatcaatgtctatgataccggtgtgcaggcaggctccatgatgatccgtaagcttcagaacccggatcttctcatccaaagctatacaacgcttcctgttatcatccagggagaaagcaccagaccactgacataaaaaaagtgccctcgacactctcaactctcctgacccctcattcatgaataagatcaacatcatgctctgtttcgtaagaaagaactcttgttctaaacctggtgagggttctgtcactaattggctgctcttcaaaactggttgtgtgcagcgcatactgatagcggatatcaaatgccctagcttcaacgatctcatcgtcagtaacattaagagcttctttaagaatcagtgccccaacaatcacattgaccggagtattaggtctggatgctttttcactgtaaagaacagaaaaaatattttcatcaatagcaggaaaaactttgtctgtctgtaagatgaaaagtgctgtctaaaacagtaagctgttgattatcatttttaacaaaagacatatggatgacctcataaaatgctgcctgcattttaccaaagaatccaatgtttttacatatcgtgttaagctttcaaggtacaaatttatatcaaaggttataaaccttttgacaccctaatcctataagttaaaaaaagccccgcgtgcggaactctttgcaccgggacttctcttatacatgatactttgtctgctttatgacatgctgttgacagtcttatacttatagagcatctccgcatgattctgctcctccacctgaatgtctgcgagcagtttgcggacgcccgggtctgcaaacacaaacacgtcggtattatactcggaagacaccagcttctcggtaccgatacagtcagtcgcaaggaagcagtcgtttttcttgtcctcggactccgcgagggagtaggtggcggtcgggttataattctttccgtcgctgtcgttgcagttgcagttcggcacggtaccgtttaacacctgtcccagcgagtcaaagtgctgctgctccttcttgtgaagatcggtgaacaggttcacgagaaccggatccttcgcctctttgctgtatcgggaatacttctccacgcaggttttctcctgggtctggagatctttgatcgccgctgtctctttttcacttaataccatcgttgttacctcttttcttatttttttctatgctggtattattgggaaaaagtttcgcaattatacacaatatttattttccggttgacaaatgcgcacggccgcgtctataatggcgttaatcggagcagaacacaggctttgacaggaagaagtaagaataagtggaacgaacagaaagcaaccggctgatgagaggtgcacggaaagcttattacgaatacatccccgagcttcacacccaatttgcatgaccgttctttttgcggtgatgtgatagtaggctgtgacgtagcggcgcacgttacaagcgcctgagtgttgtcggacactcgcagaggcagaccgtgtgaatggtctgtgaacaaaggtggtaacacgagtttataccctcgtcctttttgaaggacgggggttttttgtgcggcagcaacggtccggcactgttcggctgttgtaccgccgccagaaaaagacaaccacaactacaaccacaaagaaaggaactgacatcatgacattatacgatgaattagttgcccgcggcttaatcgcgcaggtaacagacgaagaagagatcaaagaactgatcaacaacggaaaagcaaccttctacattgggtttgacccgactgcagacagtctgcatgtcggacatttcatggcgctctgcttaatgaagcgcctccagcaggcaggcaacaagccgatcgccttaatcggcggcggtactgccatgatcggtgatccgtccggccgtaccgacatgcgccagatgatgacaccggagaccatccagcacaactgcgactgcttcaagaagcagatgagccgctttattgatttttccgacggcaaagcgctcatggtcaacaacgcggactggctgatggacttaaattacattgatgttctgcgcgaggtcggcgctcatttctccgtaaaccgcatgctgaccgctgagtgctacaagcagcgtatggaaaagggcttaagcttccttgagttcaactacatgattatgcagagctacgatttctacaccttattccagaaatacggctgcaacatggagttcggcggcgacgaccagtggagcaacatgctcggcggtacggagctgatccgccgtaagctcggaaaagacgcttacgccatgacgatcaacctgctccttaattccgaaggcaaaaagatgggtaagacgcagtccggcgctgtatggcttgatccggagaagacctccccattcgatttcttccagtactggagaaacgtggctgactccgatgtcttaaagtgcatccgtatgctgaccttccttccgctcgaggagatcgacgcaatggagagctgggaaggcgcacagttaaaccaggcaaaagaaatcttagctttcgagctgaccaagctggtacacggcgaggaggaagctgccaaggcacgcgaggcatcccatgcactctttgcaggcggcagagattccgcacacatgccgaccgtagagctttcggctgctgattttgcagagggcgatctcgacatccttgcacttctcgtgaagacagagcttgctccatcccgctccgatgcaagacgtgccgttgagcagggcggcgtgagcgttgcagatgcaaaggtcaccgatatcaagacctcctacagtgctgattccttcggtgccgacggtcttgtcgtaaaacgcggcaagaagaaattcgtcaaaatcattgtaaaataagatag

SEQ ID NO: 11627 - DNA, 10205 bp, Unknown
  gut microbiota DNA sequence
gaacgacatagacgaactgaaaaaggctaaccctaacatgggtgtatccgtaaaagaaagtttctttatggacgagatagccgtagcagagggcagcttaagtaaaaaagcagagttccttacaaagtattgcaatattaagcagaacagctctattgcatggctggaatatcagacagtagagaacgccggagtagaaaagaccttagaggactttagggactgctacgcagtgggcggtattgacttaagccagacaacggacttaacggcagcaagtgtggttattcagaaagacggcacgctgtatgcgtttacgcagttctttatgccacggggcaggctggaatacttacaggctacggacggtgtgccgtatgacatatttgttaaaaaggggctgataaccttaagcggcgagaattacgtagactaccacgacgtttacggctggtttactatgctgctggaagattacggcatacgacctttgaaaatcggctacgacagatacagcgcccagtaccttattaccgatatggcaaattatggctttcacatggacgacgtttaccaaggcgaaaaccttacaccagttatacgggagtttgagggcatcataaaagacggcgattttaagattgccgacaacaatttactaaagacacatttcttaaatgttgcgcttaagcacaacatggaaacaagaaaattcagacctataaaaatcgagcagcgggcgcatatcgacggctttgtatctgtcatagatgcaatgaccgtgcggcagaaatactgggaagagtgcggcgagctgcttaaaaatgccgcatagaaaggagtgtaaacggcatgaaatttttagactatcttttccatggcaaagaattaaaagccataggtaattatttcaaaatgctgaacggatacagcccgacgtttaccagctttagcggcggcgtgtatgaaatggatttaaccagaacggctataaataattttgctacacattgcagcaaactaaagccggagatagagggcagcgcccttaaatcgctggaaaagacattgcagcataaacccaactacttcatggatacaacaaaatttataaagcgtctggcaacgtatgtagcggtggaacacaccgcttttattatacctatcgaggacgaatacgggcgcttatgtggctggtatccgctgcgggctgaacgctgcgaggtggtagagagtgaggggcaattatatttacggtatctgtttgcaaatggcagctatggcgctattgagtttgagcgtgtaggcattatgacagactttgaatataaagacgaccttttcggagaggacaacagcacacttgcaccaactatgcagctgatacatacgcagaatgagggaattataaacgctgtaaaaaattctgcaaatatccgttttctggcaaaggtggcaaatatgctgaaaccagaggatataaagaaagagcggaaacgctttacagaggataacttaagcgctgacaacgatagcggcatgattatttatgataacaagtttagtgaactgaaacaggtagaaagcaaaccgtatacaccaaacgcattgcagatgcagcacatacaggaaaatgtatgtacgcattttggtacaaatatggatattctgcaaaataaattcgatgaaaatacgtggaacgcttactacgaggggaaaatagaaccgtttgcaatacagctatcgcttgttatgacaaatatgagctttacagagagagaaagagcctgcggcaatgctattttcttttctgcaaaccgcctacaatacgccagcaacgccacaaagttaagcgtaagcacacagctttttgaccgtgcgttactgaacagaaacggcgtaatggatatatggaacatggcacacgttgaggacggggaaaagtattatatccgaaaggaatatacagaggtaagcgagctgcacaaaggaagtgagcagccagttatcatacagcaagtacaacagcagacagaaccagcagcaggagaagagccgcagaacggacaggaagagaaagagggtgtaaataatgccagttaagaaagagcgggaatatagaacgctggtagcgcctctggtagcgcagagttccggcgaaaagcgtatacagtcggagtgctacgtagagggctacgccactacatttaatgcgccataccttttatatgagtttgaggacggcacaaagatttacgaaagaatagatgcacacgcattagacagcgcagacatgagcgacgttattatgcagtacgaccatgagggcagagtatttgccagacagtcaaataatacgctgattttagagccggacgtaaaggggctttttgtggcagcagacttaagccggacagacttagcccgtgggctgtatcaggacataagcgcaggaatgattactaaaatgtcatgggcgtttacagtggcagaggaaagttacgacagagaaacacatacaagaacaattttgaaaatcaaaaaggtttatgatgtatcagccgtgagtattccggcaaataacgatactgaaataagcgcccgtgcttttgcgagtaggagttacgagcgggagcggcaggagttgcttaagaggcgggcagcaatactaaagattaaggcgagcttataaaaaccaaaacaaaaaggagaacacagactatgagattaaaggaaattgaggcaagattagccgaaatcaaagaagagcttaacaccagagcagcggagcttacggacgaggaaattacaaaactggaaacagaggtaacagacttgcaggaagagcgcactactttactgacagcggcagagaaacgtaaaaagctgcttgaaagaattgcagcaggagagccgacaggtggagcgggagcagataccacgctgcttagaaatttcaagggagcaggcggcgcaggagcaggagaaccagaggacaaatacgacactacggcatacagaaaagcgtttatgaattatgtatgcagaggcgttgctattccggcagagtacagagcagctgaaaccaccaccacagcagacagcggcgctgtaattccgacaactattatgaatgaaattatccagaaactggaaagctacggcagcatttatgcaaaggtgcgtaagattaacgtacagggcggcgtttccattccgattgcagacttaaagcctactgcacactggattacagaggcaaagagcagcgacgaccagaaagcatctgctaaaaattccgtaactttcaattattacggtttggagtgcaaaatttcccagagcattttagcgaatgtagtaacgctgaaaatgtttactgatttgtttgtacctatggcaacagaggcaatggtaaaggctattgaaattgccattttcaacggtacaggcgaggggcagccgctgggcgttctgaaagacaacagggtaacagctgtaattactctgacaccggaagagtacgcaagctggaacggctggcataaggtaaaaggcaaaatgaaaaaggcgtacagaaacggcagctttgttatgaaccagtccacttttgatactggcattgacggtatggaagataagaacgggcagcctattggacgcacaaactacggcgtaaacggagaggaaacataccgtttcatgggtaagaatgtggaaactgtagaggacgacgttttaccgagctgggacgacgcaaacgagggcgacgtaatcgcagtatttatgaatttctctgattacgttatcaataccaacatggaaatgcaggtagtgaagtggacagaccacgacaacaacaagattaagaataagtgcttaatggtagtggacggcaaagtagctgacgctgcgggcattatcttagttaaaaagggcgtaacagcagtgtaagaaagcgaggtagagcatgaaaggatacttagacgcaaaagagctggaaagctataagaaagaggatttgcaggaactggcaaagcagctgggcgtagatgcagagggaacaaagaaagaaattgctgcacgctgcgcagccgtcgaggtagatataccagacaacagcgagcttacggaagaggacaaaaaagtagcagccgaggcagcggcagaggcagcagccaaagccgaagaggaaaaggcagcggcagaggcagcagctaaagtcgaagaggaaaaggcagcggcagaggcagcagccaaagccgaagaggaaaaggcggcggcagaggcagcagctaaagacgaagaggaaaagaaagcagcagggctggtaaaagtaaaagcacagcgtcgttttcttgacaaggaattaaaccagattaaggatactggggacgtttacaccgtaagcagagaacgtgcagcagttctgaaagaggcaggcgtagcagaagtagcagagtaagaaagagggtgcgggctatggcagcatataccactacattaaccgagaagatgcgggcggcgctgcgtatcagcagcaccagtgagaaaatcacagaagaaataaacgactgtatagccgcctgcaaaatggatttgcaggacgtaggcgtaaagaaactggacgaaacagacgcactgattattagggcaattaccttatactgcaaggcagagtttggctattccgataaatcagagcagttttggaagtcttacgagtgcttgaaaactcatttaagcctatccagcgaatacacaggcggcgaaacgccggacaatatagacgacgaggtaaacgaggacgatattaagaacttattcggataggagaaacagacagaatggcgattaaaagagtaacttataatacgctgtcttatctggtagcggaaattaaagaccgctacgcagagaaaagcgccataggagcgctggggggcttgataaggtagcggtagaaaatctggcagacgatttgaaaaaccttataaacggcaaggcaaatgcagccaccacgcttgcgggttatggcatcacagacggaatgacagcgacggagatagcaagcgctatttccacggcgattgccggaacagaccatttaagccgtgtaatggtagacagcacggcagatattgacgtagcggcagacggcgcagaaaagaaaatctacatggtaaagaataccgacggagaggcgggaaatctttacagtgagtacatggtaattgacggaaagctggaaaaggtaggcgactggaaagtggacttaagcagctatgcaaagactgcggaagtaacggcagccattgcaaatgcgctgacagcatacgccaagaccgcagatgttactaaggcaatcaatgcagcagtagcgggacttatccaactggacgacttaagcgtagcgtctacgggggcaggcaatgtagtaacagggcttgcgtatgacaacaagacaggaaaatttacagtaaccaaaggacttactgcacttacagaggcagactttacagagattacgcagcaggaagtaaaagccatgtttgcgtaagtgaggtgctggtatgaggtggtttagccttgccagcttaaaggcgctggtatcagagataacagccagagaaaacagcaatatgcaggctgtaaatgatacgttttcagaagtctacgacaatatggaaacgctggacgggcgcatagatgctttagagcataaaaccgacgctgcatatctgggtaactgttattgcggtagcgtctatttgggctatgtgtccgaaacggacacctaaaggagtggtaaaaatggactggatagacgagataacgctaataagcgaggtaagcggagaaaacagggtaaataaaaacggctttgcagtaaagccggaagaaagcgcccgcactgtattctgtaataaaaaatcagtagggtacagtgaatattttaagagccagcagacaggaaagctggtagaggcaaagtacgaggtacacaaggcagattatggcggcgaggacgtagtagaagtaaacgggcggcgctattttgtacttaagacctacgatacagggacagacaccatagagcttacgcttacagatttacgccacagaaacgaggtgtaagcatgggagaatttaatacagtcgggctggaagatattatagacgctttcggcaggagagaaaccgccacggttgaggcagtaccgaaaatgcttaaggctggcgcagatgtgctgatagaggcacagaaagcagaggcacaggcaatgggactgaacgaaacgggcggttttatcaattccataaaagctacggacgtaaagggcgacgatacggagaaatacgtagagatatacccgcagggacgggcagggcatggaaacgacaggaaaggcgataaaagcaaagtgcgctatgcaacaatcggctttgtggcagaatacgggacaagcagccagcaggcacgcccgtatatgacaacggcaaacgccaaggcgcacgaaaaggtagtagaggcgcagcacagtatatgggagagtgaaacgggcaaatgagcatacaggagattttagaaagcgcagggctgccagcccagaggggcgtatacactggacgggataagccggacgcatactatacgtttctgcggctgctgggtacgtctgcggtaaatgcagacgacgaagagaaagagcgcagggaaatgtatagagttacgcttttccataagggcgattttgaggcgcagcttgataagacaaaagaggtattgatagcagcaggcgtttatatcaacagcatagatgcagaaagctacgaaacagaaacggggtactggttagtgcctatcacagtcgagattttgaaagaggagtgattaaacaatgacactgggactgaaagatttatattatgccgtatgcacagaggcagacggcgtagaaagctacggagcgcctaagaaaatggcagaggcaatgacagccgatttatccgtaaagaccgcagacggcagtttatatgcagacgatacgttaagcgagagcgtcacggagtttgcaagcggcacgcttaagctgggaattaaagaccttacgccggaagtgctggcagagctgctggggcaggaagtggacgagaacagcgtagtatgggctggaaaagaggacgagccgccgtatgttgcggtagggttcagagcaaagaaaacgggcggcaaataccgctatgtatggctgcttaaagcaaaattcaaagtaccgtctgaaaagtatgaaactaagggcgagagcatcaagtttaatacgccggacattgaggcagattttacagccagaaagaaagataaccgctggaaagcagactttgtgggaacagaggacagtaaggcggctaagacatggtttacagccgtacccgaaccggcagcggcaatgcaggaagtataagagaaaggagagaggcgcagcgcaggctgcgccttaatttatagcatgagcgcaattaaagacggacgtatgcccgtagaactgaacggcaagacctattatttactgttttcccttaatgcactggacgagatgcaggacagatttgggggatatgacaagctggacaaggcttttgaccagagtaacccgaccatgattaaagatttacgctggttgcttaccctcattatcaacgagggcatggaagagggagaaacaccgcttacagagcagcaggtaggtaagttaattcatatcggcaatctgccgcagattaaagacgctattttctctgcttttgtatattccacaaacggcggggaagagaaagaggcagcagacggagaggcagacacaacagaagagggaaacagagtagccgtgcaggacgaatagacaccgcacggctgctttatatagcaatggttatgctgcattacacggaaagcgaggcgtggaaaaagacaccttaccagattattaagctattcggctatcacaaggagtataacccgcacattttcgggcaggaaagcagcagcgcaccagcacaggcagcagagggcatggacgacatagacatagcgttagggggcttgtaaatcatggctgataaaacagacaatattaaaaccaaacttagttttgacggcgaggcacagtataaagcagcctgcaaagagattaacagcacccttaagctgcttaactctgaaatgaaacttgtaacggcagagtataagagcaatgcgagcagtgcagaggcgctgaaagccaagcaggaagtattacgcaaaacttacgacgaacaaaagaaaaaggtagaggaaacagaaaaagcccttgcaaagtgcaaagaggctacaggagagaacagcgaggcaagtaaaaagctggaaacgcagcttaattaccagaaaacagcccttgcgaatacagaaacagagttaggaaaggccactacagagctggacaaggcagaaaaagccgcagacggaatgggaaacgaggtagaggacagcggcaaacaggcgaaagaggcaacaagcaaattcagtggctttacagaggttgtaaaaaaggttgcaacagcaacggcagcagcggtggcggcaatcggcacggcagccgtagcagcaggcaaggcactttatgatatggcgagtgatacggcatctgcgggcgaccagatagacaaggaaagccagaaaatgcagataagcgcaagcctataccagcagttaagctatgcctgcgagagaagcggcagcagcgtaagcgacttaacaaaaggcgttaagaacattactacagagctggggaaaacagcagagggagcgaaaggcgcaggggcaagttttgaggctatcggcgtatcgctgaaaaatacagacggaagtataaaaagcacggagcaggtgcttttagagagcatagacgcactggcgggcatggaagatgaaacacagcgaaatgcagccgcacaggatatttttggaaagagcgcagccgagcttttaccgttgcttaattctggcgcagacggaattaagcagcttatggacgaaacagaagaatacggcatgataatgtcagacgaggcagtagcagcaagcgcagcgtttgaggacagtttaagccgcctgcaatggacatttagcggcgtaaagaacagtatcactggcgaaatgctgccgtctatcacaatgattatggacgggctaagcgaccttatggcggggcaggacgacgcaggcgagaagataaagcagggcgttactggaataatcagcaatatttcacaaatgataccgcagatattggaagtgataacgaatatagcaggggcagtgctggaaagcgcaccctctattatgcaggcattggcgcagggaattataacggcgctgcctacgttattgccgaccataacaaacgtagtaaccagcattgcaactatgctgatacagttactgccgcagattttagaggcgggtatgcagatactcataagccttgcgcaaggtatcgcacaggcgctgcctacattgctgccgacaatcgtaacggtggttacgaacattgtaaccatgctgatagaaaatataccgctgctgattacagcagccttacagcttattacagggctggcgcagggactggtagcagcgttgcccgtactgattgaggcgctgccggaaatcataacggctatcataaatgcgttgattgagggtataccgcttattatcgaaagtgcgggcgatattatagttgcgctgattgacggcatcatagatgcaataccgcttttaatcgcagctatgccgcagattgttgcagccattgtaacaggactgattacggggctgcctaagattttgacggcagcaggcaagctggtaacaacaatcataaacaagataaaagagctgcctactctgataccgcaggcaatcgctgcgggcgttgagaaaatagcagagtggggcgcaaatatgcaggaaaaaggcgacacggttataacagattttgtaacgaaagttatagatattgttaaggagctgccgcagaaaatctggaacagtatagtaagcgcagttaccagagtggctacatggggcgcaaatatgcagaccaaagccaaagaagtaatgaacacaatgcttacgaacattgtaacgattgtgaaagaaa

SEQ ID NO: 11628 - DNA, 3003 bp, Unknown
  gut microbiota DNA sequence
ccactcacacgcatgctgacgacaccgttcatactcatgccagcggctccgttcatactcatgcccacagctccactcacacacatccgcatcaccacgagaataccaaggcggtcttaaaccgcatgaaccgtgcgatcggacatatggaggccgtccgcacgatgatcgaagacgacagggactgcagcgaagtgcttgttcagattgcggcggtgcgttccgccatcaacaatatcggtaaaatcattttagaggatcacatcagccactgcctggtcgacgccgttgaaaccggggatgagcaggtcatccgggacttaaatgacgcgatcgacaagtttgtaaagtgatacatttttcatttggacatagtttgttcattttttattcatattttatagaaatccaggaaatcttaaaccttttttattcatcttcccgattgatttttgatgcaattagcgctatattctcttagtatcgaaatttagctttacttcctttttacaggagttttacactggagaatcggcagcccggctgcccacatatattgcacgcgtgagcgtatcggtgtttcacaccgcctacagtcattttgggagggttctatgaaaaaattatttaacattctaaaagaaaagcttgcaccgctttccagtaagcttcaatctctgaagagcattcttccgcagaagaagccacacagtgaaaaatactataaacggattgctttccttaataagtattctcttattttccactttttattagcctgtctgttaattcttgccgtggagacgatttccagacgggactttgtgagcgctataactttcatcagcaatcacacgcttgcattcttatataatgcgctgattatctttgcatctctatcccttgtctatctgacaaaatatcgtacacagatgcgtatcttaatcagcggtttgtggattttccttggaaccgtcaacggtctgattctgtcaaaccgtgtcacaccgttcagctacacagacttaaaatgtctgccggatctgttcgcaatgcagaacaccaactattttacagcggaggaagcaaccatggtcgtgtccgttgtggttgccttctttgtcattcttggtcttctctttgcaaagggaccccgttatcagggaaaacgccataccgtgcttggtccggtctccattgccgctctgattttaatcggtcttccgattaccacacaggcagcacagagttccaacattcttgcttcctattttgcaaatattgcgcagggctactctgattacggttttgtgtacggtttttccaccagtgttgtcggaagaggcatggataaaccggaggattattccgaggaaaccgttgatgcgatcaacacccttgttgattccgccagcagcccgaccactgtttccacaggcagcgagccaaatgttatctgtgttttactggagtccttctgtgatccttacgaagtaaactttttaaatatgtccgaagatccgattccgaatttccacaaccttgaggcaaactattccaccggttaccttaccgtaccggtcgtgggtgcaggtaccgccaatacggagttcgaggttctgaccggaatgagcatgcagtatttcggtaccggtgagtatccttacaagacgatcttaaaacagacggactgcgaaagtattgccgatgatctctcccagatcggttatggtacgcatgtcgtacataacaataccgctactttctacagccgcaacaatgctttttccatgatgggattcgatacctttaccagcaaggagtgcatgaacatctcccagtacacgccgaatggcaactggccgactgatgatgtgctggtacaggagactgtaaaagctatgaacgcgacggaaaaccagtccgatttcgtatataccattaccgtggaaggtcacggcgattacccgaccgagaagcttctggaaaatccggatattcttgtttccggcgccgcagatgaggcttccaacaaccagtgggaatattatgtcaacatgattcatgaagtggatgacttcatcggagatctgatcacagcggttgaccgccgcggagaggacaccatcatcgtgttcttcggcgatcatcttccaacgatgggactcaccgatgcggatatgaagtccggtgatattttcaagaccaagtacatcacctggaacaacatggggcttgcaaaaaaagatgctgatctgaccgcttaccagcttctcgcgcacattaccgatcaggcaggcattcatgagggaaccatgttccgttatcatcagacacagaccgcttccgagacctatctttccggtctggaggatctgcagtacgatctgctgtacggcaaacgctacacctacggcggagaggaccgctaccctgcatccgaccttgtgatggatgtggaggacgttaccgtctcctctgtccgcaagaatacaagcaacaataccttgacggtgtacggtgcgaactttaccaagaatacgaagatttttgtaaacggcaataaggttcctaccacgttcctgacatcgaacctgattacgaccagtctggacaatgtgcagaacggcgataccattaccgtgaatatcctcggttccaagagcctactgctccgtgccggtaccggcgaggttgtctacgaggatccggatattgttccggagacggaagatccgaccgagattccggagacgtccgctaccgagatgaagaacacagaaacagaaaactctgaaatgaaaagctctgagaccgaaagttccgagatgaagaacacagaaacagaaagctctgagacaggcagctccgaaacgacctccaaagccgacagctcagccgtcacttccgaagctgcatcagattccaacaactagatgctaaaaggaactgccgcaataaacataccgttctttactctgataactaatattatgagaagca

SEQ ID NO: 11629 - DNA, 46119 bp, Unknown
  gut microbiota DNA sequence
acacacacaaaagtcctacaaattgtcttccgggatgcggacatgacccgcggagtgctccaaacttggaaaaacacggatcatcgaagatgcaaacattcggctggttagaaatgccacattttttgaaccgaatgtccatctgcattttcatctgaaatcccacgatgtgatcttctaatgatattacttatcagcccaaagcacgatatgcttcttgcgacagttccctttctagcactctacaccgtattcttttaatttctgtctggcgtcctcgtagccggtaaaacgaatggcagagatgccgcaggcgatggcaccgtccacattgttctgtctgtcatcgaggaacacgcactcctccgcgcgcagatgaaagcgctcaagcagggagtgataaatctccggctccggcttaatctgcttcacctcgaaggaaaacaatgctccatccacgtccttaaggaagccaagcgactgatccttcgtcttcgcgtatgtccaggcaccgtaattggaaaggatatacaggtgataccccttgtcctttaacgtccgcatccattccccgacatacgggaacagataaatcgcccggtccacatgctcccagaaattccggatctgtgcttcgtatgccggagcttttctgataaagcctgtgagaagttcctcatcggacagggctccccggtccgcctcgtcccagtcactggtgtgcaccgtggcatccgcgactgcgcgcaccgtctcttcatccattccaagcgcacgcatcgcctccaccggttcccatgccaccagaacctgtcccacatcaaaaatgacattcttaatcatatgcgtcatcctacttgctgcggtagataatatcctctctgcccggtccgtttgataccatcgtgattggatatccgatctgctcctccacaaactctacatactttctgcagttctccggcagatcttcgtatttcttgatgccgcggatatcgcacttccagcccggaagcttcttaagtaccggctttgccttctcaagctttgctgttaccgggaaatctgttgtcacttcaccgtcgatctcatagcctacgcataccggaatctcatctaagtatcccaatacatcgagcacggtaaatgcaacgtcggttgttccctgcatacggcagccgtacttgcttgccacacagtcgaaccatcccatacgtctcggacggcctgtcgttgcgccgaattctccgccgtcgccgccgcgtcttctaagctcgtctgcctcatccccgaaaatctcgctgacaaatgcgcctgctccgactgcggaagaataagccttgcacaccgttacgatcttcttgatctcatacggcgggatgcctgctccgatcgcaccgtaagctgccagcgtggaggaggatgtcaccatcggatagattccgtgatccggatcctttaaagttccaagctgtccctctaacagaatgcgcttgccgtctttgattgcctgatcgaggaataaggagacatccccgacatacggagcaaccatatccctgtactcatgcaaggttgcaagaagttcctcttcctttaataacggcttatgatacatatgctccagcatgatgttcttcgtctcgcaggtgcgctttaccttttcttttaaaagctcctcatcaaacagctcgctgacctggaaaccgatctttgcatacttgtccgaatagaacggtgcaattcctgactttgtggaaccgaaagaattcttgccgagacgctcctcctcgtactggtcgaacaggacatgatacggcattaccatctgtgctctgtccgagatcatcagcttcggtgccggtacgttgcggtctgtgatcgacttgagctcgccgattaccttcgggatgtcgagtgcaacaccgtttccgataatatttgtgatatggctgtggaatacgccggacggcaatgtgtgcagtgcaaacttgccataattgttcacaatggtgtgtcctgcatttgctccgccctgaaaacggatgacgatgtcagcctcatccgcgagcatatctgtgatcttgccttttccctcatcgccccagttagcgcctactactgctgtaaccatatgtttttcctcctgatatgatacacttttttgccggaagtccgcattttcctgattccaggctgcatccatgcggccggtctgtccgaaagcagcatccactctgtaaatctgcctcatgacataaaaagtgacggttgtaaaaaaccgtcactcacttccgcctttttacttattgattatacacgaaccttttgcataagtaaaatcaatattcattatatgtggcataagtatttattatgcctgtttctaaaagaaaatccctgcttactgtgatgtcccctgtaccagaacattcatcagcgtagccgctgcggctgacagcggaatccgttcatttgcaacaatgcagaacgtacgcgccggtatctcctccaagaaccgcagttcaaacagatctccctccgtcaggtgctcctcggcaaaatttctgaccacacttgcaattccaaggttgcgcaccgcaaactggatcagcatatcgctggtggcaagttcaaactccggccggatcgtcacctgcttcgacgcaaggaattgctccacatacgtcctggtcgaggtatttccctccagacacatgaccggcagcttcatcagttcctcgtaccccagcatgcgctcctttaaatattcaaacttcctgcctgccacaaacacatcccggatctccttcaccggaacgcatttgagcgaagctctcttctcgaccggcgtgctcacgatgccaaaatcaatgcggccgtcgcagagatggcggatcgtctccggggtcggcgcattcgtcaccgtcacgcggattcccgggtagcgctcatgaaattcttccagatacggaagcaggaaatactttaacgtcatgtcgctggccccgatacagatttcgccctgttccagattcagcatctcagagagcttcctctcgcctgagaggatcgtctcatagccgcgctgcacataggaatagagcatctccccctccttggtcagccgcacgcccttggtcgtccgcacaaacaatgggcacgaaagcgtctgttctaaatgcttcaccgcctggctgactgcaggctgtgagatggcgagctgctctgctgccagtgtgatgctctgggagcctgccacataataaaaaattttataatattccagattgatgtccatagatctctcccgggaaaaaagtctcatttttttacaaaaacggattgtattttccactgtcatgaagtatactatgccttacgcaaagtaccagtatctctactataacagactatgaagggagacgcaatccaatgaccaaagatatgaccaccggcagcccgcttcggattatcctgctattttctattccggttctgcttggcaatctgttccagcagttctataatatggtagatacgattattgtcggacgctatctcggcgaggaggctctcgccgccgtcggctcaaccggctgcctgatgtttcttgtgctcggttttgccaacggcatcgcccagggcttcggcgtcatggtttcacacgctttcggagccaaagattttaagctgctccgtcactacgtggcgctatccctgattcttacactgattatatcgcttctgctgaccatcccaacggtgacagcttcccgcctccttctggcatggatgcacacaccggaaaatattattgccatggcagacgcttatattaaggtaatttttgcgggcattctgctgacaatggcgtacaacgtgttatccggcatcctgcgcggcatcggcgacagccgcactcctctctacttcctgattctctcgtccgtgctcaacatcatcttagatgtcgtactgatcgtgtacacagggcttggaactgccggagccgcctacgcaacaatcatcgcacagggagtctccgccgtgctctgcttcttttatatgtaccggaaatacgatatcctgcgcaccagacatgaggattattatctggattccgccggcgtaaaaaacatgctcgccatcggtgtgccgatggcgctcaactactcaattaccgccatcggcaccatgattatgcagagtgcggtcaacgtgtttggctcgagtgtggtcgccgccttcaccgcagcctccaaagtcagcaatatcgcgacccagtccatgccgacactcggcaccgcaatggcaacctactgcggacagaacctcggtgccggcaaatacgaccgcatctacgccggcatgcggcagggacttttcctctgcttcggtgcggcagccacagccgccgcgatctgcatctttggcggacgttttattgtgagctggttcgtgagcaatccttccgaggagatcttctcttccgccatgcagtacctgacgatcgcaagctggttctttctcccgctcgccatgatctttttataccgcaatgccttacagggcctggatcagggactgatccccatgctctctggtgtcgtcgagctcgcctgccgcttcggcgtcatcgctctcattccggcaagcaccggcttcttcggtgtctgcttcgctgatccggctgcctgggccggtgccggcatcccgctgtttatcacctatcttctctgggagcaccggatgaagcagtgttccaaggcggcgtaaacatttttccctcacacggaaatgcatcctattgcatcaaaaagaccgtactccgtcatcccggaatacggtcttttatattgtcctgttttattttatctatgcttccagctccggaatcttcttcgagcaggcaacagcaagtgcccccggtccaatatgacatgatacgctcagtgacagcggatccatatgaatctccagtcccggaaatgcttcctgcacctcctgcctgaacgcttccgcagcatccagatcgtacgtgtacgccatctccagatgcatgttctttccttccggatcgtggaaccgctccgcaaaatcgtgcttcatcgcctcgatcatcagattcttcgcctgcttggcggttctcgccttggcaaatgcatccagcttctctccctggatctgcagtaccggctttaactttaacaacgttccaagcgctgccgccgccggcgtgatacgtccgcccttcttcaggtaatacagcgtatccaccataatgtaaatggaagactcaaatttatctctctccagaatctccttaatctccactgcactgcgtccctgctctgccaacgccatcgcatccagcacagactgccgctgcgtcacagagattctctggttattcacaacctgcacctttccctcgtaatcctgcgccagcatcaacgccgtctcacaggagccgctgaggccggatgacatcggaatatgcacaatctcatcatactccttcagcaatgcatcccatgtatctgtcacattcccgacaagcggcatcgatgtggaaatattggcattctcggacagcatctgataaaactctttctgtgtcagatcgatgtcctcatataatgtcttgtctcccacaaaaaaaggcatcggcagaatggtgattccaagttcttccgcctgcaattgcgtaattccgctgttgctgtcagatacgattgctactttgctcataacttctactctcccttacaatgtctctgatcgttccttgatgttcttcttaaaattgatgatctcatgctcatactcagtattcatataagtggaatgaatcataaaatctgccgacgcccggttgttggcgatcgggatgtcatacacctgcgcgatacgcaaaagcgctttcacatccgggtcatgcggctgtgctgtcagcgggtcagagaagaaaatcacaaaatccactcttccctccacaatctttgcgccaatctgctggtctccgccgagagggccactgttatagcctcttaccgggagtcctgtctgatccgtaatcatacgtgctgtcgtacctgtgccacatagaaaatgctgctttaaaatctccttgttctgctcacaccagtcaatcagatctgcttttttattgtcatgcgcaatcagtgcaatattcttttgttttcctattgtcattgtaataaaatcttcactcataatctctgaatacccccttatcatttttctaatgcattgtaccatattttgtcccggaccgccaccaaaaaataatagaaagcgcaccgcagcacgctttctattattaaaaacgctaaaatgactcttctattcattctgcatgtatacttttgtataccgcatcacgcctgttcctgtgctacaacctcacgcattctctccgagatcttgtaaatttcgccaagcagatcattcagattctccatattctgcatactatcctcactcatagacatgctgttttctgaggatgccgcaacctcttcactcgttgcagataaattggtaatactgtcattgatctgcgtatttgctgaaaggatactctccacctcaccagacaaattctgcatagaattctggaacagattcatcttatcctcgataacagtaaacttctctctcgttgtctcgatcatctcgttctgcttatctgcagactccgctgacttctgcatatttacagaggcttcctccacatttaccgtcaatttttcgataatctccgtgatctttcccgtcgactccttcgtctcctctgaaagcttgcggatctcgtctgccacaaccgcaaagccttttccagcctcccctgctctggctgcctcaatggacgcattgagtgcaagcagattggtctgatcggaaatgcttaaaatcgttccgataatgacctccacttcctttatgcggttgtccagttcttccgtcgtggttcttgtggcgcggttgatctccgccgtctgggttgcctgctccttcagctcggcgatcaggtcagcgccctcacggagcgcgtcctgtgtcgcatctgacgccgtctgcatctctttcgtctctttttcggcgttttcaatattcgtctggatgccgttcgtctgcatcgtctgctgctcaatcgcttccgccgtcagcttgacgctcgatgcaatctccttgacggagttgttgctgctgaccatgctctccgtcagcacatccgctttctctctcgcactgtcgaacttctcggacagcgctcccgacatctgaatgatctcatccgccacacgcgccgccgcatccatctgcgacttgatggcatctgtatcctcaacatggtgtctcgcctgcagatctaccgcaatacacatcacaacaccgaaagaaatggcaaacactatctgtacaactgactcgctctttgtcccaggatatttcacaaaatgaagtatgcccgaaattacattcagcgctcccatcgcaatagcgctgatgcgtgccagccttatatcacgatacaacataaccgtaagcataattaaatacataaatgcataaaagaccacgtttttgtttgataagatcatcactgcataggtaagaaacatacacgaaagtgaaatcataacaaatttcctatccccgcgataccggacatgtccaatgaaaaatatcacgagaagaatgatattgaccaccatgcgtgccagcaccacagatttatccgctgttacatccacaaatccaagcagcgtcagtgcattcaaaagtccaagaatgataagtccaaggacgaatgtaatcttgttgcgttccaatctttgtttttgttttaatttcataactatcccttcctttgtaaacaatctcacccgggcagacggatctttccatccatcagcatcttcacaaacgccgtatcccggataatccaggaatctttctcaatcagaatattcctgtgatagacttcctccggcgtcgcccattttaactgatacccctttgcgatctcgctcggggtaagtgaaagtggtgcctgctcgtccaaaacatcgcagtaaaaaaaaagagaatggcagataaactttttatccggctcaaaaatatctctgtgcagttctattatctcgcccagctcacagatactctccggtctgacataaagtcctgtctcctcttttacttcacggatcagcgtctgctcataattctcacccggctcctgcccgcctccggggatcttatattctccctcccggctgcactgcatggcaagcctgccgtcacgcacaatgatcgcccgtatcgaatacttttcatagatacccgtcgtgccctcataatcacgggcatcaaatgtcgcaaggatcttcatacgcatttcctccgtgccgcttcacttttcttgaattatattccctttttgcaattatcgcaatatttttcaaatatttttattttaaacattttctgtaataagaacacagttttctaattgcagaaaaaaaatccaccccggtcgattgaccgggatggattccctcttcggatgggatttacatcattcccattccgcctgcgccgcctgccggcattgccggtgcgtcctctttgatgtttgccaccacagactctgtggtaagtaaggtagatgctacagaagttgcgttctgtaatgcggttcttgtcaccttaaccggatccaggataccctgctctaccatgtctacatactgctccgttgctgcgttaaatccaacgcctgccggagattcttttactttattgatgatgactgcgccctctaatcctgcatttgcggaaatgtagtacagcggagcctccaatgcctttaagataaccttcgcaccggtcttctcatcgccctcaagcgtatctgcgagtgctgccacatccttggttgcatgaatgtatgcggaaccgcctcctgcaatgatgccttcctcgactgctgctctcgttgcgtttaacgcatcttccatacgaagctttgcttccttcatctccgtctcagttgctgcgccgacacggatcactgctacgccgcctgcaagctttgcaagacgctcctgtaacttctccttgtcgaactcggaagttgtctcctcgatctgaccgcggatctggtggattctcgcctgaatagcgtccttattgcctgcaccgtccacgattaccgtgttctccttctgaactttaacggattttgcacgtccgagctgatccattgtggtatccttaagctctaatccgagatcggagctgataacctgaccgccggttaagattgcgatatcctcgagcattgcctttcttctatcgccgtagcccggagccttgactgccactacattgaaagtaccacgcagtttgttgacgatcaatgttgtaagtgcctcgccctcgatgtcctcagcgatgatgagaagtcttgcgccgctctgtacgatctgctctaataacggcaggatctcctgaatgttgctgatcttcttatctgtgattaagatatacggatcatccagaaccgcttccattttatccatatcggtgcacatatatgcggatacatatccacggtcaaactgcataccttctaccagatcaagctctgtctgcatggtcttggactcctcgatggtgataacgccatcgttagataccttctccatcgcatctgctaccatgttgccgacttcctcgtcacctgcagagatagctgcaacttttgcgatctgatcttttccttttactttggaagacattgcaaggatggactccactgccttgtctgttgccttcttcataccgcggcgaagcacgatcgggttggcgcctgcctccagattcttcataccttcctggatcattgcctgtgcaagtacggttgcggttgtggtaccgtcaccggcaacatcgttggtcttggttgcaacttccttgacgagctgtgctcccatgttctcgaatgcatcctcaagctcgatctcctttgcgatcgtcacaccatcgttggtgataagtggtgctccgtaggacttgtcgagtacgacgtttcttcctttcggtccgagtgttactctgacggtatttgccagcttatctacgccggctcctaatgctgttcttgcctctgttccgtatttgatttcctttgccatgactgatctacctctctatctcttattctgattcaaattacagggatgcctcccggctgcttattctacgacagccagaatatcgctctgtcttacaatgatgtattcctctccatccagctttacttctgttcctgcatatttggaatagatgaccttctgtccggtctttacctgcatggtaacttccttgccgtctaccattccgccaggacctacggcgattacctctgcctcctgcggcttctcctgtgcgctgctggtaagaataataccagactttgtggtctcctctgcctcacactgttttaatacaactctgtcactcaatggtactaatttcattttgtagacctcctgttttatgatctgaaataatatctttcgttttgttattagcactcatttcgtttgagtgctaaccgatagtgttataatagttttttagcatgtgatctgcaaccggatatattccggtatatttgcatttatattgctcttttctcgttttttcttttgttttcttgtatttttatattttcatccattttttgtgattttatactttttttagaaacttaccgtcgcttctctccaacgacctgtttcaccgttttgcggacagttttatttccctccgaccacaggagttttaaggcttttgcaaagaccttctggctcttctccggcaggtggcttttcgccttcatcagctcctgcaccgccttccatttgctgtggtaaaaatcatccaccgtcttaatgtccgccgcttcaagcatgccgaataccgtatccacaatctgttcgcgttcctccccgttcagctggtaaatccatgccttcatcgtctcatccaacatcaggctctgggccgtcacctccctgacatagacaaaggatgtgccgagcacctcccacgacatggcatcgtgctgctggattccactgttggaactgcgcaccacctcatacgcctcctggtgctccaagagcattccgacaatcgaagattccggcagaatcgtgtggattttcggcagtacgcgctggtatgccgcgccctctacaatatccctgcggaacccaggtccgtcgttgctgtagaccgcaagaatccggtcctgcagcccgctgctgcagtggactgcagcatagacagcaagatttccgcccttggagtgacccccgatgcgcacggggcagctgccatctccaagcatctgttccacgtacgcagcggctttcagctgaccgggcgtctccgagaggtatcccatattaaaatcctctctccaccctgtgatcgtattgtccgtgccgcggaacgacacatagatactgccatccggcagcccggcgcacatgaccgcaaactgtgactgctcctcctcactgatgtcattgacgtaaccccagagcttcacgtcacgaaaacgctctgttttcgccatcttctccaaaacaaacggcgccgcctttgtcattgacacccgcgcaaggatctcctccctgctgttctgctcccagaacgcggcggatgcctccgcaagcgtgactgcctccgcctcgctctgcccggtcacaatcccgtcaaacgaagtatataccagctccgcaaaaagcagattatccacctcgttaaatccggacgcggtgaaagtcagatccccccgccagtccagataatccatcatgtttgccatcccgctcctccttctcttcccgctgcaatcccgttgcttcctatccgatcagcccatagtgcttcagtccgtttttaattccatgattcataatatcggtcgtcacatactccgcggcagccttcgccgcagatgccccgtttcccatggcgatgccatgtcccacataggtgagcatctccagatcattcgtgctgtcgccgaacgcatacgtattctccctggcaaccccaagtatgtcacatacctgcgctattccggtcgccttggtgtagcccttcggcaccacttcaatcagctgcggattgtgttcaatcacatcaaaatgcggcaccagctccgcttccaccgcacgcacgctcgccccgttcatataagcgctcaatttgttgatctcatactccgtctgcccgcggatctcccgcacatcctctcccagttccctgcgaaggtactggataaacggatcttccttaaaatcttccccgtttgcgtagatataatgcggtccctccagcaccgcttccatgtggtatgcctcaatgacacgtagaagttcctccgcttcttcaggcgtaagcagcctctcgcacaccttctttccttcatattcaatatgtgtgccgcacgccgccacaatcccgtcaaaccctattccaaggatcttctcactgcggatgttcgaccggcttctgccgctgcacaaaaacgcgtaattcccgtcagccctaagttcgcgtatcgcttccgttgtactttccggcacctgcatgtgctcattccacaaggttccgtctatatcaaaaaacactgcttttttcatcttttctctccaattcccattctcttgcgtaaaagtcagttctgctatatgcaaaacattctcttccccgccgcatggtgcacatcctatcctataaaggaaaaaaaacaccgcgcgggctgaactcattatatcagcccgcgcggtgtctggcaacttgcggtttctatttcaaatatcctgttactctctgtgcatggagatggtgttcatctcgtaatgctcaatgttctcatgaattccacggtcatctgcctgggaaatcagagtgtcacggttcttcttggaagagatctggtcgttgaacgcactcggtccgccgacacagccgccctcgcatgccataccctcgatgaaatcctccggcagtctggctgctttcagaagaagcagtgctttcttacactcggcagctccgtttgcaacgcatacctttgcatcgatctcatcctcagactctttcagactctgaagaacagctgcggttacaccgccggaatttgcaaaacgcttaccgaaggtggatgcgatctgatcatcgtttgcagccggctgcagtacgacgctcttcgctttcatgatcgcacggatctcactgtaggtcagtacatagtctgcattgcccggaatctgctgatccacaacctcagacttctttgcgatacacggtccgataaataccgtgatggcttccggatctcttgccttgataaggcgggaaaccgcacacatcggagataccgtcgtcgatacacagtctgccagatccggatagtgcaggcgtaccatatttacgaatgccggacagcaggaggtaactttcttctcgcccgccttgtaagcttccgcccactcctcggactcgtaagctgccgtcatatcaccgccgagacctacgtcgaagaaatcggtaaatccgagttctttcatcgcattcttccagcttgccatcgtgatgtcatccccgaactgtccctcggtcgccggtgcagccatcgcatagacatgcttaccctcgcgcagtgcgttgattacatctacaataaagctcttggagccgatcgctccgaacggacagctgtggatacatttaccgcagcggatacatttcttcttatcgatgacggagataccgtgctcatcgtatgtaatcgcgttgaccggacagctgaacttacacggtctcttcagatgtgcgattgcattgtacggacaggcctgcgcacatcttccacattctttacattttgtaggatcgatgtgggagcgggttcttcccggctcaatcgcaccgaatttgcaggcattgatacaagcctttccaagacagttctggcagttctccgttacaatataactggaaatcggacagtcctcacatgcagaactgatgacctggatcacattgccgtcatcagtcagacctggcgctttgccctccgccagacggactctctgtctgataatctctctttctttataaatacagcagcgaaactgcggtgtcggacctgagatcaggctcattgcgatattgtctctcttctcgtcaagctcaccggcaaatgccagctttgccacttcatagagtacgtcgtgtttgattttgatcacgttttcatcagcatacatcgtgttttacctcgcccttttctattcgttaattttttaaccatcttagacattatatattatctgtatggaattgcaagagaaacgcatgtatttctttgcgtacatgatgtataccgtcaaattgtaaaaaatccgactgctgttttgtgcaatatttttctgggaagtccactgtactgctactttggtacctgttccatcaggaacgcccgcatctgctcctcttcccagatcacgggaacggggtagttcggattgccctctttgagcgcgcgcgccgcaagttccggcacgtcctccttgcgcagcatggcaagctgctccgggatgcccatgctccggttcatccggcggattctctcaataaacgcctccgccagcacggcgtccgtctcctcacggcttccatcctcagccacggacgtgcgcacttcccgctccggcttaccccaggctgcgcgcacttcccgctccagcctggccagcggctcatacacggcactcccgtatgccgcaagcaccttcggcagcagaatcgcattcgcctccccgtgcgggacatggtagagtccgccgatcccatgtgcaatcgcatgcacgtacccgacataggcattggtaaacgcgatccccgcctcgtaggaaccggtcagcatattcatccgtgccgccttgttcgcaggctcgcggtaagccgtcagcagattggcaccaatcaggctcaccgccttcatggcatgcgctttcatcttcggggaacagaaccggttgcagtacgcctccaccgcgtgcgtcatcgcatccatcccactataggcggtcatatccggcggcagggaacagctaagtcccggatcgagaaatgcgtagcgcggtatgagacagtaatccatgacggcatgcttatagttgcatgtctcgtccgtgatgacagccgccagcgtcacctccgaaccggttcccgccgtcgtcggcactgcaagaaggagcggcagctttttgtgaatcttaagcatcccgctcatttttctgaccggaagatctctccttactgtgcgcgctcccgcaaccttggcgcagtctatgacagagccgcctccgatggcaaggatcgcctcacagccggatacaaaaaaacattccgctgccgcatccacctccgccacggtcggatcgggcgatacacctgtgtataacaccgtccggatgccggcatcctcacactgcgccagaagcggcgcgaccgtcccgcgccggatcgttcccggcgtggtgatgacctgcaccccttttatcccgtgtgtcttcaataattccggtatcctggtgatacacccgtccccctgcaccagcgtctgtcttcccgcaggaaacagggaaagcatccccgcgcagagcgcctgatagacgcggtatatggcatgttttccgttcatctcattcctcctgcccttatgcttccccatctttctgcagggcatactttttcacataatgataatgctggatcgccacattgaccggagagagcgttgccgacgcgcccgtcgcgcgcacatgcagacagcagaccgccgcctttgccacaagcgcctttaacgcctccacatcatccgccgttcccgcggataccacaacgccgacacgcggcacaagcaccgcgccgtattttcttaagagtccaagcatatctctgcgcacatgaagacagcacggaatcttcctgccgatcatctgcgccatatcatccacctgcgccgggattccccgtccgctcgccgcgcagagaaggactgccggcgtatcgcagattcccacataatgaaaatgcttctgtaagacgtgaaacagcttttcctggcgcttctggtcttttctcggcttctttttcggctgtcccaaaatgctcctcttacagatctcctctaagagcatggcgcgggaaaacgcctcctccctgtcctttccgcagatcagcacgccgtggtgcaccataaagaccacctttgctcctgactgcatggcatcgtagaccgcccctgcaagcttctccgtactggaaagcccgtatgccgctctcgcgatcccgccgagcttctctgcctcttcctccgtcatggcaagctgctcaaagccgcagagcccgatcgccgtggcataggtctgatgggtgtgaatgacataccccacctccgggaatgtctgatacgccgccagatgcacacccttttcgctcgaaggcttatgcgcgccgcagcacacaccgtttcttatgtccatcagcaccagatcccgcgccgtcatcgtctcataatccagcccgctcggcgtgataacaaaatgattctcgtcgatacggcagctgatattgccccaggttctcgccaccagtcccgcctgctgcagcttttttccctccgctgcgacaaggcgtctcgccatctgttcttccattccagtctcctccgcttctgccggtgcccgctgtcacccggctttttctctattctctattatcttccataagaagctgttttgcaaccgcatgtgaaacattatatgtccgaagtcccgtctcatttaatgcctcttcattcgcctcgcagtacagctgataccagccctgctttctgtagtccgccgcgccgctttttcccgcatatttttcaatcgccggcgccgcatccgtcgagagggtgtaaagatagctgtagtccaccgtctcctccccggacgcttcccacgaggtgtgcgtcagattgtaggcggcgataaaataatccacatgggaaaaggcaaatacgagatacaccgctcccgccagcacaaatccataccggaacagcgggaactgcggttttacaatctttgcgatcacgccagccatcaaaagtgcaatcaccgccagtgccaccagcaccgacacacgcagaaacgtcagttggtacgcccggatatagagaagcatccggcaggcgctcgacgctgtcataataagcgtgcagcctgaaatggcaaggagcagcgccttcaatactctgttctccttaaaatagctctggatgaaaagcaccgccgccagattcagcacacatacgaacagaagctgaaaaaaaccgcgtctggcgtactccgcataagtaacccccgccgggagctgcatgtttccgataaaaagatacacgatctggattgccgaaaacagaagatacagcacggcaatcggcgcggtaaacgcaatcgctatcagcggttccgccgtttttccggcggaaggcttaatgtctgccgcgtgcttttgtacataccgcacaccgcagtaggaggataagaatccaaacaccagcatgagcagaatccgaagcagcttcaccgggaaccggaacactcccgcaaaccgcacaagtagatctgcaaataccatgtccgcagacattaaaaggagcacaagaaccatcagacagggcaccgccgcacagatcccgatgagaacataccagcccgcatggctctcccttgtctttttgctgcggtaaaatgctccgccatccgcaaacggcttcccgataaagcagaccgccccgcacaccgccgccacaatctccgccagatattttccgaaattccacccggtatcctgcgcgaagttgtgcagaagaatccccacaagcagcacgaaaataataagatcattcatccagccgatccattcgtttcccgtcagaacggtagagattccaagcagtacaatcatccccagcacaatgccattgtcccgtctctccttttccccgaacatccggaacacaaaacgtacataccacacactcgacgccacccaaagcaccgacgccagtcccatcacattttcaaacaggcatcccgtgtatacaagcgcatagagcaggctggcgcccgccagttttccaaaaatctttgccccttcctgattctcttcctccggaatcatttccttcggattcatttccctaccgatcatgatctcttccatcgccgttctcctccccttcttcctctacatactccagaatatctcccggctgacagcccaatgaccggcagatcttatcaagcgtatccatccggatcgcctttgcctttccattctttaaaatcgaaatatttgccattgtaatgccgactttttccgataactcggtcacgctcattttccgcttcgccagcatgacatctatattgatcctgattgccattctcttcctcatttccggacgatccgctgccgtcctatattgtcaactccgcatcctgcttcatctcatacgacttatagatcagatgggacagcgccgccgcaagcaccgcgatcaccacattgataaaaatgagcagaatcataaaaatcagaaatgccgctccaagcgcccgctttgccgcgaggaacagaattcctgcaaaccagaccaccgccagcacaaacgccagcctgctgattaccacaaacgaccttgcattctcaccggaaaaagaattgtcgcgtccgatctgcacgcagaccttccagaactgatagagaatggcgtagcagaacaccgcaatgccccacccgtagagaatccccggaatgcggagcgccgcgtagtccggatatgtcaccgccatgtcccatgccagatacggcaccaccagcccgaagaacaacagtcccatccctgcaatcgaaagtgtgatcccctttaaccaacctgccacctgtttctgactcataattacctcttttccgcaatcttactgctgtatttttctcacagctttattatatccatgtttttccattttgcaatatatttttatcgtttttcgataaattcatatcgttttaaggaaatcttaagaaacaaaaagagcaccgatctctcggtactctccagtggaagcaacggggctcgaacccgtgacctctcgcgtgtgaggcgaacgctcatcccggctgagctatgcttccatatctgctattatagtcctttcgcagaaaaatacaacctcaatttaaaaattcctctttctcgagcaaaagccgcatggcccacggcggcaccgccgcttcgtcatagtcctccagaaacagaaacgcagtccggtagtccgggcgctttgccggataccgcccctttccgtccgtaaaatagagcagtcccgccagctcttttaattctccctgttccagaagatcattgacataggaaaacgccgggcgaaaatccgtgccgcccccgccaaggagtgtaaagtccctaagaaatgcctccatctcctgctcacccgtgatctttgcatcgcttcgtaccacattgtcgcactgtaaaacccggatcacggaacgcgcaaagaaactgtcgctctggtgcaggatgtttgccgtctcgcgcaaaaactgttcgaccagttcaccgctggtggaatagctggtgtcaatcacgatcacaaactcgtggatcttctttacctccctgctctcaagcggctcgatgagcggcagattcccgtataccgaaagtccgtacgtgtaataactcagatcaaattcctcagggtcggcatgcagttcctcgtgcagcacggcaaatttctgcaggaaatcccggtagcttcgtctgcttttccccgccgcaagctgcgccgccagaaggtcttcaccgtccttgggcttctctccccgccgctcctgctccatgcgggtctgcctggcgatctgattccactttttctgattgtccgccgcagccgcacactttgccgcatcgtcctcccgcttcggccaatatttgtgactgtccgtgtaaaattcgcgcgctaacgcctgccattcctcacagaccggcattccctccgccggcagcggaaaatagcgctcccacaaaagatcgtagacgacggcagccgacacaccttttttttgttcccgcagttcttcgtacagcttctggcgcgtccagcttaagatccgtttcgtacatttttttcccagaccgtcaatcgtatattccacagcaacatcacaggcgagattccacagccgcctgtcgcggttccccgcaatccacggatgggagaaaatacagtgcagcactgtgtgaagataggcacggtttaggtacggtgcatttttctcaaacacacgcagtatctgctctgtggagtagaacagatgtcccccgtccgtggcaaagctctgcagcgacgcatccgcctgcggcacaagcgccgagaatgcgacgtccagataccgcaattccaggtacagttcgttgcgcacataagaaagtatcttttccgccatctgcacttcccattcttcctgtgtctgtatatgtcccatgccatctctcctcttccggtttctttttcagaataccctgcatccgcacgtacttttccgtgtaaaaacaatcttaaaaatcgtcaaacgaatagcgctcgtccggtgttttctccgcgaaatactgctgcatcagatgaagcagcgccgccgctccctccgcccagtccgcttcccccgcacgcatggcgcacgccgccacgtcctcccgcgtcagaaacttccggctgcagcaatcttccgccagttccagatcccggtcatccgtgatgcggcggatgagataaccgctgtgcgccttcaaatactcctcgtaaagtccgcgcggcgcctccgaaagttccgccgcatagcgcacgcggtcgagtgccagccgtcccagcgttgcctccgattcatccacacacgcctgcgggaaaatcttatcgtactgtgcaaaatcgagcacgtcctcgcggaagctctgtctcgcccggaatccctcccccacaatatttctgccgaaaatatgtgccggcgcgatctcgtcatagctctcataatattccggaaacagcagcttcgcccacacgccattttcgccacttaaggccacttccagatccgacgaaagctgtgccagcaaaagcctgagccccgtcttttgcccggggtccgcatgcagtaacagccgcgacaggctccggcagttcataaatgcatcgctccccagcgtgtctatcccgcttccaagctccagttccgcgagctccgtggcattataaaaagcaaagtttccgatcttttttatgccctccggcagcgtcacgcgcgttatatacgcccctgccagttccgccagcgcaccgtctgctcccggctctgctcccggtgcgccatccgctcccggcatcacgtctgcctccctgtccggcgctgtctccggtacaccgtctgctcccggctccgcctgcatctccccgtccggcgctgtctccggtgcgccgtctgcctccgtctcctcctgcacgtagctgcaccggcattctgccgggagatgcgcctgcgccgcaaagcagtagtccccgatctccgtaatcgctcttccctctatctctgccgggaaacgcggctccggcatctcgccaaacgcccgaagcagccgcgcgtctccctcatttgtcagctcccagtataacttatagttcatcttctgctcctaatgtaaactctacgctccattatacgaaaggcgtttttctctgtcaaatctgcgtcattccgcccagcagaattccggcgttgtcccggtagatacccgcgaaatccgacatgggaagcggattttctcccatcccggcctcgatcgtgtagcccggtctgtcgtattcctggataaaccagtccttatacccggcatatcccgactgcgtgggcgtctcctccacggtatagccgctgacacgcccaaaatactgcgcaatctcgtaggagtgcgccggttcatagtccagatacttccagtagatgacctccccctgcgtgtgatacgcaaggatcagcctgaaatcatgtgatctggtaaacgcgtacaccgcctcgctctcgggtgccgtcaggggtgcctctcccacgtaatctctgggtgccggcttcgtgtacccctgcgcatatttaattctctttgcgttttcccagcctgccggaaactgtagattcaaatctatgccctcgatattcgccttccatccggacggaaacggaattgccggataatccgatgcaatctgctgcgcccgccggtaatacccgccgtccgtaagcagcccgttcaccagatccaccccgtcgggattgacgagcggcacaaggaaaagccggtactcctcaaacagttccgccgccggcacgccgtagagcgccgttcctttttcgtatgcctgcgcatattcctccgcaaatttgagcagaaccggcgttgtgatgctctcatttgcatgaaaagatgcgttgtagaatacctctttctccccgtttccgatctccagatacgaaatcggctttcccatcacacttttgccgatctccccgctcttcaaaaacgggtagcgcgccaaaatcccgtcaatcactgctgctgtgagcagcgatgtataaggcacctccaccgacgttaccgggtcttcaaaaaggatccggttctctccctcctccgtggtgtatcctctcagatacggcagcagcttttcccaggcagatcgatccaccacgcatatgcggtcaggcgtgcggtcggtctgcaaaaaatcggcgagcgcccgacaggtgtccgttccaaagatgccgtccaccaaaagcggataccccgcgcgctttaacgccagctgcatgtaagataccaggattccccggtctccctgatacagatttttcaaattctccttctttccggcacgagaaactcctcccctgccatacgccttcttcttatcttatgcagacactcagccatttagctgtcacttttccacagacgcaaaacggacatggagggaaaaacagtccgtgtctttccctccatgtccattttaagattgttatagggctctccgcctccggttagcaggcttcgatctccttgatactgcattcgttgcctgtcacaagataagtttcatagcttccgcagtgcgggcactgtcttccgtatgtaaccgtctcataggtcttctgacagtcctcacagattgtgaccgccggaagggactctattttcatctcgcactctgcgatcagcggattctttttgcggtaaaattcccaacactccgtcagatattccggcacaatgccgctgacctcaccgatgtccaaagtgacagatccaattttttttaattcgttctccgctgcaacctgatccagcgtctttgcgatatgaacaataattcccagctcgtgcatatgactcctcttaattcttgttgcgcttgatcgcaaactgacgctttaacgcatacggtgcgattgctttcagtttgtcctcagacttccacatacggcttgcatccggcagatcacgtgtcagatggatcgcatcaaactcacacttcgtcgtacagattccacagccgatacacttattctcatccacaaccgaagctccgcagccgaggcagcgctttgcctctgtcttgatctgctcctcggtgagtgtgcagcgcaagtcgcggaatgtctcctttgccacgccggcttttgtacccggaatctggcgttttgcgttgtcaaatgtctccacgtcgatgttgttcttatccagctcgatgaactctctgcggttacgtccgagtgttaagctctgtcccggattgacaaaacgatgcatggatacaaatccttcttttcctgctgcaatggcatcgatggcaaaacgcggtcctgtgtatacatcaccgccgacaaagatatccggctctgcggtctgataggttaccgggtcagcgatagctccgccgttcggtctgatctccacttttgttccctttaacagatctccccagacgatggactgtccgatggaaagcagcacgttctcgcactcaacggtcatcagatcattctcatcatactgcggattgaaacgtccgtccgcatccttgacggagagacacttcttgaagacgattgccttcactttcccgttctctgtcagaatctccttcggaccccaggaattgtttacggaaatgccctcttcctcagcctctgccacttcatcctttgccgccggcatgatgtcgcgggactccagacagaacatggaaacctcaccggaacctgcgcgcagcgctgcccttgccacatcgactgccacgttaccgccgccgacaacgacggttcttcctgaaagcttggtgctctcatccaggttcacgcttcttaagaattccacaccggtcttcacgccatcagcatcctcgcccggaactccggccttgcgtccgccctgtgcaccgattgccacgtagaatgccttgaagccttcctcgcggagctgctggatcgtcacgtcttttcctacctctacgccgcacttgaaggtaacgcccatctggcggagaacctcgatctctgcgtcaatgatatttttctccagacggaacgacggaataccgtttaacagcataccgcccggacgggactctttctcgaataccgttaccggataacccatctttctgcagtagaacgctgcggaaagaccagccggaccgccgccgacaatcgcaatcttctgcggcagatccacgccggttccgagatggttgacaatctccgggatatagcgcttatccgcatgcatctcctgctctgcgatgaatttcttgatctcatcgatggctaccgcctgatcgatcgttcctctggtacatgcatcctcacagcggcggttacagatagaaccacagactgccgggaacggattctcgttcttgatcagctttaaggcgtccatatatctgccttccgctgccatcttcacataaccctgtaccggaacgtgtgccggacaggcggtcttacacggagctgtaccggtctcatagcagttgatctggttcttgtcgcgataatccttgctccacttctccggtccccactttgtcgcatccggaagttcctgcttcggataggtgatctcgccgttctttgtgcagagcttctgtccgagctttgcagcgccggtcgggcaatactccacgcagcggccgcatgccacacagttttccttggtcacatgtgcgcggtatgcagaacgggacatgttcggtgtattgaacagctgggaagtgcgcagcgcgttgcagacgccgactgcacagttacagattgcaaaaatcttatcctcgccgtcgatgttggtgatctgatgtacataacccatcttctcggcgcgctccaaaagctctaacacttcgtcaagctccacatagtgtcctcttccggtctgtaccaggaagtctgccatatcgccgacaccgatgcaccactcgccctcgatatcgccagttccctctccgcggactctctgctgcagacggcaggaacactgtccgatcgcatacttatccttgtattttttcagccagtgggaaatgtgctccacatccgcagactcctgcactgccggaatagccttctctaccggaataacatgcataccgataccggctccgccgagcggcaccatcggtgtcaccttctccagcggaagtcttgacatattctcaaagaaatcagcgatctctgtgtgcttttccacctgctctttgttcattaccatgaactcggcgcttcccggtacatacatcggcagaatgtactgcttctcatgctgcggattctcccagttgtactcaatgattccgacaaccgccatctcctgcagcagcttctctaactctgcctccggtttcttggtcttctttgccagctttggaagggtgatcggcttgcgcacgtccatgcatagtgccacttccgccatctcatcggtaaccacacctgcaaggccccagtattccggatcgtttaccgtgagcttctccataccaagcttgtacggaatacggtcggtaatctttttcccgagctttaaaatcagttctctttcttctgccataacagtctcctttttcctttgtttttcgttgtttttcctgtttgttttattctgtctcgtctgttttcgtcttatattgcataaatagtgcgcactcagagagtgcgcatactcatagcctgtgtatacccataaaatatgtatgccgcttccggcagtttttaattattccactgttttacttccgtgcgaagccagtcgtaccacgcatccatcccctcgccggtgcgggaagagatcggaatgatctgaatgttcgggttcagcttcttcacgcgctctttgcatgcctcgatgtcaaaatcaaagtacggaagtacgtcgatcttgttgattaaaagcacgtcgcagatggaaaacattaacggatattttaacggcttatcatccccttccggaacgcttaagatcatggcgttctttacggctcccgtatcaaactctgcaggacagaccagattgccgacgttctcaagaatggcgagatccacgtcctttgtcccgaggctctcaatcccctgtctcgtcatatccgcgtccagatggcacatgccgcccgtatggatctggattgcctttgcgcctgtctgtgcgatcgtgtcggcatccacatccgaatcaatgtccgcctccatgacaccaatgcgcatctcgtcttttaacgcgcctatcgtccgcaccagcgtggtcgtctttccggatcccggtgaagacatcagattcagaagaaatgttctgtctgcctttaactcagaacgaagcacatctgcttctctgtcattgtcttccagaatgttcttcttgatttcaatcaccttaaactcactcattcgtatgcccctttccctgtggcgaggtatccctttgctcggtcgtgctctggtcatacctcatgtttgtctaaattttaacacactttttctatgaaatcaacgctattttgcactatatttctggttctgtttttgtgcaatctgccatctggtgtctggtatgaccagttgtcttgtcagaagacagacactttttacacaaaaaggagagcagcgcaacgaatgctctgccctccctctttttaaacctgtatgcggtccgcgatttcttttccaagcgccacccgctcattctgcacccctatgatcagactgtcccgcagcttacggatgacctgtatggtctctccctcctccacgtgatgctggcgcagaaaatcgactgcctccggaagcccgaacatccacttgatcgtacatatatctcctgcctgtgcttttgacaatgcgtacataaaaaccccctccttttcttcccattgtaagtgccccaacatctgttagtcaatagaaatattttttattattattcgcattttttattattattcgcatgaattttctggcatttctattttaccatgatatgtacgactaatcgttttttctcattttcgctcaatcgcgtgcgcaggacagttctcatagcagttcccgcaacggagacaatgattccgatgaatccggtacggcgcgccctcctcaatgcaccgctgcgggcatattgccgcacaggcgccgcatcccgcgcaggcatctgtaatgtagtatcccttctcttttacaccggcatccctaagcgtataggtttcccggaaaatcggatttaactttatatccatatcttctataatcggaatatattatctccttccaaactaaaactccaagctatctgcattaagcagaaaatatttcatgcccatgattacaaatccttcctcatttctccaaggcttttttgttccatttactataataatcttcttaaatgaatcaggaatattacggagtgaattaagttcctgtgtctgcttttcctcagaagtcatatcataagctacctgaatataatatctctgactaccctggttcactacaaaatcaacctctaactgcttatgaaccctctttccttcactattctttgcaaatacatccacaataccgacatccacattgtaaccacgcacaagcagctcattataaacaatgttctccataatatgagtcggctcctgctgtctgaagttcagtctggcaatcatcaatgataagaacatttgcacgatcctcagaatccaaaggaagaatggcatccttgatgattcgggttgaaagtattgttgtgaaacggatacagttaatctgaatcattttcataaaacgatatacagtatccttcgcaaaatcaagagtgttccgtcctgtgatcagtttcatgtacatgcttctgttagaaaaaatcagcagaaacaaatactggaaaatttccattactggaacgcctttctttttgtaggcattggacgctttcaaagcggaagaaacatgaaatctcgtaaaaaatcttttgacacccgaatcctttcataaaaaaagagccttccatatcctatgagattaaatctcaaaattcagatatccggctctttttcgttttcttcaaaatttttaatttttacttttctctgtcaaatgccgcgtaagcgcttcttctttcagcaacatttccatgatctgttcgtattcaaagatgcactgtagttcttcctcattgaacctgttcagggcgatctcatccatctgcctgtgcatactttcgtcgtatcgctggtgctctgtataaaactgctctcccttttcagtcagaaacgcaatgatctgccgtttgttttcttcattcttcctgcgacagacgtatcctttcttctccagacgtgatgcgatctgcgaaactgccccctgtgtaacattcatctctctggcaatctcagacatagtacgtccttcaccgggaccgatcgcgatcacaaagtgtgcctctctcatgtagagtttatcatctgccgtatactcacggtctgaatccatatactgtacaaaagctcttgctgtatttccctgctgatgtaataactttccgattaatttgatacgctgttccttcatctctatcccctccgcatatagaattattgcagacaattccaaaaattgcaaggaaacatcttacggcagtaagttaacgttcattcagcagtaaagcacttgctattttgctgcgtatgattttttatttttgcagcattgcaacaaacttcagtgtagcgatcacaccggtagataatactccttcatccacatcaaagaaaccattatgatgtgctgcacccgaaccgtaggacggattattaattccaaggtgtgccagtacactcggacaaattcttcgatagcaggagaatgactccgatgcataccatggctcacaagaggaaaccgttacgttctccagaagtacctccggcaatgcagcggaaataagatttgaataatactcatcgttgatcactggcgcacataaaacacagaaacgatcatcaaattgtacctgacaattattcattgcggccgtatgctctgctacattcttaaagattcggacagctttttctccttcttcatcattgaagaaacgcagggaaccaagtatatccgctgtgtccgggatgacatttggtgcttcgccgccctggatactggtcacacctaacgtaaccgttcttccggcagtaatctgattgacccaggccgtcgctgtattggtcagaatagaggctgcacaaaatacaggatttaccgacatatccggtctggagccatgtccccctctgccgataaccttaatgccgactcccgcagcaccagccattcgtggaccggcactaacacaaatctttccggattcaagccctgcatacacatggattccccagcaaacgtccacaccatgggcgctgagctgatttaacatagccaatattcctctgccatcctcttctccttcttcaaagcagaaatagatcacgcctgccagattatcacgttgctctgcaagaacacgcatagctcctaataacattgctgtatgggcatcatgaccacatgcatgactcgtatgtgggtcatcggacactacaacacgaggacctgcaaggttatttggctcctccggtaccagaagcgcatcaatatctgcccggagcgcaatacgtgatcctggcttccctgtgtcaagaattgcgatccaaccggtatcaccggctttttcataaggcagaccggcttttttaatctcttcttcaataaaagcacttgtcttgaattccttaccgcttacttcggcaaaacgatgaatggtacgtcggctttcaatcacataatcctgctgtgcttctgcctgcaggcgaattatttcattcgtcagcataaaaaccctcctccttttgttctacaaagctgcatttatgttcttttctgaaattagttatctaatacagaagcgatccgatccagagcctctaccagcgtttttcttgtacagccaatattcagccttaaataaccttcgccgcctttgccaaaccatggtcccggtacacagatcacttcttttcccataataatcttcttaataatctcttcgtctgtcagtccggcactggcaagatccagccagcataaaaatgtaccctgcggtgctgtaaatcctacattatgcttttgacaccactctgaaacaacctccacatttccctgaaggtaaactaataattcttccagccatgcctctccttccggtgaatatgccgcctgtaccatctccaaaccaaatgtattggatgcgctgtatgaataagcatcaatctcctgatcatactgttttttcagttctgctgaagagctgaaaatattcgcaaggcgaagtcctgctacattaaaggtttttccaagagatgtgcacaccagatgcggtgcatcacttgccagcgcaaacggtgtgtgaacatatcctgcatatacaagatcactgtggatttcatccgcgatcacaaggacattgttctttttacagatctcaccgacacgggcaagctcctcttttgtccagactcttcccaccggattatgtgggctgcataaaatcataatcttcgcatccggatctgctgcctgttcttcaagcagtgggaaatccatctcatatagtccatcattacagatcaggccattgttcaccattactcttcctgttttcttgatcagttctgcaaatggatcgtatacaggttgctgaataataactttatctcccggattactgaatgcacggattgcaacattgatcgcactgacaacggtcggcatcatggaaacaaggtccgtatggatcttcattccaaatcgcttatcaaaccaccaggttaatgcatcataatactcttgcttataagagcaataaccaaaaatctctttatcggctctttctttgatggctcttacgatgcactccgggcatgcaaaatccatgtctgcgatccacatcgggatctcattttccgaaacttctatcggaagatacccctttaatccttccgggcgccatttcacatcacttgtacttctacgatcgacctcacggttaaaatctacgctcatcttcattttcctcttatctttttactgcaattgcctcaatctcaactttcgcattttttggtaaagctgctacttcaaatgctgcacgtgctggaaatggttctgcaaaaaattctgcataaacctgattcatttccgcaaattctgcgatatcagcaagaagtactgttgtctttgtcacatctgccatcgtcataccattctctgctaaaattgcctgcacatttttcagggactgacgtgtctggcttgcaatgtcgttacctgcaaactctcctgttgcaggatcgattgggagctgtcctgatacaaatgcgatgttttcagctgaaatcccctgtgaatatggaccaattgctgccggtgcctgctctgttttgatttctttgtttgccatacttttttctccttaaatgaaatattttttatcttaataaaagcatactcgttttagaaactaaagtcaatatattttagagtctaaagtgtagaaaaaaaacactactttttgtgcaatgtgtttacatatatgaaattattttttaactattcggatacttattgatcatacgctcgatcagctcaaccgattccttgattccgtaacttgcactgtcaatacacagatcatagttgaccgcatcaccccattttttaccggtgtatgcatgataataacgttcatggcgtttatctaacttctttaacaggtgttccgcttgcttgtagtttaagctgtttatttccatcatacggcgtacactctgatcaaacgatgctgtgatgaaaatactgatatgtgggatatgatgattcgtgagtacaacgtccgcacatcttcccataacaataaagtcctcgtgttttgccatatcacagattagatcactctggttaaagaaaatggcatcctgaaccggaagtccatgatatttcttaaaatctttgaaaaatctgcctgctccggtatctttttcaaatttccccatcatctcttccacatagttaatttgatattaacaacctgatgaaaagagaatttttatgaatcacaatatacagacattcaaaacaaaccaacatccggtctatactttcagccggaaagttttcaccgaaggaatgcgggacggatttccgatcgcactcggttattttgcggtatccttttctcttggaatcgccacaaggaatgccggtctgaatcctttacagggatttcttgccagcctcctcaataacgcttcagcaggtgaatatgctgcttttacactgatcgcagcaaatgccacttatcttgaagttgcgatcatcacgctaatctccaatgcccgttatcttttgatgagctgtgcacttgcacaacgcttctcggaagacaccccttttatccatcggctttttatcgcctatgatgtgaccgacaagctgtttgggatcacaattgcacgccccggctatctgaacccgttctctttcaagtggaacaaggaccattcttttgacggtgatcctgtcttctgctgctgcgatcctattcccggtcaccccggaaaaagataaaaatgcaactacctaaattgaaacattacatatatttcactctgtcttcactatcgaaaggagtttttttatgacacacaacccttatttttatattgctgtcatggcacttgtatcttacacgacccgtgtgcttcctctgactcttatccgaaaaccgatcaaaaatcaatttatccagtctttcttatattctgttccatatattacgttatccgtcatgacttttcctgcgatcatcgaagcaacacaaagtcctgttgcaggtgctatcgcactcgtttttgggatgatcggtgcatggtttggcgcaagtctgtttcaagtatctgtcggctgctgtacggttgtattgatcctggaattaattcttgtatagaaatgtttttctgtccttttccctgtttttccccgtttttccttgtcattcctattttctcatgatatattacatatatatatcattattattctgatatgcaatcattcaaggaggtaccgcatacatggtacaatattacaatacaggggataaggatagtacgaatctcatcgcctatgccagtgatctttccatgttcgctatgctgttcacagatatgcaaaatggaactcgtgactacggtaatgatcgtccgatcaagtctgtcgaagtcgctatcttatctacgattgaacaaaatccagggattaccgtaagtgatttatcccaaaaacaacatcggacaaaaggaactatttcatccattgtttccaacctagaaaaaggtggctacatttaccgcgaaaagcgtcccggtaatgcaaaagtagtgcatctatacactactccggacggtgaacgtctgaataccctttatatcgcttttgtcacaaaaaaaacagcagagatacagtcagaactattaaaggtctgctctatcagtgaaatgaattctttttgtaaagtcttacatgaatatgttaaattattgtcaaaagcttttgatgaagaatcctagcagagagatatttaaaaacacaaggtttttatatctctcttttttctccccaaaaacaggaagttttttctgacatttatttaccaaatcagagtagggtgtcaaaacgtttgcatttaagtttacaaaacaaacattttgaccctccatatccgaatcatgaaaaaagacagcgtatccaatttggggacactctgtcttttttattcaacgtatcaacgcttgaattattctttcaacacactaatctttttcttattaattaagcttctttgccgtttgctgcgcggaattttacgattcttctatcggaaataaatgcacaaacaagaccaattaccatagccaaaatacagcttaagaagatctttttgtatccacctacaggatcagcttccagccatttaccacataatgatgtgtagaatgtatccggaatgaatccgattaaggatgagataccgataacactaccaacgatgttcttaggtgttccttcctcatctactgttgcgtaatacagagcacggaatacatagatcatcataagagcaactgtcattacaacaagcattggccacataactgctgtagatgctggtaagatttccataacaatatataaacctgctccaacaacaccggctacgatcataggttttgtggaacgttttaatttagttgctaaaataccagctgcagatgcagcgattaactgtgtaacgatcttgctgtagtttgaatataaaacaccgatttttaccggtaatccacaaatgttctgtaagtatggtgcaaaataagttgtagatgcaagacacatagatccacagaagatcatacctgctaacagatatgtgattggacatttaaatgcaacacccatagctttgatactgtcaagtaatgtatcgtttgttgcagcttcagtattctttggctttggcattaagaatgctaaaagaacaccgattacgatcataacaattgagataagtaatacattgattctcatagcttttgtgctatctgctgcgtttgctgcataaatggatgtaaagataatagtaagaaccagacctgaaacaccacgtcctgcttccaggcttccgaacataccgccctgttctccatcctcagcgagcatgttgacacattttacagaagaagaccagaatgtaagtacggttgttactgcaaataatatatggatcagtaacaggattgtgtagcttgggaatgttgcttcccagagaccaagaacacctgttgaaaccatggaaaatacaagtaacttcttgcagtcaaatttatctgctacccatccacctggcaggtataaaataacgtttgcaataccatatacgtttaataatctaccatagtcagcatctcttccaataagacccatagcctcctgtaatggtgtatagtatgtatacatcaggtatggcaacatataaatggtattcattgccaggatcataagaatcagagtaactactttactgctttttgatttttgtgtcataacgtttcccctccacgttttctctatcattattttatatgattccgttatatggcagcgcccagccgaataaaaggaagagtgtcactgcaattcctgctgcgatcagaagatatccaaatactttgtcgatcttgtaatcttttattaccttttcagactccggtaatatcagaagtttttcccgatatgctttttcctcctctgtcaccggatgtaattttgatccgagtatcgcaaaaaagaggctcaggtaaattccaataaagaatgggtctaaaaagttaataaatacagttgcaaataatcctacatgaaatccaaccagacattttgtaacaatgaatccaacaaatccggcgatcatagaccatctcgctccggtagcggaaagctttttacttaccacacttccgatggcggaaacgccccagcttgctgcgatgatcgtagatgcaaaataagtaacgatgcggacacttccgattcctgtatatgctaacagtaaggaaatcgcaccgaggatcagcattatcactctgctgacaaataactgctgcttttcacttttaaattccacaaaaacaatatccgatgtaatagaaaatccaatgaccgacaggaatgtggatgcagaagataatcctgctgccataatgccggcaagcatcaatgttccgacaagcttcggcattacatgaaatgctgcccagatcagaactctctgcggatcttccattccagggttaagattcagtacggtcacagactgcagattcaaatacatcaggaaaatcaccgtacatgccgctgcgatcgcacctgcgcggaatgtaacatgctcgctctttgccatcatgttacgtcctgcctgccaaggcgataccgacactgtaataaaccagataattcccatcgtcactgcatacatcactgcaccaaaaacatctgttgccccggctcctggaatattgccatgataatccaaaaggttctccggaatgtttggattattcatgagattctccagcagatgaccaattccaccctgtgccttgaaaacataaggaccggcaatgatcgtcgctattaaaaataccatgaacatcatcgtatccgtaagaataactcctttcgaaccggaataaaaagtaaaagcggtaaaacaaaaccatgccaggaagagacagagctcataagaaagccctgtcagttcctgcattaaaattccaactccggtgatacatgagagcaaatacgctgtgagggaaactgctgtaataattccggcaactctccggtttttcagatcgcagtaacgcgctccgaaatattccggcattgttgtacattctgaccgccttaaatatcgtccgaacataagtggtccggcaatataacccattgcacacatggaatttagcaataccagtgttgtaatgttgccggaatagcaccatccctggtctcccatgaacccgtttaccgaaagcatcgatgcaaacagggttccggcgatcaaaatcgtcggggcatttcttccactgacataatagtcatttacgtcctttacagaacgacctgcccagattccaaccactatgtaaaccagtatgctgacaaccactcctataaagaatatattcatgcaacatcctccttatcttttctaacctttttttcctctttcccaaggacgaaaatcataaggattcctgaagcgatcagacagcctccaactacagctgaaaatagtatttctcccatcgtatcatcctccatttctgtctccagaaactatttcagcaaatttcctgcaattaccatcttctggatctcagaagtgccttcatagatttctgtgatcttagcgtcacgcatcattctttctactggataatctcttgtatatccatatccaccgaataactgtactgctctccaggtaacttctcttgctgtttcagaagcgaataatttagccatagcagctttgtcagagtatggttcgccgttatcttttgcacaagcagcgctatatacaaggtatctagcagcttctactcttgtcttcatatcagcaagtgtgaattttgtattctggaatgctgcgataggacgtccaaactgttctcttgtcttaacatattctacagctgcgtctaatgcgccttcagcaataccaagtgcctgtgcagcgataccgatacgtccgccatcaagagttgccatagcaatcttgaatcctttgttaacttctcccaaaaggttttccttcggaacttttacgttttcgaaaatcagctcgcatgtagaagatccacggatacccattttcttctcatgacttccaaagctgaatccttcccatcctttttctacgatgaaagcactgattcctttgtttccaagttctttgtttgtcattgcaaatacaacgtaaacatcagcaacttcaccgtttgtgatgaagatcttgcttccgtttaataagtagtgatcgcctttgtcttctgcaactgttctctgtccagcagcgtcagatccagcgcccggctcagtaagaccgaaagcaccaagtttttcaccagatgcaagatctggaaggtatttctgtttctgttcttctgttccgaatgcttcgattggccagcagcataaagatgtatgagctgaaattgtaacacctgtgcttgcgcatgctttagaaacttcttctactgcaagaacgtaagacatattgtctgcacctgctccgccgtactcttcagcgaccgggattccgagaagtcctgtttctccaagctgtggaatcagttcttccgggaagcgctcctgctcatctaactctgcagcgattggtttgacaaactgctctgtaaattcaacgaacatgtctttcattaactgctggtcttcatttaatttaaattccatagtgttttacctctcttctcttacttttttaatcaaaaaacctctggctacttcttataaccctttgtattttctgatcttttctgtcagaattggcagaactactttcaggtctccaacaagaccgtaatcagccacattgaaaattggtgcatctggatctttgttgattgcaatgatcacgtcagagctgctcataccggcaagatgctgaattgctccggaaattccgcaggcaatgtagatctttggtccaactgttttaccagtctggcctacctggtgtgcatgtgggatccatcctgcatcaacagctgctctggatgctcctactgtagcacctaatacttctgcaagctctcttacaggtgcaaaaccttctggtccgcctactccacgtccaccggaaacgatgatttctgcgttttccagatcaacgagttcccctgccatctcattgatcacttcgagtaactctacacgtttttctgcatctgtgatctcaactttttctttgatcaccggaatgtcttttacttcacctggttcactcttcttgaatacgccaggtctgactgttccaagctgtggtctgtggtcaggacacataattgttgccatcaggtttccaccgaatgcaggtcttgtccatgccatgttgcctgtctcatcatcaatatctaatgctgtacagtctgctgttaaaccagttccaagtctgcaggaaatacgaggtccgatgtctcttccgttatttgtagcaccgatcagcattacggatggtccgtatttttcgatcagttcgcaaagaacttttgcataagcatctgtgttatagtgctttaattcaggctgatccacaacgattgcttcgtcagcgccgtgtgcttttacagcttcgagtgctggtgcaacattgcttcctaaaattactgcaacaagttttccgttctgtttatctgcaagtcttctacctggaacgagtaactcaagtcctacgcttttcgcagtaccttcatcctctgtttcgataaagacccaaagatcctttgtcttttctaccgccatctcttttcacctccttaaaatactttatcttcgcagagaatggcaaataatttttctgcgccttcttctgatgtcggttcattgatcttcacacctgaagtttttacttctggggtaaatgttttcttaacctttgttggagaaccttttaatccgattctctcattatccataccagcttctaagtctgcataggcgagaacattgatctctgctttctttgcagccatcttggatttgatggtagggaatctaggatcgaaggatggttttgttacggtgatcagacatgggtaagaaactgcaaccttctcaaatccggcttctacttctttcttgatcacaagtctgtcttcctcagcttctgcttcgatcgcatatgttacctgtggaagtccgatgtgctcagcgatttcaggtccaacctgtgctgtatcaccatcaattgcctgttttccacagaagatgatgtcgaattttccttctaattcttctaatttcttaattgcgcaggaaagaatgtaacttgttgcaagtgtatcacttcctccaaattctcttccgctgacaaggtatgctttgtctccgcctacagcaagacactctcttaaagcgttctctgcctgtggtggtcccatagatactaatgtaatcttcgtacctggttctttatctttgattcttgctgcgagttccaatgcgtatgcatcaaatggattgacaatacttggtactccttcgcgaatcagtgttttctttaccggatcgatacggatttctgtcgtatccggtacctgcttaatgcagacaagaatattcttcattgcaaatatcctccattcctctctctttatttatatttctttaatacctgacggcttgcaataactgtctgaatctcacctgttccaccggaaatacgtgtgattcttaagtctctataaatacggcttacgcggcttccgcagtatccgattccgcccattacctggagtgcatggtcagcgatatcatttgcagattcagaacagaactgttttgcaatagatgcctctgctcttgtcaggcagttgttatctttgttccatgcgtagtgaagaagcatatttctcatagcttcgatcttcatggtcatttccatgatatggttctggatcagctgtaaacgtccgatctcctgaccttttacgattctctggtttgcgtatctgcatgcatcttcgtatgcacataatgcctgtccatatgcgttgaatgcatcgatcagacgctcgtaatcaaaacctttggatgttgccattaatccgtttccttcgaagctgaacatatcgctttcttcgatctcaacatcatcaaaccagatgtcgtttacgttttccatgtttaatcccattttttccattggctctttcttgcagcctggaacgtttgtaggaacaaaccataatgtaagctgttctggattctcgctgtttttagcaagtgtcagacagtaatcattgtcctgtgctccggaaatgaaatgtttgtgtccattgatgtatacttttccgttacgacgtgtataagttgtaaggattgtattgctggataattcagtacctgcagttggttctgagaatccctgtgcgaatgctccgtttcctttgaagaataaaggcatgaatttatcgatctgctcttttgttccattctctaaaagtgcatcagcttttacatgatcccagaaaaggtagattggtgcgccacagcgtcctaaagcttccattacgaggaacattgtaactgcgccttcgccgccacctggttctccgtcttctccttcagcttcttctggtaagaacatactaaagcatccgagctcttttaagatttcccaccatttctctggatgtgtgtggtttttgtcacagtcctggaagtaaggctcaagattttctcttgtcatagcctcttcgattgcctgtaccattaattcctgttcttctgtaattctgaaatccatattatttcctccattatttttcttaattatattttacatggtttcttttttcattccatgccaaacacttgttattatctgcctttccagtccggtttgcgtttctctaagaacgcttttggtccttctactgcatcttctgttttctcgatgtaatcccagcagcgattgcaatatctctgtgcatcttcgaaagagcactgtgttgctacatggaaaatctctttgctgagttttaatgagatcggtgcgtttgcagcgatgatctctgctaattccattgctttgtccataacctgttctcttggaacaacatagttaacaagacctacctcgtaagcacgctgtgcatcgatcagttttcctgtcagaaccatctcagatgcgatcttcttaggaatgatgtttggtaaacggatcagtcctccgcttgttgccaggaatccgacttttacttcagaaagtccgaatcttgcattctcagatgcaacgataatgtcacatgcaagtgcgatctcaagacctcctgctactgcagttccgtttgctgcacagatgatcggttttgcggaaagacgttctgtgattcctgcaaatccatgtgccataattgtctgacaggttccgttttcatcataagctgctaaatcttctccggaacagaagcttctgtcgcctgttcctgtgataatgatcgcgccaacttccggattctgttcagcatcgtttaagatctgttccatcattgcggatgtttccgggtcgattgcattgcggcgctcttcacggttgattgttacgatcaatacgccatttttcagttcagtaagtactttctttgtttcccccataattgtcacctcattttttctatcatttacagctatctgcacatcttcagatagctgttatgtgctctttcccacttcaatgtggttgtgtcgccatgtccgggacatagggtaatgtcctctatggcaagattattaatttttctcaggctctgcatcatctggcgctcatttccaccttcaaagtccgttcttccgatacttccctggaaaatcgtatctccggtaaagattgcatcctttgtcagaaacagaacggatcccggcgtatgtcccggtgtttccatcacagtgatctctgttcctgcgatcaccagctcctgtccatcttcgatcgtcttcacattcttaaatgccctgactgtcgggaactgctgtcccatatcatactccgtaagactctccggaatatcctttgcattgcaatacaccggaatctctttccatcgttcctgcagcttcggtaccgcaagaatatgatcgtaatgaccatgtgtcagaagaattgcttccggacagatctgcttttcctccaggatggagatcagctttttcggattatctgcaggatcaacgagaaatcctcttcccggttcctgtccttctgcaatataacagtttgtgataaatgcccctaccgggactctgattatctgcatctttcctcctacgcaaaacctgtattctatctgtgatccaagattaaatcatgctgcttccgacaacaccgtctgcaaagagctggtcaatcttttcttcgctgtatccaagtcctgcaagaatctctctgctgtcttcgccaagaagtggtgctcctctccagatcgggcataactcgtcgttgaaccggatcggattgttatagaatctcatctgtccaatcttttcctgatcaacaagtgttgtcgtctctgttgaatttgcatgttctgaagtatatgcttcaataaaaggaagtacttcagatgccggtaccccggcttctgtcaggcgtttttctatctcgctccgtttataagtaacggttactttttcaagttcttctaccaggctgtccctgtttgcgattcttgccgcgttatctgcaaatcttggatcgtcttttaagtgtccggcatctaatgcatcacacatctttgcccagcgttcctcgctgtctgcaatgataactgcccagccgtctcttgcttcgaaaattccgtatggtgcggtgaagcggtcatgattaccgaatcttgactgtgtataagttccttttccgtaatcgacaacagtctcaccacaggagatcattaccgtatccatcataccgatatcaactctgcatccctctcctgtcttacgtgcctggatcaggccgatcagcgctgcgtttaatgcgtgtgttccggttaaggtatcacaatttgcatttcctgctttcattggtgcaccgtccggttctccgttgcttcctgcaaatccgccgcgggctgctgcgattgcatcataacatggatattttttcagaggtcctgtcgctccgaatccgctcagtgatacgaacacgatctttggattgatctttttcagttcttcgtatccaagtcccagtctgtcaatggaaccgctcttgaagttttcaagtacgacatctgcttcctttaccatatcgtagatgacctgtttgccttcctgagaagacagatccagctcaatgctctgcttattcttattatatgctgtataaagagtacttaatccgtttacgaatggatcccatgttcttgcctggtcgccgctgccgtagcgctctactttccagacttcagctcccatatctgcaaactgccatgccacatatacacctgcaagtgcaatcgtaaaatcaagcacttttacatctttcaatggtccctttctgttctctgttcccatagcctttgactctccttattctacaccgtattctgtcagaactgcctgcgtatctgcaccaagcacatgaccaggttctatgttatcaagatcatccgcaccggagaacttcgccggaattccgatctgtgtctctccgcctaccgtgatcatcattccacggtctgcaacctgttcatccttcatcagctcttctactgtattgcaaggtccgccaggtaccattgccctgcggcagatctgatctgcttcatcaattgagatcgttgcaaaatagtcttttaactgctggtcaagttctccgaagtaatgcttcatggaacgatccgggtcgtgtgcatatacgcttccctctccccagtcatccctgccggcctctcttgcaaagtcaagccactgtttatcgcttccgatacttaaagcgaaccagccgtccttacagtggaatgtgtcagtcgggttcgttgtcgggaatccgttgccgagacgtctaggtaacacattcagtccctgcatacattctgcaaaagtatcatcaagctccatcatcgtatgccatgagcttacggaaactttactgccctcgccgctctcttctgctttcagatatgcagccatcattccggctgtgagatgccagcttgcataaatgtaagccagtgggaaaccaaactttgtcggtctctccggaaaaccggtcttctcaagcagtccgcattttgccataacgatcaggtcatagtcaggacaatctttccatggtccttctttaccaaatggtgttaacactccgtaaataagcttcggattcactgcttttaagttctcgtaccccaatccgagtctttccatataatcttcctgtttatttaccgctaccatatcacattttgctgcaagctttcttacgatctcctgaccgtctgctgttgtgtaatcaattgcaatactcttcttgccgcgcagatagtactgtgcatatggtccttcttcctccggtgttcctccccggcgccggatatcatcgccgccctgtggcttttccaccttaagtactgttgccccgtaatctgcaaacacgcttccgatatacgggtttccctcagtgagatccaataccgatactgcttccaaaggtttcatgataacctcctcctgttttgtttgacgtccgaacaattcattttcgtttcaaacatttcgttttatttttatcatacttctattatttcgttattttgaataaattgcaagcttttttttatttttttt

SEQ ID NO: 11630 - DNA, 27738 bp, Unknown
  gut microbiota DNA sequence
ttgtttttttaccatacaatttttaaacaattcaagacaatttgagacgacgcatggtattgtatcttctatttctatgattgaaacagtttaaaacaccacaaaaaataattttaggagcaggtgagcaaatgaaaattattacatgttgtaaagtagtaccggatgaagaacagatcaaagttcttcctaacagagagctggctcttgatgatgtaccagcaaaaatcagtcagtatgacttaaacgcccttgaagcagcaaagaagctttctgcagagacaaagggttccgttaccgcattaagcgttggttcttccaaagctcttgatgcaacaaagatccgtaaagatatcctttcccgtggtgcaaatgatttaaaacttgtgatcagcgacgatcacagcttctctgattcttttgaaacagcaaaagctcttgcagcagcaatccgtgagcaggaagaagttgacctcgttctttgcggaaccggttcttccgatctctacaatcaggtaacaggtatccagcttggtacattacttgactggccaaccttaaacaacgtaacttccatccagccaaacggtgataccgttcttgttgagcgtactcttgagaacagcactgaagtttttgaagtagcacttccagcagttctttccgtttcatctgagatcaacgttccgactgttccagctatgcgtgatatcatgcaggcaggtaaaaaaccggttgcagttcttactacagatcttgcagatttaaacgcttctgcatctactcttgagcagcttgctccagaacagcaggagagacgtcaggaaattatcgaaggagacaacgaagaagcagtagacgctttagttgctttccttaagaaagaagctttataggcttaaaggaggattttagatatgcaatcttatgtaattagtgaaaataatgctttattatccgaactctgtgccggagcaagaaacgttgcttccgatgttacagctgttgttttcggtgatggtgcagctgcagctgagtgtggagcagaccacattcttacatgtccattagaagaatccggttctccggaagattttgcaaaagctatcgcagaagagattttaaaatctgatgctgcctgcgttcttgttggaaatacaatccttggacgtgctcttgcaggaaaactcagtgtttacttaaacacagcagtgttcgcaaccatctcttctcttacttctgaagacggtaaaccatgcttcgagcgtactgtattcggtggaacagctgttaacaaacaggtgattgaaacagcttacagtgtattcactgtaaacagcggaatcttcgcagcagcagaaggaacaggtgcctgcacagacatcgctccaatcgccggtgctgcatccgcaagcttaaaacgtgtttctaaagatgagaaacgtgaaacagctgtaaaccttgttgctgcaaaacgtatcgtcgatgtcggccgtggacttgctgcacaggaagatcttgctatgtgtgagaagctggcttctgctatcgatggtgaagttggatgttcccgtccaatcgctgagaacaacaaatggttaccaaaatcttcctacatgggaatcacaggtgttcaggttaagccagatcttatcatctgtactggtgtatccggacaggttcagcatatcggtggtatcaacaaatccaaagtgatcgttgctatcaataaagataagtccgcacctattttcaaaaactgtgactttggacttgttggagatatgtataagatcatcccacttttaacggaaaaattatcctaatgaaaggcagaaatcatgactgatattgcaggtaaccgcactctttcctctcaatggaatgagactgtacaattttatggtaatcagaattttctggaatatatttcagttgatgaccagcttaccagctacacttattctgaatttcactaccgtgttattcagacagcaaactggtttcattcgctaggaatccgtaaaggcgaactggtggcacttcatctgcacaattcaccagaatatctgatgtgctggcttgcacttgcgcagatcggcgctgtatccgttccgctgaatgagcactatcgcctgcaggaaagcaaattcgtccttcagaaatgtgatatccatcgcattatcgttgagccgtcttcccttcctatttatcagtccaataaagaagatttactactctctaccattattttagcctggggagaatgtccggatccggacattctctctctttcagcaagtagtttttttgacggcagccgactggacgaatcctgcgagattcttccggaggatactgccgtcatcctatttacctctggaacaacgcagtacccgaaaggcgtgatctatacgcactgcaatgtcgtatatggtggtattatccatatgcagcagattggcatgtgccccggagaccgttttctttcgtgtatgccatgttaccatatggattttcaggaaatggctgctatgtccgtcattgttgccggcggtacactgatcatggtagagcattacagcgcacataaattctggaaacagatctgtgatacaaaagcaaactttacagataccatgtccattatgaaccggacactgatgctgcagcctgtacaaccatgggagcaggatcattgtctgaaacaggtctatttttctatgggattaagcacagaagaaaaagatgaattcgaacgtcgattccacgttcagcttctgaactcctatggaatgacagaaacgatttctgccgttacctgttctccgatctccggtgataaaaactggccttctgtagggcgcgctgctttatcttatgatatcaagatcatcgactgtgacggaaaggaagttgccccgggtaaaaccggtgagatctgtgtccacggtattccgggtcgttctcttacaccaggatattacaatgacccaggtgcgacagaatgtcttctggacaaagatggatggcttcattccggtgacagaggatatatagacgaagccggctggctcttctttatcgatcgttggggaaatatgatcaaacgatccggcgaaaatatcagcagcctggaagtagaatgtgttctcacttcccacccaaaaattgctgatgctgccgtaatcggcattccggatccaatccgcaaccaggcagtaaaagcatttattcagtttgccgatggagaaagcctgacgattgcagaattagaacagtattgcagtgaccggctttccaaatttaaggttcctactttctggcagtttgtagatgactttccgcgaacagctaccggaaagattaagaaaaaagagctaaaataatgtattcacaaacgtaaaaacgtaaggaggcctattagatgaagtatgattttacaagtattttaaaccgcgacggcatggatgcaattgcagtaaatccgcctatgaatgccagctggatctcatttgcaccgatcaaagaaggctttgatctgatcccgatgtgggtagcagacatgaacttcccaacagtaccaacgatacaggacgctattatcgagcgcacgaagcaccctgctttcggatatttccgcccacgtcctgaatattttgaatccattatcaactggcataagttaagaaacggtgtaaccgggttatctgaggaacatatcggatatgaaaacggtgttctcggcggcgtgatcagcgcattaagtgttttatgctcgaagggtgattctgttttatttcattctcctacatacattggttttacagccagtctgacaaataatggctacaatatggtcctgagtccacttgtacgcgatgaaaatggggtttggcgtatggactatgaagacatggagcgtaagatcaaagaaaatcatatccatgctgctgttttctgtaccccgcataacccaaccggtcgtgtatgggagcgttgggaaatagaaagagcaatggaactcttccaaaaatatgatgtatttgttatttctgatgaaatctggtctgaccttatcttaaatggccacaagcatattccaacacagtctgtgtctgaagatgcaaaaaaccgtaccattgcattatatgcaccatctaagacattcaaccttgccggtctgatcggttcttatcatattatttataattcatggctgaaggatcgcatcgacaaagaatcttccctctgccattacaacgacatgaatgtcttatccatgcacgcattgatcggtgcttataagccggaaggtcatgaatgggtagacgaattatgcgaagtattaacagaaaatgtcaatatcgcatatgacttcttcagcaacattgatggtattgatactgcaaaaccagaaggtacttatatgcttttccttgactgtaaaggctggtgtactgcacacaaccagacattagaagacctttacaaaaaaggacagtctgtcggtgtctactggcaggatggacgaccattccataatgagtatggaatccgtgtaaaccttgctcttccaaagagccgtgttgaagaagcattaaatcgactcagaaactatgttttctgtgactaaagctttttcctatataatatatatttaccatattctttcgctgcagccgggttcctccccggctgtaaattttatccaaaaaagcagaatgtttgcaaatcaaacattctgctttttatttcttatcaaaaatccctacgccaaatttccccagtcctctattcatagttctttaaaacattccgtataactatttcatctctacatcagcattttcaaaaagaaagagccgctgtataaatacagtgaccccctcttggaatgaatatcgatttatgtatgtagattaatttcttggatctaaaccgcagttgtgagcgaagaaatgagctcctctgcgtaatgcatcttctgcgtcatccataactttgctgtagtggataaatgcgtgaagagcacctttgtactcatggtattcagcctggattccgttgtttgtaagaatctcataaagtaacttactgtcatctctcagtggatcaagttctgccgaaacgatgaagcaaggtggaacatcatgtgtaaggtcattgataaatgtatcaaagtatggacaatctataggatctacgccttcgccaaggtaaatttccaagtagaatgcaaggtcttcctcgctcattccatcccagcttccaccgtgaaggttgctgctgacactggctttcataccataagatccgtagaataaaatgttacctttgattctagagatatcaaatccatcatcacgtaagtgcattgtaacgcccatagaaaggtttgctccgccggaatctcctgcgaatccaaatttttctggatcaatgccgtactcttctgcatgctctaatacatatttacaagctgtagtacattcctcaatcgcacgaggataaactacttctggtgataaagtatattcaatacctacaacaacacatccggaataagctgcaagctttctctgtaccagattgtgtgtatcgttatcacctaatacaaatccgccaccatgcataaagaagataactggaagcttctcagcttttactgggcgaagtaaacgtgctggaactttatcctcaccaaaaggaatctcaaagtcgattgtctctgccatttctggcccgccgctgttccacatctttctctcttcgcggtatgctgcacgcatctcctcgtaagttcctgcctgagtatcgaatgctgctgcatattctgcctgcatctcaagtactcttgcctgctgccagttcacctctggtgtagctggtttgttttttggattaattgttactctaaattcccccatcgtgtaacttcctttctctttacataaaaatttttacacacttttcaacatacaaccttttgacaaatacagcacaaatcccccccgattttccatctgcatttgtatcttttgtacatttcttatatccttattataagctcattatgttcagttgtcaaacaaatatcgctattttttgtatgtttttctaaattctcatctatcttttgttttaccgtcaaacaacccgtcttttttcatgaaatgcatcactttttgtacctcggactattttttccacatttttcaatcttttttcatccaaatccgttgccttcattcgtcttttttatcaaaaaaataaaaacaatatccttcctattttgatacccgaatcctataaaataatgaaaactatattttatgtaaaaatgatgtctggctttgatacggatgtgtttcacgccatcctcatcagagtaaagattaaagttttctatcactgtattcttgacattaagaacattcttgcataatgtattagcagaaaccatttgcgttatccttttttctatttgcttggtcgctaatacattaaaggaaaccaaatggttttttcaatatgtaaatgtaaatttatggtgtttacatacttacatactgcaacacactcttctatcgcaaccggataccttacttccggtaccaaaaaataatcgataccaattacaacacatccggaataagccgcaagttttctctgtaccagaccatgtgtatcattgtcaccttctacaaatcctccaccatgcataaagaaaataaccggcagtttctctgcctttaccggacgaagtaaacgtaccggaaccgtatatccttcataagggatctgatattcgatcgtttcttccatttcaggaccaccgctgttccacatctttctctcttcgccgtacgctgcacacatttcatcgtagcttccagtctgagtatcaaatgcatctgcgtactctgcctgcatctcaagtactcttgcctgctgccaacctactgccggtgcagccggtttgttgataggattcattgataatttaattcccccattttgcagctcctttatccgtgtgcattctttttaacaaatacagcacaaattccccgatcaaacatctgtatttgtattttcagcacactcccgacacctttattatagtacattatgtttaatcgttaaacaaatatcagtctattctacttgtttttatattttttcactaaatttatttttatttttgtttgatagcaaaatggctcaaaattattcaaaaaaaatcgtttgttttgcaatattttttctgtaaattcatgtgaaacaaagcggacaagtccgcttcaagattcctgaatcccttaatctttgaggtacttgttacgctttgcgcgccagatgcattctgctttagcagacatattccacatgcatctggtcgcatcctcgcggagcgttttttgctttattggaacattacagagtaaatttcctataaagcaaaaagaggctatcatattctctaatatgatagccttccgtctagcgtagtaccctgcaattgcaattaccacgtaatcatttattcatttcttggatctaatccacagttatgtgcaaagaagtgagctcctctgcgtaatgcatcttctgcgtcatccattactttgctgtagtggataaatgcatgaagagctcctttatattcatgatattcagcctgaattccattatttgtaagaatctcataaagtaacttactgtcatctcttaatggatcaagctctgctgcaacaaggaaacacggtgggacatcatgtgtaagatcatttgcataaatgtggaaataaggacaatcaaaacggtttacatcaggagcaatataacaagatggtgaagataaatcagcttcactcattccatcccactttccgccatgctgatagctactaatactactcattaagccatatccaccatagtataagatattacctttaatcttggacacatcaaagccttcatctcttaaacacatgcagactcccatcgccatatttgctccgccggaatctcctgcaaatccaattttctccgggtcaattccatattcatccgcatgctctgatacataatggcatactgcaacacattctttgatcgcacgaggatatttaatttccggcgcaagggaatagtcaataccaatcacaacacatcctgaataagctgcaagctttctctgtgccatactgtgtgtatcattatttccttctacaaatccaccaccgtgcataaagaagataaccggaagtttctctgctttcaccggacgaagtaaacgtaccggtactttatctccttcatacggcacatcaaagtcaactgtctctgccatcacaggaccgccagtgttccacatctttctttcttcattgtatgctgcgcgcatctcttcgatcgtgtttaccagcgatgtatcaaatgcagctgcatactcttcctgcatttctaatactcgtgcctgctgccagttcactgccggtactgccggtctgttctttggattgatttgcagtttaatttctcccattttgtaactcctttctccatgtgacttattttgacaaatccgtcacaatacctcaacattgctcatctgtttttgtatcttttatacacttctgatactttatattataaagtattttttcactatgtcaaataagtatttgcattttttctatttttttactgacaaagtcaactccggtacctgactctatctaaataaataaagctggtatcaagcactccattatacttttttcggataccaataatattgtatgtttctctattttatatctgaagaaatttcataattcatagaccttgattttgctgatgttgcggagcatataaaaaacaacttacctcgatccgatatatattttgacaataaatatccacatccaaaggagataagttgcaaaatatgtatcgtcaacaatcgttaattaagaccagttctatgaatggattatatctatcgtgaattcaccttggatttcttcaagatggatcttaattctctgcctaaaaatgcatcctctcttaaattttccaagttcaattctaatgtaatggggctttgtttaaccatgcacgtaaatcttggaatgtctcttcgtaagacctaatatgccttaaaagaactttacaacattgacatatcccaccaacaggtagctaacttctgtaagacagttgctgtctgcatcaaaccattcgtagacaactacgattacaatgcaagaaaaatctttactgccgatgaaacctacataaaaatccgtggaattaaagcatacatctggtttattatggatgctgccagtcgttccctttcttggataccgcatatctacggagcgcgacgttggtgcatgcattctttcgatgcgtatggctttcaaacacgtctccaagcttcctgaaaatttcaaatttatcgctaatggttacagcgcatatcctcttgccgcccaacagttttatcgtgagttcaaagaagattttaaatttgatatcaccaggattatcggtcttacaaacggcgatgaagtttctaaagaataccgccctttcaagcagatgatagcgcgacttaatcgcacttataaagctctctatcgtccaaccaacggttttgacaacgtagacggagccaactatgatctagcgctttgggttgcttactataacttccttcgccctcacaaacacaataaatacaaggttcttaatgatgttgagatgctacatggtgcttcaaacatgcctggaaaatggcaacttctaatctttctcggtcaacaaacaatcctgaacttacaaaacggcgaagccgctaactgttcttagattaagagccaaaggtaataacccagccatcagaaccacaggttctgacaagacatttatgcctttgcccttgatggcacgaaaaagaactgctacactgctgtaatcgacataagaaaacaactgttcttaagttcttcgccgtcggtaatcgacctacagcggttctttttcgtgctgtcaagggtggcggcaagctgccactacctataatatctacagttttcaaagttcatctgagcctttttctttaactcggttttttcattggtcatttgacactatcgcaagccacaggtctacagcaggatttttgctctgtgggacccgaaaatcgccgatttacgggtcccacggaacaattttagctccctgtgcccaaaaacttcgttttttgctgctttcttcccgcttttatcggcattttcgggtcccagacggctattttgtctctgtagacccgtgcatactcccggacatctcattgttcctgacaagacagcaaaaaaacaaatacagctttcctgacaaggcactaaaaacaggactcctaacaacacaacaaaaaacaaatacagctttcctgacaaggcaaaaaacggtccatgacatgcgtcacagaccgtttctgttacattttctagttctcattcatcttcgcaagcttcgccgcctggtccgccgcgatacatgcatcgatgatctcctggatgtctccgttcatgatcttatccagcttgtacagggtaagattgattctgtgatccgtcacacgtccctgtgggaagttgtaggtacggatcttctcggaacggtcaccggtaccgatctggctgcggcgcatctcagcctctgcatcatggcgctgctgctgctcaatatcgtagagctttgcctttaaaagagcaaacgcttttgccttattctggatctgtgacttctccgtctggctgtacacgacgataccggacgggtagtgggtcagacgcaccgcagaatcggtcgtgttgacacactgtccaccgtttccggaggcacgcataacgtcgatacggatatccttctcatcaatgacaatatcaatgtcgtcgtccacttccggcattaccgccacactgatcgtggaggtgtggatacgtccgccggactccgtctcaggcacacgctgtacgcggtgcacaccggactcatacttcatcagggagtatgcgccctgaccgttgatcataaaggtcacactcttcataccgccgatgccggtctcgtccgcctcaacaatctcggtcttccagttcttgctctctgcataatgctgatacatacggtaaatctccgcagcgaaaagtgccgcctcgtccccgccggcaccggcacggatctccacgataacattcttatcatcattcggatcttttggaagaagcagaatctttaactcatgctccaactcctccacacgcgccttggcatcgtttaattcttccttcgccagttcacgcatctcctcgtcggactcctcatccagcatagcgagggaatccgcaatattctgcttgcactgcttgtactccttatatgcagcaacaatcggtgccagatcgctctgctccttcatcagcttgcgaaaacgctccggattgttcgcgacatccggctcactgagctcgctcatcaattcttcaaaacgaatcagtaaatcatccaacttatcaaacataacaaacatcctttcttatctcaaacaccagacaaccgtctgcaccaactatgcaaaattctctccaatcccgcaatcaactaaagcattccggtcaccacacggtcttttctcgccagatcctttatcacctgcacatcatggaacccgatctcccgcataagtgcagacaccttttgcccctgatcgtagccgatctcaaacaacagatgtccttccgggttcagatactgcttacactgtccgatgatcttcctgtaaaaatacagaccgtcctccttgccgtccagcgcttccatcggctcaaaatcccgcacctccggcatcagctttgcaatctcatccgtacagatatacggcggattcgagacgatcacatcaaatgtccccgtcacatggtcaaacaggtcgctgtgttcaaacaacaccggcacatcattgagccttgcattttccttcgcaacattgagcgcctgcttggatatgtcaaccgcatacccctccacatccgatacattgtgcagaatactgacaatcacgcatccggacccggtacacagatccagcacacgcattccggggcgcacgaccttcagcgcctcttccaccagagtctctgtatcctgtcttgggatgaggacactggaatttactttgaacttcagtcccatgaattctgtctcacccacaatatactgcagcgggacatgctctgcgcgcttgcgcagcgcaatctggtactcgctcatctgctcttccggcatctcctctgccatatgaagataataaaaactgcggtcgatcttacacaccatttcgagcaaaagccatgcatcggtctttgcctccgcaatatctgccatggacagaactttctcccccagatttactgtctcacgatacgtcatttccaacctccatcatgcctgttcccggatctctttcacataagccttccagtcaaacaccgcctcaacagaagcaattccgacctcaatcatcgaatcatccggctctctggttgtaatccgctgcaacaggagccccggcttgctgaacagattgacaagcatatgatccgagcgtccggcaagccggataaactcgtacgatacccccgcaatcaccggaattgacaccaggcgcagcagaagctgcaggatccggttatccacgcggataaacagaaagaagactatgctgatcagcatgacaatcagcagaaagcttgttccgcagcgcttgtgcagacgggaactcttccgcacattctccaccgtaagatccatcccctgttcaatacagttgatgcatttgtgctctgcgccatgatacatatagacacgcttaatatccggcatcagtgaaattgccgccacatatccgataaagatggtaaggcggatcacgccttccaacaacgcaagaagcgtctgcgatgtgataaaacgctgaaagaatacggatatgtaataaggaagcaccataaaaatcgccaccgcaagcacaatggaaattgccactgtaccgcccatcagcgcattctcctgacgcttttcctttttcttctgctcttcttccgtcggcgccggttttttcgctccggcacgcttctccgctttccgggatccgctcttttcatcctcttcctcctcgaaaaaggacgccgagaacgtcagtgtcttcatccccagtaccagcgattctataaaactgaacacgccacgtaagatcggcatgtttcttattttcttatttttaatcagcccttcgtacgtcgaagtctcgacgacgatctcctggtccggcttgcgcacggctaccgcgtatttttcctgattcttcatcattacgccttccatgaccgcctgaccgccaattcccgaatatctcatagtcaaaaaccctgcttgtggcacacgaaccgtgccgtattctataaggtaaaaaaggttgagattaaacaacctcaaccttatctgtaaccgttttcacttaggagcataacgcttcgcgcgtcatactactgctgctgcataccatacttcttattgaacttatcaatacgtccgcgagcctgagctgctttctgctggcctgtgtagaacggatggcacttggagcagatctcaacgtggatatcttcctttgttgaacctgtaacaaatgtgttaccgcagttacatgtaacagttgcctgatagtaatctggatggattcctgccttcatgattttcacctctttataatcttatcgttattatgttcctgtctgtctctattctcttatgcccgtatgcccgatccgcatatggcacttattgcaaagaatagtcccgaataaacagcgttgttattttatcatggtttttacaaaaaatcaagttctttttatacaatccggttctttttcaccatatggatatattcctgattgttgcgcgtgcgggcaaacatgttcagaatgttctccaccgcctcgtcggtgcgcataccgttgatcgccttgcgcatgatctcgacagcctcctgctcctccggctccagcagcagatcgtcgcgccgtgttcccgacttcacaatgtcgatggcagggaacacacgcttctcggaaagcttgcggtcaagcaccagctccatgttgccggttcccttaaactcctcgaataccacgtcgtccatcttgcttccggtatccaccagcgcggtggcaagaatcgtgaggcttcctccctcacgcatgttcctggctgcaccgaaaaagcgcttcggcatgtgcagcgccgccgggtcaagacctccggataacgtacgtccgcttggcggaaccgtgaggttgtaggctcttgccagtctcgtaatgctgtcaagcaggatcatgacatcctttccgtgctccacaaggcgcttcgcccgctcgatcaccatctcggatacacgcttgtgatgctccggcagctcatcaaacgtagaataaatcacttccacattctccccgacaatcgcttccttgatgtccgtaacctcctccggtctctcatcgatcagcaaaataatcagatgcatatccggatttccctttgtcactgattttgcaatctcttttaataaggtggtcttacctgccttcggctgggatacgatcataccgcgctgtccctttccgatcggcgacaccagatccacaatgcgcattgcaacactgcagcccgggcgctccaagcggattctccggttcgggaaaatcggcgtcagatcctcaaaattcttgcgcttctgcgcgacactcggatgataaccattgactgatgaaacatataacagtgcagaaaacttttcctgctgcgtcttcacacgggtatttcccgccacgatatcgcccgtcttcagattaaacttgcggatctgtgacggcgatacatacacatcgttctccccggggaggtaattctcacagcggataaatccatatccgtccggcatgacctctaagataccgttcgccataattccgctgtccaaattcgagatcgtctcatccgctgcggtgctctctcctttcccctctcttgtctctctcggctcacgcgccggccgctgctgcgcctgctcacgctgcggtgtctgttcccgctgcgcctgctcacgctgcggtgtctgctcacgctgcgatgtctgctcacgctgcttcgtattctcctctttgctctgacgctcgtcctctgcaaccatcagatctaccagatcactctttttcatgccggagatatttttgagtcctctcgcttttgcaagatcacgcaaaacaacggctgacaagctctcatacttttctctcatccattcgctcctgttcttatcaatctgctattttcctctatgctctcaatcgtattgggaatcgtgtctgaactgacaaaatgaatttacaatatgcgtattatacaacactttttccaaaataggaagtcctaatttccttgatttgtcaaaatgataatggtatgatttacgtattggtttctatataaaaatacactttatatacaggagattatattatggagaatcagacaatgacacttgccgagaaggcacttcttatgcacgaaaaatggaacggaaagcttgagaccatcgcaaaatccaaagtaaactcccgcgaagatctcgccatcgcatacacgccaggtgttgccgagccctgcaaggtaatcgccaaagccccggaggctgcttacaaatataccatgaaagccaacaccgtcgccgtcatttccgacggaagtgcagttctcggtctcggcaatatcggcgcatatgccgccatgcctgtcatggagggaaaatgcgttctgtttaaggaattcggcgatgtcaatgccgtgccgatctgtctcgacacccaggacacggaggagatcattgccacgattaagaacattgctcccgcatacggcggcatcaatctggaagatatttccgcaccgcgctgctttgagattgaggaacgcctgaaagaaatgcttgacattccggtcttccatgacgaccagcacggcaccgccatcgtggtacttgccggcattatcaacggtctgcgtgttacaggcaagaaaaaagaggactgccgcgtcgtcgtaaatggtgccggttccgcgggcgttgccatcacaaagcttctgctcacctacggttttcgccatgtcaccatgtgtgaccgcgagggcatcatcggcaaagattacccgaacttaaactggatgcagcagaaaatgaccgaagtcaccaaccttgaggatcagcacggcacgcttgccgacgccttaaagggtgctgatatttttgtgggtgtctccgcaccgaacatcgttaccccggagatggttgcttccatgaatcacgactccatcctgttcgccatggcgaatccggttcctgagatcatgccggatgtggcaaaggctgcgggtgccagaatcgtcggaaccggacgcagtgatttcccgaatcaggtcaacaatgtcgtggcattcccgggcatctttaagggtgctcttgagggacgggcaacacagattaccgaagagatgaagcttgccgccgcagaggcgattgccggtcttgtgtccgatgaggagttaaacgacgaatttatcatgccggaagcttttgatccccgggtagcacaggtggtaagtgaagccgtccgctctcacatcgtgcgttaaccggacgtatcatgaacgacgcgcgttactattccctcaatacttatttacgccagacatttggcgaaaaggtctaccgcctgtctctaaacggcggcatgacctgcccgaaccgcgacggcagcatcgataccagagggtgcatcttctgcagtgccggaggaagtggtgattttgccgcctccccgcagcaatctgtcactgaacagattgcgcaggcaaagcttctccttcgggaaaaaacaaactgccgcaaatatatcgcctattttcaggcatacacgaacacctacgctcccgtcggtgttcttcgtgcgctttacacggaagctctcgcacagcccgacattgtggcgctctccatcgccaccagatgtgactgtctgccgcctgaggttttagatctgctggcagaattaaataccataaaaccagtctgggtggagctcggtttacagaccatccacgaacataccctgcatttgatacgcagcggtttttcactcgcccagtatgagcaggcggtatccgcgcttcacgcgcggggcatcaaggtcataacacatctgatcttaggtctgcccggtgagacaaccgaagatatgcgcgcttccgtgcgctatcttgccgcacatccggtcttcggcgtaaagctgcagctgcttcacgtcttagaaggcaccgatcttggaaccctctacaaaaatgacccgtttccgctttttacactggaggaatactgcgaccttatcgcagactgccttgcccttcttccaccggaaatggtcatccaccgtctgaccggcgacggaccgcgccgcctgctcctcgctccgctgtggagcacggacaaaaagcgcgtgttaaacacgataaacaggcaacttgtacagcgcgatctctggcagggcaaatattatagaaacgaggaaacacatggctgaaccatttaccatatacaaactgaccattttaaatatgctggataaggtggattttcccctgacgaatacgcagatctccgacttttttctggagcaggaatacacggattatttccgggtacagcaggtcttaaacgatctcgccgactccggtctaatccgcacggaatccacgcacagcaacacccagtattatatcaccgctgcagggcgtgagacgctcggctttttccgcgacaagctcacggacgccattgagcacgacaccattgcctattttgaaaaaaataaaatggcactccgcaccgtcaactcaatcatcgcagactactacaagacgccgaatcaggactatgccgtgcgctgccagttccgcgtccacgacaccaacctgatcgacctgacactgaccgtcaaaaacaaagagcaggcggaagcgatctgtaacaactggaaaaagcagaacgaggatgtctacgcctatctgatggatattctgatccagtaacaatccgtttcctgtcagataccgcctgacattttttctaacagacagaagggagtccttattttatgggaaaaagtgctttcaaaccgggcaacatgctctatccgctgccagccgtcatggtaagctgccagtatcccggcacctcggatccggaatgcagcaatcctgcactctcaggcagaccgaacattcttaccgtcgcatgggcaggcaccgtctgcaccaatccgccaatgctctccatctccgttcgtccggaacgctattcctaccatatgatcgaggccgccggcgagttcgtagtgaatcttacaactgaatcgctcgtgcgcgccaccgactactgcggcgtgcgctccggcagggaggtcgataaattcaaggagatgcatctgacaccgcttgcctcccgtgaggtatcggttcccggcattgccgagagccccgtcaatatcgaatgccgtgtgcgccagatcacgccgctcggcagccacaatctgattctcgcggatgtcgtcgccgtcacgatcgatgacgcgtatatggacgaagccggcaagttccacttaaacgataccgggctgatcacctactcccacggagaatattttctgctcgggaaaaaactcggcacgttcggctacagtgtgcggaaagattctcctgttaaaaagggaaacggcacctccgtaagaaaagaaactcctgtaaaaaaaggaactcctgtaaaaaaaggaattcctgcaaaaaaggattttctgcaaaaagggaacaacaaaaagaagaaaatgaaaacagatataaacaaaatcagataacgaagggatttttcctatgaagataagatttggtattgtaggctgcggttttctcggaaacattatcgcaaacgcctggaaggacggtttcctcgaagattacgagctcgtcggcgtgactagccgcacgcaggaatcgcgcgataagactgcggcggaaaccggatgcagatcctgtcgggatcttgcagaactgctctccttagagccggaatatattgtggaggcagcgtccgtggaagctgtccgtgaaattgcatgtacggtactggaacacggcgtcaacctcgttcttctctcgatcggtgcgtttgccgacgctgccttttacgggcaggtcaaggacgcagcccgcagaggatgcgccaaagtccatctggcaaacggcgcgatcggtggttttgatgtcttacagacgatcactttaatggcgcaggcaggaaagcttgacgagaccgctggcatcgagacacacaccggcgcccgcggttttcgcaatacccccgtctgggcggaacaccttttaaccgatactgaaaagacgactgtctttaccggcagcgccaaggaggcaatcgcaacctttccgcgccgcgtcaacgtcgccgtcgccacctcgctcgccacgacaggaccggacatcacgcaggtaaccatgcactccgttccgggctggacaggcgatgaccactgcatcaccgcagagatcgacggcgtcaaagccaccgtggacatctgctcttccaccagcgcaatcgccggctggagcgcggtagccctgctccgcaatctcgcctcgccggtttgtttttattaacgcctgctaatttccaaaaagtcctgacatccagtcattgaactcttttacttttaatgtcacggaatcgaccgcatcggaaagctctccggcactctcgagcatttcctgcgtcgttccgatggcatcattgataccatccacatcgacctgctgcagtttatctgccgcctcactcattgctgccatcatctgactcatccggttgacaaaaaatccacccgcaataagcagaattaccagcattaccgccagcagcccgctgataagcttctgcattttcaactgttttttcatcacttccaacatttcttccatattacaatcttacctccggttctcactcatccaacactgcttctatactatctcataaacggactgttcatcagttcctgttttgctacttccatcgcacgcgccacgctgcccggctcaaacggattcgacaggtttgcatagcgcaatgtctccagatagctcatgcttccgccgcatttgcagagatttaagtaatcctgccatgccgtctcatggttctcataatttttctttttgaactccatcgcccccatcgtggtcagcgtataattgatgtagtagaacggatagagatagatatgcagcttgtggtaccagaaaccgccacggtcgaagaaatcatccgcgtcgtattttctccacggcatatacttttcttccagcttcttccactctgcggtgcgctccttcggcgtcagttccggattggcgtagcagatgtgctggaactcatccaccgccacgccgaacggcacaaatgtgatcgcctcctgcaaatgtgcaaagcggaacttatccgcatcctttccgaaaaatgcctccgcatacgggtaggaaaactgctccatcgacatggaatggatctccgcgatgtcggtggactcggaataatactctgtgatcggctgctcccgcatcgccatgtaccccgcaaacgcatgtcccagctcgtgtgtcagcacctgcatgtcaaagattgtctgattaaaattggagaacacaaacggtgcccgataatccgggagaaatgtcatatatcccgtagcagcttttcccggcttattcttcaaatccatcagttcgtgctcaatcataaaatcaatgaactctccagtctccgggctgatcttatggtacatcttccttgcctcttccaccataaaatcatcatctcccgcaggaacggcatttccatccggaaatacacgcttctcatcataaaacatcaatgtatccacaccaatccgcttcgcctgcgccgcatagagctgttcacacagcggtacgagttccgtacgcacctgctcgcggaacgctgccacctctttttccccataatccgtgcgtccctgctgcatgtaccccaccggaataaagttggcatagccgaggttcttccccatctgattgcggatggtaatgagttcctcccagatctcctccagccgcttctcattgctgtggtaaaaatcagaatatgcccgcacagccgcacgccgtacttctctgtcctcatgttcaaaatacttctgtaccccatagagattaagcgtctgcccttcaaattcgatcgccgccgttgccatgatcttctgatattcgtttgtcagcttcgcctcctgctgcatcagcggaatatttgcctcacagaaggtcttcctgttcagttccttctgtgcaaaatactgtttcccgtactctttctcgatgtcatcgcgaaacggactattcatcactgccgcatcaaatgcaagaaacttcggcatcacggtcggtatggtattgttgatatattcgtcttccttctcataataagtatccgtcgtatctaatgtatggcggatggacgcaatcgtgcacgcagtcataagcttattctgcacgcgctctgccttctttaagagttcctttaatccctcataggaggctgcctcctgtacctgttttaccagatcctcaaaaagcagttccaattccttgaaatccggtctctcatacttcagcgttgaaaatttaaaatctgccatatgctcctcatttctgcgcaccccatcgcagcaattcttctcctgcaatatccgtagcgcttctctctttttcgttttattctacgttccgcagcttttcctgtcaagcaacagccggtaaccggcgtccatgagcaccatgcataaaagcatcagaaccgcatagcctgccagatagcccgggttccccagaaacgacgccagccactccagcggcgatccgggcgaaggcacattcacaaacatgtaattggcatgaaactttttgtcaaacaggtagaccggcggcacaaccacgagaagaaatacgatcaccttccacagtgccgcaagccgcgggacaatgttgtgctgcagcagctggcagatcacgtagagcacaatcccggcatgaaaggtaaatccctgtatcgtgataaaatgaatcgccggatagcgcacccagtccgggaataaaagcgcaagcacggttcccggcagacacagggtatagagaacctgtcccagccagtcccacttgaaaaatgcgtgcagacagcacaaaaagcctgccatgctgcacagatgaagcggcagttgatacagcgacattttcccgatcaaagccagcaccgcaatccggtacacctccaagcccaccaggaaaatgccgattcctctctccgccagaagcctgcgccgccctccccctcgcttataagaatggaggaacagcagtaagagccccgcgcacacgcccagccataataaatgtaccggaccaaagtgggaaaatcccaccccgtccggtatctcatcttcgtatgtgaaaaaataggaaagatcaatccccagtcgtctcattttcgtacgcttctttcaccgtatttttctccacggaactttcttccgtagcgtctccttccgcagcgtctctctccgcagattctccttccgccgaatgttcctctgtagtatctgcatctgccgggctcttatgcatctcatccgcagattctttcttcttcacgaacccaagatgcgacaatttctcactccaccatgctcgccaccgtgcacgtcttgccgcccacccctctttccgctgcctgcgccgttcatcccgcgcagccgccttttttgtcctgtcctcttccttctgggcaagcttttcctggcgcttttcctgcttctgggtaagcttcgcctgctttttctcctgctttgcgaacgccttttccttcagacgcacttcctttagcgctgccttctcgatctctacgatatagcggttcgccttcttgcggttcctccggtccatccggtacggatcatacaggaagtaggacagcgctccgatcatgagcaccacaacacctgccacggtaaaaactggcaccagaagcgcatattcctcaaaaccaagttcgtagcaggtaaacgtcacgagcatgaccggaaacagcagcaggtatacgcctttcgtcagaacagtaaaaaacaggaactgctttctcccgttggagagcaatgcaccttcaatggcggtatagaacgccataaaaatgcagatctccgagccaaacccatgcaatacaccgcagatggcgatcaacacaatcgacaggaaaaacagtgcaaacgctgtgccctgataccacgcattgcggtactccgtcatgccctgcagcttgtcctcgctgattccgtgcatccggtatatctctgtgcggatgcgctcctcaaactgctcgttatactgctgctcctcctttgtggctcgcagatgactctccacggacagactcatctggtcaatatattcctgctcctgccggattcttcttgcacgcagcttctcaatctcgctctgccgcttcgcttcttcttccagcttcatcacttttccgatgcgcggattttttacctcaatatctgaaaaatccggctccatatctgcgatttttacgcaggctgtatcacaggcttttacctgttcctgtgccggttccacacttgcgtcaaccgtctccgtcactgctgtgcgctctgttgtgtttgcctgtccggcagtccccgttcttcttcgtttgcgactcatcctactccccttttcttcctgcgtgtttctggctttatcttagcacagaattctttgaattacaaacaggggctgccatgactttcaaaataaccttatgaaattattccactccaaacagtgccagtatcttttgccagaaggtcttctcttcctgcactgttgtatctatttcctcctcgtctggtatctgcaccgcatccgtcttcatgacgaaaagaacggaatccacattcgtattcttctcggaaacaaaggagactacttccacatcttttcccatcatctcatctaccgtatccgtaatcgtgtcggttaccttcgtatctgcatccgcagtcttgtcagaaaattctgtggttgcgtccgcaagcttactggctccctcatccagatcagtacttccgtcatataattcctttacaccactgaccagtcccgtcgttccatcgtacagatctgcggttccgttggcaagcgttgctgctccctgacagatctgcccatagccggaagtaatctgtccaactgcaccggtgtattctaaaattcctgtatttaaagtctgatactgtgctgtgagcgcgtcaattccattttttaacgtcgtcatattttctgccagcgaggaaagagacgataccatctgaccaattgccgcatcaaactgcgcatagctgtcacggagcgccactgctccggtcatcagtgccccattctgttcatccagcgccccgtctactcctgcaatcagcgtattgcttcctgcgatataagcggcatccgcttttagcaatgtctccacattgatcaactttccggctgtctggatataactctgtatcccggaagcatctcccgtctgggcatactgctgatagagtgccaaagcttctgcatctcccgcagccgcaagctccccgatctttgccactgctgcaccgtcaccgccggatacatacgcgccgtaaattgccctctgtgaatccgtgattccaagcgccgctgccgcctgctcattccgcgccgcataagcatttacatccgtaattccggcagtttccagattcgcataatagctgtcaatgcctgtattcatatcggacagtcctgccaccagagaagagatcccggcattgatctgcgccgaagaatttaccagcgccgacagttggtctgcattcacgctgacacctgccagagaagactgtatcgtctgaagcgccgagagcacctgtgccgatccgtccgtcaatgtcgatgattttccattcagggtgcgaagtgcatcctgcacggtcgtaataccgctgtttaagctcgtcatgccgtcctttacgctgcctgctccatcctttaccttcaccgtgccgtcgtagagtgttcccgctccatccacaaggctgccggttccgtcagcgagtgagattgctccatcattcagcttgtcgaccgcgtcgcagatttcattgatctgatcctgtatttccgaatcatccatctccatattcatgttcagctttacgccgttgatcgtgatcgcgtccatctcaaaatcggtcacatctgcggttaccgtaagatccgcgcccttgcccggcagtatgatataggaaagctgtttgtctgatccggcattggcaacggttgcattctccgccacaatgttcctgcactggttcgtatccagtgtgatggctgcctgcaatgcatagccgtcccagaaattctcatcacacttcgtattctccgagatggacagttttagctccaatgctccggacattccggcaatctcttccggtgtatactcttttccgtccatataataccgcacggaaatattccacggaatgtcttttgtgtccagatctccctgataatagactttatccgcatctgtatggaaggtaacctcatccccctcctgtgtgatggcatcctctgtcgtcagattgcgcacactcgtataatttccatagtcgacgatcgttcccccggagaactggttgaccacatagatgccattgacgtccccggaagcatccagtatggcatagaccacttcctctttttcactcggtatcgctgccagtaccgcagaaacacctccggataaggtcaacgttcccgccagtaccaccgaagccattctcgctgctgttttcttatttttattcatgttccattcctccctttttcttcttaataaacaaccgatccatcacatataaaagtcccggcagtacaaaaaacactgcaattaccgagcagatggttcctttcccaagcagatagccaagctgtgacaaaagtccatgcgttgatatgatacctagcaggaagccgaccaccgtaagaacggttccggaagtcagtatggaggctgtcacgtctgcaatcgtctctacaatactctcctttttcccaaggcactccctcttctcccggtaacggtcggtaaacaggatcgcataatccaccgttgccccaagctggatcgaactgataatcagatatgcaatatagaacaatggctttccactgtaatacggaatggaaagattgatccagattgccgtctcgatcgtaagcactaatatcaccggaagtgaaatagaacggaacgacagcaccaataccgcaaataccgcaccaattgcaatatggaagaaaaaacagatcttagaattttaaaaaccagaaaagccctctcggatgcctttctggttctgctttgtgaaaaacgttttgaagatattacggtcggtgaactgtgtgaccgtgccatggtacgccgcgccaccttttataagcattacgcggacaaatatgaattttttactttctttatccgtcagtatgaggaaaccttctccatggatgccaaagagcacaagaaggattcgctgtctgactattccgcttttatgttccagcgctgtattgaattcatgcgggagcaccagcagatgatccagcgggtcttagagagcaatatgcagtctgttcttctggatctctttaccgatgagatctatcacaataccctgctgcacatccgggaaaacaatctgtttcccaatgccacggcagccatccgggacaccattgctgctttttatgccggaggcattgtccaggtgctgcgccagtggtttaatggcagccgtacccataatctggacgatattcatgagacttcggaggcgctcacacagattctgcactcctttaccaatatggattgctgaggctggcagatcagatggcaacctttgaagtggcagataataataagaaacacactacatgattttgagtgaaaggtagtagaaaattcttttgaaaaaaatgtgagcattccttcctgtcagatgtttgcatcagattccgtgtctcttccacgtttgaacactcgcggagtgtgtccgacaaatcagagacaatccgtggagtgctccaaacttggaaagacacggatcatcaaagatgcaaacatctggctggttagaaatgccacgttttttgactagaatttccgctaccttccactcaaaatcaagagatgtgtttcttattattactgtcgccgccacccttaaaaagggtggctcgggacgctgggtgtaaccccttggtacccgacagcgtctcaag

SEQ ID NO: 11631 - DNA, 549 bp, Unknown
  gut microbiota DNA sequence
agagcgtggccgtgaggtgcgcgagtttatcgagagggatctcggggaagagggaatgaagcgttccgtcgtcgtggtggcgacttccgataagccggcactgatccgtaacaaggctgcgaagacggcgaccgcaatcgccgaatatttcagggatcagggaaaagatgtactgctgatgatggactctttgacccgattctccatggcacagcgtgagatcggcctcgcgtccggagaaccgcctgtaacaaggggatatccgccgagtgtatactcggagatgccgaagcttctggaacgtgccggtacttcggacaagggttccatcacaggactttacaccgttctagtagacggtgatgattttaatgagccgattaccgatacagcccgaagcattttggacggacacatcgtgctttccagaaaactgggacacaagaatcattacccggcgattgatattttacagagtatttcccgtgttatgagcgccatagcgaccagcgagcacaaggagcttgccggacgtttaaagaatgtact

SEQ ID NO: 11632 - DNA, 4538 bp, Unknown
  gut microbiota DNA sequence
gctggtcttagggagtgagcccggatcgggatagcggatcgtttcgggacttgccgtggcggcagtgcagacagccacagtgcagaaagaaaagaagtctgcaggaaaaataaaactttgaaaagggaaatgtacggacagccgacgcattctgcgccggctgctttttctgcctgccaggtgcaaattttttacagtctatcggatgcaatttttttacagtttgatagatgacctgtttttggcgtttttcgggtcaatggaagtacggaggagcttgtcagtcttattgcgggtccgcagaaggaaaaaagacttacgggacccgaaaatgccattgcaagagggaaaaagaaacgaaaaatcagctcttgcgggtctgggaggaagaaaaagctgtgccagacccgaaaaagcagaaaaaacgggtctggaaagttgattttcacgaatcagacccgagcaggaggaaaataagtttacataacgcaaaaaaatatgctattgcgggtctgagagagaaaaaaagccgtgtcagacccgcacattgctatgcaggcagggaagaccccagaaatatttgaagaacaggtttgtgggaatagaaaaaagccgtcaaaaagtttgccggcaggataaataaatttcgacggatcgggcatactagcgcaataaggcaaaggcaagaacagcaggcaggaacaacaggcaggaatgaaaggttgaggcaaaaagcaggagcaaaaagctgaagccaaaagttggagtaaaagtcggagcaaaaagctgaagccagaagttggagtaaaagacaggagcaaaaagctgaagccagaagttggagcaaagagttagagcgagagatcgtgtgaaaaaatggaggattctatgaacaagtatgccggaacacagacggaaaagaatttgaaagcagcatttgcaggggaatcacaggcgagaaacagctatactttttttgcggagatcgcaaaaaaggaaggctatgagcagattgccgcgatttttgagaagacggcggataacgagcgcgcacatgcacagatgtggggcgaggaactgggactgatcggcgatacgggaaagaatctggatgccgcagcccacggggagaactatgagtggacagacatgtatgaggattttgcaaaaacggcggagcaggaaggctttgcggcgcttgcagcgcgattccgcatggttggcgcgattgagaaaatgcatgaagagcggtaccgggagctcctgcgggatgtgcaggcacaggcggtgtttgagaaaagcagtgtgaaagtgtgggagtgccggaactgcgggcatattgtggtcggaaccagtgcaccgaagatgtgcccggcatgtcactatccacagggatattatgaggtgcgggaggatgtcaggggagcgtagaagtgtctggcgatttgtgagcgttccgtatcagtaatatttcacaaaatttatagaccaaatacatgaaaaatatataattgacagaaactatgctgttgttataataaatagtgtgttgggtacacgcgtccgcaaatgcgcggacgatatttttacacaaaaatgtacacgtgtacgcaaaacagaaaaaatcacaacaaaacaatgtatggggaggaagtagtgcaaaaatgcggacgatactgcattttgcacagggctgtttgatgcggcagacaccacaaaatgagcccttatcgcagagcaaacgagatggaagacacgttacgggtgcagattcattgcccgtgcaaatcagaggttgcatctgtggttgcctcgacacaaagtgtctgcagaatggaggataacatgaaaagaagagcaatggcgggattactggcaatgacaatggcagcgaccatgtttgcagggtgcggcagcacagcagcagacagccagacagcggatgcacaggggagtgcaggcacggcaacagaggaagcaaagacagaaaaagacagcggaagtgctgcgggagaaggaatcacattgactgtgtgggcaccatttaccggatcagacggagatgtgctgcgtgaaatcatcgacaactacaatgaaaccaatacggacaacatcacggtacagattgacattatggacaacgataccttgcagaccaaatttgcgacggcggtatcgacagggacgggaccgtcgtttgtgctggtgggcattgagtatcttcatcagtatgaggagaatggactgatcgaggatatcagcgatttctgggatacgatgggtattgacaagagtaatttctatgaaaatgtacttgcaaaatcctacatagacgatgcgctctacggcgtaccaatgcagtacaatgtgcagtatctgtattacaacaaggatcttttcacggaggcaggtcttgatccggagaacccgccgaccacgctcgatgaactgcgcgaggcggcgatcgcctgcaccgatccgtctaagaaccagtatggactgggacttccgaccgattacggttattactgcgagtacctgtgggcgaacggcggagatgtcatcaatgaggatgcgacacagaaccttttaaattccgaagaaaacattgcaaccctggagtggattcagaagcttgcgacggaggacggggtatccccggagggactcaccgcagcggatgcggacacgatgttccagtccggccagcttgcaatgtataccagcggtccatggaacatcaacgggttgacacagcttggtttgaattatggaatcacggcgatcccgggcggaagcgacggcgcgtactccccggagggcggatgctcttacatgctgacgaaaggtgccgatgaacagaccaaagaggcagtgtataaatttatggcatactggctgtctgatgatgtgttaaaagagtggtcgaaccggaacggcttcccggtatggtcttactctgtgcttgaggatgcggacattcagaacaacgagatcttaagtgcggtatccaaggcatccgagattggacgtgactggcatctgggactggaatgcggaagcatgattgacaatgatgtcatgaaaccgatgatggagaaaatattatctggggcagacgtgacacagagtgtgcaggaggcatcagacgcgctggacgcggtgatctccgactgatgtctggcggttgctgccgcaaaaatagctgcaagccgtaaaggatggaaattatgaaagtaaaaaagagacaacaccgtatggagcatcaggtgaaggcgtacgcgtttatcgcgccttccctgctcatacttaccgtatttgtatttataccgctggcgggagcgatcgggatcagtctgatgaatattgatatttatatgaaaaatatctcgttcgccggaattgccaactacatcaaaatgtttcaggatgagcgtgtggcaaatgctacgtttcatacattttatttcgcactgcttgaggtgcccctccagatgatcgtggcgttgctgctgctcatgtttatgctgcgcaatacaaaactgcacaagcttttgagaaccgtattttacctgccctatgtgtgttctatgacggcagtcagcatcatgtggtcgatgctgctcaatacgcactacggaatgctgccatatctgcttggaaaaatcggtatcacgatgccaaacatgctctcaagtacgacatgggcgatgcctacggtgatttttgttacggtgtggaaagggttcggatatacgcttaccatcctttcggcggcggcgctcggcgtctctgagtcgttatatgaggcggcggagattgacggcgcgaccgggctgcagaaatttttctatgtcacaatacccggtatacgggatacgatcggtttttgcgtggtgacgacgttaattatggcgctgcaggtattcgatcagatctacgtcatgacgggaggcggcccgcagtacgcgaccgagacgctcgtgggttatatctacaaccggggatttcagacagcgccgtatgatctcggatatgcgtcagcaatcgccgtttatttgttctgcatgattgcgattataaccgtgatcttaagaaaatatgctttcccccagggaggtgacgagacatgagaaaaataagtgcgcagcgggtgatcggaacattggtacttctgttgtttgcagcgctggtgctgcttccactgttctggctcggcgtatccgccttcaagtcggatgcggacgtcatcaagtggccgccaatctttttcccgacagagtgggtcacaacacagtttgcctatgtgtggaaagtgctcccgattgccagaatgctgcttaacacggttgtgtttgcagggggtgtcaccatcatcagtctgttttttgattctatggcagcatatgcatttgcccgaatgaaatttacaggaagaaaactgctctttggaatcatcctgctcacgatgatgattccgtttcaggtggtgatgattccactctatatggaagaatataagcttggaattttaaata

SEQ ID NO: 11633 - DNA, 249 bp, Unknown
  gut microbiota DNA sequence
aatgggcggactttctggtgtccctaatggcacctcttcacagacaatataaaaccgcgcgaaccgaaactctttgccatctgctattaaaaacatggcagatggcaattcaaacatcggcttcgcgcggttatgttatgttcgacataaaggtggcatttatgccacctgttgtctggtgccaataagggacacacacaaaagtcctacaaattgtcttccgggatgcggacatgacccgcggagtgc

SEQ ID NO: 11634 - DNA, 180 bp, Unknown
  gut microbiota DNA sequence
ggttgccgaggatgctccataggtgccggttgccgaggatgctcccttgtatccggttgccgaggatgctcccttgtatccggttgccgaggatgctccataggtgcaggttgccgaggatgctccatagtctccggttgccgaggatgctccacagtatccggttgccgaggatgctcc

SEQ ID NO: 11635 - DNA, 28336 bp, Unknown
  gut microbiota DNA sequence
ctcgtcgatcccaaggagatggtggagatcaagcacggactgatcgggcgcagacagaagctgcgcgcacggattgagaacaatctctcgcaggtcaacgagcagaaagaggaggcagaacagcttttagacaaggtcggaagcatgcgcccccagatggagaagattttaaatgcagtagataaaattaacgagggagattagcacaagtgaatgggatgcggcatagagtaaagggaagatatcataataggagagccgcatgagaaattacaatgcagcaggaaacacgcgcagccgatgtgcgtgtgaaccggatgcagcttctgatagacagccggaatatgtggttgcgatggcatatgttccctggcagcactttaaaacgacctacgaactggataaggcacttgaaaccggaaccatattcccagaacttgataagccgtttctggcagtgggaagggggtgcaggcgttgctgatgaatcagatgacacagatgaaccaggcgcagcttctgcactggatcaatatggtgagctttgccgtggtggacatcgcggagtatcttgatacgcatcccgtcgatgcggaagcgatctgttacttcaatcatcatatagaaatgcgcagaaatgccatgcaggtgtatgcggacaaattcggaccgctgacgattgatacggcaaatccagatgcttactgggattgggcaaaacagtccctgccgtgggaaggaggtggctgctaatgtggaattatgagagacgcctgcagtacccggtcaacatcacaagccccaatgcgaagatcgcgcagatcattttgtcgcagtacggcggcccggacggagaagcggcagcatcgtttcgttacctgtcgcagcgctacagcatgccggatcggaaggtggcggggctgctgaccgatattggcacagaggagctggcacatcttgagatggttgcttccatcgtccgtcagctcacgaaaggactgagtgcggaggaactggaggaggcggggtttgcgccttactatgtggatcacacggcgggtatctggccgcaggcggcgggaggcattccgttcaatgcgtgcgagttccagtctaagggcgatgcgatcaccgatctgtttgaagatatggcggcggagcagaaagcgcgcacgacctacgacaatattctgcgtctggtcaaggatccggaggtctgcgacccgatccgctttttacgtcagcgggagattgtccacttccagcgcttcggcgagggattgcggatgattcaggacgatctcgaccgcagtaacttttatatgtgtaatcccgaatttgatccgggatgcggaaaataaaaggaactgccgcaataagcatatcgtacttgggtttgataagtaatatgatcagaagattacacagtgggatttcagatgaaaatgcagaggaaaattcggttcaaaaaatgtggtatttctaaccagccggatgtttgcatcttcgatgatccgtgtctttccaagtttggagcactccgcgggtcatgtccgcatcccggaagacaatttgtaggacttttgtgtgtgtcccttgcggcaccagacaacagatggcataaatgccatctttatgtcgaacaaaacataaccgcgcgaagccgatgtctgaattgccatctgccatgtttttaatagcagatggcagtgagtttcggttcgcgcggttttatattgtctgtgaagaggtgcccttagggacaccagaaagtctgcccattgtctccggtgtgtcggacatgcacccggcggattgtcaaaacgtggaagagacacggaatctgatgcaaacattcagctggaagaaatgctcacatttttctccaacgaatattccctctgcatttccacatgaaatccccaagtgcgtttcttataatattacttatcaccccaaagagacctgggcttattgcgacaattccttttggtattccatgaagcaaaaaagttccattacaccggaatgccagttgacaatgcagaggcatcatattagtattagtgagaatgaatatcaatatcaaaagagaaaaggtgtgtggaaaatatgacgttagaggaactaccaatcggaaagcgcgctgctattacggcggtcggcggagagggcgcactgcgttgccggctgttagacatggggctgatcccgaagactgctgtggaggtgcgcaaggtggctccgatgggagatccgattgaaatacgcatccgcgggtatgagcttacgatccggcgggaggacgcagcgaaaattgaagtgaaaccggaggaagaaaaatgatatttgcattggctggaaaccagaactgcggtaagacgacgttgtttaatcagctgacaggagccaaccagcatgtcggcaatttccccggcgttacggtggatcagaagatgggggaaatccgctccacgaagaattgttccgtggtagatctccccggaatctattccatcagaccttataccaatgaggagattgtcaccagagattttatcttaaatgagaagccggatggaatcatcaacattgtggatgcgacgaacatcgagagaaatctttacctgacgctccagcttctggaaatgcacattccgatggtgctggcgctcaatatgatggatgaggtccgcggaaacggaggttccattgattacaggcagatgtcgcaggaattagggattcccgtgattccgatcagtgcggcgaaggatgagggaattgaggatctgattgcggcgattgtggaagttgcgggcaaaaagataccgcccaaagtcatggatttctgcgagcaggggccggtacaccgctgcattcatgcggtgtcgcatcaggtggaggatcatgcggtaaatatcgggatgtccccgcgctttgcggcgacgaagatcgtggaaaatgacacggacattatagaacgtctggctctttctgagaatgagctggaaatgatggaacacagtatcgcggagatggaaaaagactgtggattggaccggaatgcggcgttagctgacatgcggtatacctttatagagaaggtgtgccaaaaaacggttaaaaaatgtcaggagagcagggagcacatccggagtgtgaaaatcgacggtgtgctcacgaacaagtaccttgcgatcccgatgtttctactgatcatgtttttaattttctggctgacgttccatgtggtcggcgcggcgttaagcgactggctggcggtgggaatcgacgcgtttactgccgtctgtgacagggggcttaccgcgtacggattgaatccggttgtacacagcctgctcatcgacggtgtttttgccggcgtcgggagcgtgttaagcttcctgccgatcatcgtggtgctgttcttcttcctctcgattctggaggactccggctacatggcgcgcgtggctttcgtgatggacaagccgctgcgtaagatcggactttccgggcgaagctttgtaccaatgctgatcggattcggctgtacggttccggcggtcatggcgacaaggacgttgtcgagtgagagagatagaaagatgacaattatgctcacgccttatatgagctgttctgccaaaataccgatctatgcagtgtttgcggcggcatttttcccggggaacgaggcggttgtgatgatacttctctacacggcgggaattgtggtgggcattttgtccgcactggtactgaaccacaccgcgttccgcgggaatccgattccgtttgtcatggaactgccgaattaccgtttcccgtcggcaaagagtgtcggacagctgatctgggataaggcaaaggatttcctggagcgcgcgtttaccattatctttgtggcaacgattgtcatctggttcttgcagacctttgatctgaagcttaatgtggtgacagacagtgagaaaagtctgctcgctctggtggggcagtggatcgcaccgctgtttggaccgctcggtttttcggactggagggtttctacggcgctgattaccggatttacggcaaaagaggcggtggtcagcaccttgagtgtgttgaccggcacggcgactgccaatctaagcagggtgctcggaagtatgtttaccgggcgctcggcggcaagcttccttgtgtttacgctgctttacacgccgtgtgttgcagccattgcggcggtgaagcgtgagatgggaagcggcatgcgggcatttctcgtcgtggtgcttcaatgcgcggtcgcgtggctgatggcatttgcggtttatcagataggaggaatcttcttttgagtgggttgcatgcgttggatctgattgtgctggggtgtatccttttgtggatcatcctggcgcttttgtatatgggaaaaagaaaaaacgacaaagaagattgtggctgctgtggtcactgctcatcctgcagcggatgtaaaagtgggagaaaggataagaaaaattaaaaaaaaggaacaaccgattgcgcattttgtaaaataggtgtaaaatatataaaatgagtgcaaaatcgtgtataagaacagaagaggcggcagagagaatttgcacatacagatacgaatacaaaggaaggggatttcagatgaagaagcatgttattgcggcggttgcagcggcaacctttgttacaacagcaatggcgggctgtacaggtgcagatacgacggcagttggagagtccgtaaaaggtgaaccgtccgtattgcagacggaggcggtcatggattcgacagagttgtccggcgatgcagcggaggatgacggcaaggttacattgaccgtatgggcagaggaggccaattttgatgttctgcaggagatgatcgacagcttcgagcagaaatatgcaggacaggcagattttgatattcagcttgcggagaatgcagatgctgagacgcgcaatacgctgcttggagatgtacataacggagcggatgtcttcccgctgccggacgatcagcttaccagcatggttgcagccggtgccttagagccggtaccaaatgcagatgagatccgggaggcgaatctggatgaggcggttgcagcggcttctgtgaatgatacgctgtacgcttacccgatgacggcggacaacggatattttctgtattacgacaagaattacctgacggaagaggacgtccagacgatggacgggcttctggcagcagcgggcgctgtgggcaagaaggtgacgatggactggagttccggctggtacctctatgcgtttttcggcaacaccggactggatttcggtgtaaatgacgacggggtgacgaactactgcgactggaatgcgacggaaggcagcataaagggaaccgacattgaggaggcgctgcttgccatcgcacagaatccggcgtttttaagctgtaccgacacggaattcatggagggcgtgcaggacggaacggttgtggcaggcgtcagcggcgtgtggaatgcatcggagatcaaaaaggtatggggcaacgattacggggcagtgaagcttccgacctacacctgcgcgggacagcagatccagatggcctctttcacgggctataagatgatgggcgtcaacgcctattccaagcacaaggactgggcattaaagcttgcagactggtttacaaacgaggagaaccagatgctgcgtcttgaggagcgcgatcagggaccttccaataaaaacgcggctgcgtcggagcaggtacaggcggtgcctgccatccaggcagtcattgcgcaggcgcagtacggcaaactccagcgtgtgggcaacagcttctgggatgcgacgacggagttcggcaatctgatggcgacaggcagcacaaacggaacggatccgcaggaagtgatggatacgcttgtggctggaattacacagtcgacggtacagtaacggggaggagcaggatatgaagaaaaaaagctatatcagtacaaagtttattattctgattccggtatttatcctgggatttgtgtcagtcgtttccaatattctggcagtgaccaatattaagagagtaaatgcaaatgcaacgcagattgcaaacggctacatgagctgtatttcagagctcggcgatattcagaaagagacgcttctgatccacagactgggactgtcccatatcgtggcgaccgacttaaataccatgatctcgctggtcgagaccatccggagtgagcaggagaccttagagacatatctggatgatttccaggaatatgtgacagacgacaacaaggcggaatacgatgcgctggtgtccaactacgagggaatgaagtacgagcttgccaacctcatggcatacagtgccaacaacgataacgaggcggcttatgcgctggcaaacggcaagatcgccgattattccagtgcaatgcaggagagcattgcggcaatccgcaccaatgtcagcgaaaatgcggatgtggcaaaggaacagcttgcagcggtctaccggacggcaatcgcggcgagcacggcatccatcatcatcagtgtggcggcgctgcttgcaactctgatctgcgtattccggctggtaattatcccactgctgaagacacagaaggagattaccaatattattgaggatattgataagcgtgagggtgacttaacgagacgtgtgagtgtgcacgcgaaccaggaggtcgcagcggtcggcaatggcattaatgtgtttatggacaagcttcaggatattttcaaggtgatcgtgaacaattcaaccagaatggaatctgtggtcggcgaggtgcgcgacagcgtcgtgacatcgaatggcagtgtgtcggatctgtcggcactcacagaagaactttctgccacgatggaggagatgtcagccaatgcatccctcatcaatacgaacaccgagtctgtaaagcaggaagttgaccagatcgcggagcgcacgtcagagatcaacgcgtacacccgcgagatgaaggaacatgcggattccatggaggcttccgcaagggagaacatggagtctaccggagccaaggtcaatgagattttaactgtattaaatcaggcaatcgaggacagcaagagcgtaaatcaggtaaacagcctgaccgatgatattttaaatattgcaagccagaccaaccttctggcgttaaatgcctccatcgaggcagcgagagcaggggaagcgggcagaggattttccgttgttgcgacggagatcagccagcttgcagccgccagccaggaggcagccaaccgtatccagcagatcaaccgcgttgtgacggaggcggttggaaacctcacggaacattccaacggactggtgcagtatatgaatgattccattcttccggagtttgaggcgtttgtcgatgccggaagtgcgtaccgggagaaggcaacccacattgagaccagcatgggagactttaccgagaagacggaggtcttaaagaagacgatggcagagatcgcggattccatcaacacgattgcacatgcgatcgaggagggtgtgaagggcgtttccagcgctgccgacagcacgcaggtgctcgtgggcgacatggaggacatcacgcgccatatggacgagaaccagcacatcgcggcagatttgaagcgcgagacagaggtcttcaaaaaattataggcacaggatttgtccgcttgccagaagtatcaaattgttatataatagcctgtggtcatgtcacaagacaaaggacagccacaggctgttgttatttaggaaagaaacagcaccgtaaggtgttatacaatggaggtttaagatgagtaaagtcagaaccagattcgcaccaagcccgacaggaagaatgcatgtcggcaatctgcgatccgcattatatgagtttttaattgcaaagcatgccggaggagatttcatgcttcgcattgaggataccgatcaggagcgctatgtggagggcgctgtcgagattatctaccgcacgctgcaggagacgggacttgtacacgatgagggaccggacaaggacggcggatacggtccttatgtacagagcgagcgtatgaagaccggcatttacatgaaatatgctaaagagctgattgagaagggggaggcatattactgcttctgtgacaaggagcgtctggcatcccttaagacagaggtggtcgagggcaaggagatcacgctctacgacaagcactgcctgcaccttagcaaggaggagattgaggcaaatcttgctgccggcaagccgtttgtcatccgtcagaatattccgaatgagggaacgacaaccttccacgacgaactttacggagatatcaccgtggagaacgcagaactggacgatatgattttaatcaagtcggacggatacccgacttacaactttgcaaatgttgttgatgaccacacgatgaatattacacatgtggttcgcggaaacgaatacctctcctcagcaccgaagtatcagcgtctttatgatgcgttcggctgggagtcaccggtgtacattcatctgccgttaattacggatgagaaccataaaaagctttccaagcgcagcggacattcttcctttgaggatctcttagagcagggattcctgtccgaggcagtggtcaactacatcgcacttttgggatggagcccggaggacaaccgtgagatctttaccctggaagagctgatcaaagagttcgactatcacagaatcagcaaatccccggcggtgttcgattacaccaagttaaagtggatgaacggggagtacatcaaggcgatggattttgaccgtttttatgagatggcggagccgtatctgcgtgaggtcattcacaaggatatggatttgaagaagattgcagcgatggtgaagacccgtatcgaggttttcccggagatccgcgaccacatcgacttcttcgaggaactgccggagtacgatattgcgatgtacacacacaagaagatgaagaccaatgcagagacctcgctggaggttttaagcgacgtcctgccgctgctggaagcgcaggaggatttttccaatgatgcactctatgcgacgctccttaagtatgttgaggaaaagggcgtgaagaacggctatgtgatgtggccgatccgtaccgcagtgtccggcaaacagatgacgccgggcggagcgacagagctgatggaggttttaggcaaagaggaatccattgcgagaatcaaaaaaggcatttccatgttacagaaataatcagaggtaatctatgagttttaacccgtctcagcgtgaggccatccgtcacaaggatggtcccatgctcgtactggccgggcccggttcgggcaagacccttgtcattacggaacgcaccagacatttgataacagaatatggaatcaatccggcaaacattcttgtcatcacgtttacaagagcggcggcaacggagatgaaggaacgttttttgcgcctgatgggcggaaaatcttccgcagtgacgtttggaactttccacgccgtcttttttatgatcttaaagcacgcctaccactatcaggcggagaacatcatccgcgaggagcagcgggtgagctgcatgcgtgagatcattaagcgccacaggctggaatatgaggatgagtcggagttcatcgcagcgcttctgggggagatcggtctagtgaaaaacagcggaatttcactcgatcattactattccacgaactgcggggaagaggtgttccggagagtttacagcgagtaccacgaatatctctatgcgcatcatctgattgacttcgaggatatgcttttgtatacatgggagcttttcaaggagcggaaggatattctggctgcctggcagaaaaaatatccctacattctgattgacgagttccaggacatcaaccagatccagtttgaggtggtcagattgcttgcgggtgagcagagaaatctgtttgttgtgggggatgatgaccagtcgatctaccgcttccgcggagcaaagccggagattatgctgcggtttgagcgtgaaattccggggacgaaaacagtgcttctcgacacgaattaccggtcacaggccaatattgtcgaggatgctctgaatctgatcgggcacaataaggagcgctttcagaagcgcatccgcgcggcactcccggcggagaccggggtggagtatgccgtttttgaggatcagcggaaggagaatctgcggatcatccgcgatatttgtgatgcggtggagaggggaaagagctaccgtgattttgctgtgctgttccgcaccaacacacagccgcgtcttctgatggagcagatgatggagtacaatattccgtttaggacgagagaccgcataccgaacctttacgagcactggatcgcaagggatatttttgcctatatccggatcgcgcagggaagccgggaacgccgtgattttctgcagatcatgaaccgcccgaagcgctatatcagcagagattcattggacgaggacacggtggcattcgatgtgtgggaatggtatttcagagaggcggaacagccgtgggtggcggagcggatcgtcacgctggagcatgatgtgatgcagcttcgccggatgaatccgtttgccgccatcaactatatccggaaaggcatcggatatgacgagttctgtgccgagtatgcagattacaggcgtatccgggcggatgaactttatgatgtgctggatgaactgcaggaaagcgcaagaggctatgaagattatgacggatggtttgcgcacatcgagaattacaccagggaattggaacgcctgtaccagagccaggaaaagcagagtgagagcgtagcgctttccacgctgcattccgccaaggggcttgagtacgaaaacgtctatctgatcgacgtgaacgagggagtgatgccctacaagaaggcggtgctggatcaggacatcgaggaggagcgccggatgttttacgtcggtatgacgcgggcaaaaaaatatctgcatctcttttccgtcaaacagatgaatcagaaagatgcagatatctcgcgctttattgccgaggcaggagagcgtctcagtcctccatgtcgttaaattccgcctcgtcaagccactcatcaaagcggtcggatacggcttcgtattcggcgtcgtctaaaatattatccagagacggattgccatcgctatcctccgcatagcggtagatatagacctcgccgtcctcgttcggctcgccggcttcggtgagcggaagaagggcgatatagtcctgctcgttgacggtaaaaatggttaaaatctcacattctacctggctgccgtcatccagatccagggtgaccaggatatcctcgtcttcgttggtgttatggttgtctgccatcatgatatctcctttattggatgttattaaataatcgcctgaatgtagagctccggatgctcctcaagattgatgaaacgtgagggggcgatctggatcgtaggtctcgtcagacgcttattgataaaaataatctctccggtctgtccgttgttcaacagaacccggttgtgcaggtaagtgtgcgcaatgtgttcgagaaaggtgagaatatagcgcggcttgtagcgctgcaagccttcctgttcaaactgggcgatcacttcaaacggacacagccccagacgataacagcggtcggcggtcatggcatcatatacatccgcaacggctatgatcgaagcgtagtcgtcaatgtccgatgcgtacagaccgaacggataaccgcttccgtcacaccgctcgtgatgcatcagggcagcgttctttatgtgcggatcgagaggctggtttttaagcagctcgtaccctaaaaggggatggcgcttgatctgttcaaactcttcggaagtcagcctgcccggcttgccgatgatgctggcaggaatccgggatttcccgatatcgtgtaaaagaccgcagagagtcagtgtgttctgggcatcctccgaaaaaccgagccagttcccgagcatgcgggagataatggcgacgttgacgctgtgtgcgtaagtcgaatcgtcgatctgccgtaagttatggagcatgtcgaacatggaaagtgtggtagtatgcgacgcaaacaaatccagggtccctgcaagaagcttgtctgtctccagctttttggcacgtaaaatacagtcgtttaacgcagtgtgaagcatcgtagtgcagctgtcaaacttctgactgaaaatcttgtattcttcgctttgccggatacgctcggaacgggaacgaaccggagcgtactgcttttgcagataatcgtgaagcccgccggaggaatcgctgctgtccctgatccatacttccggtatggaatagtcacggatgtgcaggatggtctgcgcactcaaaagacagccctcatccaggatgatctgccccgcggcagtgcgaaccggtctggctgtgaacattccgggctttaaatctgtcgtgggtattcgtttcatatacatcacctcgatcgtactgtgacaataagaactctcgtttcttaatattataacatgagatgcaaatgccggacaagcgcattctccctgaaaaagaaaaaactatacaaaaaacaagcgggaatgatataatgtacgcgaaggctattgagcagtgccagacagggagttttaaaaatttgcctgcgaaggcaaaattttttaaaattcatggctgatagggcgaaagcccgtgagtccgggaaatctctgattttccggacgtgcacagcgaaatgatgtgtaggtgcacagcgaaatgatgtgtaggtgcattgcgaagagatgcagacgtgcaggcagcgaagacaaaggtggaagatggcatggcgtatacgataaaagagggcgattacagacaatacggggcatcagccgcaggcggcggagtcgtgtttacgtttgaggcagaaaaggaagaggattgcagtattcttctgtacgggaaagacggcggaatccggaaggaacttaaggtgccggaaagctgctgcagaggagcgatccggtcagtctttgtcgcggggcttaaggcagagagcctgcgttataattataaaatcagcgggacggtcgtgaccgatccttatgcaaaacgcatcatcggcagagagcgctggagagatgcagggcgcgttaagaatgagttccgggtctgcggcggttattcggatgacactttttcgtgggggacggatgtacatccggagatcccgcgccatgagatgttcctctataaactcaacatccgcggattttcgatggatgcgggaatccctgcaaaggagcgggggacttttgcggcggtgcgcgataagattccctatctgaaagaacttggtgtcacgacggtggagttcatgccggtgtatgagttcgaggaactgatcttaaaggagaaggcggtattgccggaatatatcagctggcaggtgcggaaagaggatcagatcaagccggaggcatgtgcgatgccggagcgtgtgaacctgtggggatatgcgcccgccaattattttgcggtaaaggcgtcctacgcgaaagggcaggatgcggccgtcgaatggaaaaaactcatccgcgcgctccacgagaatcacatggaatgtgtgatggagatgtattttcctgagaatgtcaatcagaatctgatcttagatgcgctgcgttactgggtcagggagtatcatgtggatggcttccatctgctgggggagaatctgcccgtcacgcagattgcacaggatgcgtggcttagacggacgaagatttttggtgccgttttcgagaatgctgtgctctggcacccgtgccgttatccgcatctgtatgtatacaatgacgaatatctgtatcccgtccgggcactgctcaatcacaaaaacggcggtatggatgcatttgcatgccagcagcgaaagcagcatcagtatcacggatttgtcaattacatttcggacaataacgggttttccctgcgggatcttttctgttatgagcagaaacacaatgaagagaacggggaggagaaccgggatggaagtgactggaatatgagtgccaactacggcgtggagggacgaagccgcaagcagcggatcgtaagaatccgtgaacggcagatgtgcaatgcggtggcggtgcttttcctcgcacagggagtcccacttttgtatgagggggacgagacgggagattcccagaacggcaacaacaatgtatactgtcaggacaatccgaccggctgggtgaactggaagaaagatgagcgctacgcgtggttccgggagtttgtggcgcggatggcagcgtttcgcagggagcatcccgtgctcgccgcggatatgccaaaacagctttccgatgcaaaaggaacggggtatcccgatctgtcctatcatggagagaatgcgtggatttcagatctttccggcgagagacagtctttgggcatgctctactgcggaaaagaggatggcgatggaacagagggggaggaattcctttatgtcggctgcaattttcacatgggtcctaccagattggcgcttccgaagcttcccgggaagaaaaagtggtatctgctgatggacaccgccagagagcgggcaccgttcctaaaagaggaggagcgggtggatgcgccgcggatcgaactttgcggtcagtctgtcgttatattaacaggaaaataaggttacattattatgaaagcatggaaacatttttgcacgatcaaccatcacaagcatctggtcatgaaaggctgttttgcggtggggttatacaaacagggattattacatgatctgtcgaaatatacgccgacagaatttctggtgggctgtaaatattatcagggaacaatgagcccgaacaatgcagagcgcaaggataagggatactcgtccgcgtggctgcaccacaaagggcggaacaagcatcatatggaatactggattgactacggcgtgccggacgagggcggggacaagggactctgcggcatgaaaatgcctctgcggtacgtggtggagatgtatatcgaccgtgtagcggcctcgaaaaattaccagaaggagcgctataccgaccggagcgcattagagtattacctgcatggaaaggattttcatgtcatgcacaaggatacgcgggcgcttctggaactgcttttgtaccggctcgctgtccggggcgagcaggaagtcaatacatttatccgcgaagaactgctggcagggaagatcccctatgagcagaaggttctggatcaattagcgcagccatatcacagggaagcggagaagtaaacgtaagcatctccccggtgacgggatgagaaaaagacaaacggtgggaatgaagtgcctgccgttttatttttgtgtctgaaaatgccggataatagagccggtcgcctgccagaggatagccgagtgcggacatgtggacacggatctggtgcgtgcgccccgtttccagatgaagggagagcagggaatagggggcgtggcataagagacttttatagtgcgtgatggcatcatccccgcagagaaaatcaacctgccggcggacatcgcccggctttacgcgggcaatcggcgcgtggacggtgccgcttccggtgagcgtgccgcatacgacggcgaggtattcccggcggatcatacgctgcagcatggctttgccgagcagggcggcggagagcatatttttggcgacgatgatcaggccgctcgtgtcggcatccagccggttgatgcagcggaacgggcggatttcgccttttgcacggtaatatcccgtgacggcgtttgcaagcgtatccctctggtgcgcggcagacgggtgtaccggcatgcctgccggcttgtcaatcaccagaagatcttcgtcctcgtaacagatcgcgaggggaatctgctgcggaaaaatggaggtgccggaggtattctcctccagatgaagacagagaaggtcgccggtgtgaagcgtttcattcatatgcgcccacacgccgttcaagagggtgccgtggtctgttttctttaaatgtaccagtatcggcccggaatagccgagactttttaaataatgcagaatggtctgcccgtccgtggcggataaaatgcggtaggtaagggtgcgcagcataaaaattcctcctgtttcatgtaacgctattatagcgaagcggcaggggagatgtaaagacggcatgtatttgtttgcggaaaaaagaggggaaaagcacggaaaacatggcccatacatagaatgtatcaataaagcttttcaggtgcgttgtgaaaactttcttatctccgctcacaccagaacaggaaatggaatgcctgaaaaaaatgaaagacggcgaccttgaggcaaaaaaagaactgacgcttcggaatatgcgcctggtagcgcatgtggcgaaaaaatatcagaattccgatgaagatatggaagatctgatctccatcggaatcatcggtctgatcaaggcaatctctacttataaagaagattacggaagccgcctggcaacttacgcggcgagatgcattgacaatgaactgctgatgcatttccgttccaaaaagaagacggccagagaggtctctctgtatgaaccgatcggaacggacaaagagggcaatcagattcatctgctggatattgtggagagcgatgaaccggatgtggtggagacgatcgagaccgacagacgcaccagagaggtgctggcacttgtgccgaagctgctttccggcagggagcgctatatcatagaaaaccggtacggtctctatgcctgtaaaccgatgacacagcgtgagattgcagcggcgcttggaatatcccgctcgtatgtgtcgagaatcgagaaacgggcgctggaaaaactgcgaaaaggaatggaaagcgcggggggcgggagataaattgccgcttccctttttctacaaatgatgttatactaaacatgtctttttaacaaatgtattttctaagatattcagcagtgttcactgcacagagattccagatctttctataatgaaaaggagaacaggttgtatagcagagtagcaacagcaacgatacgcggtatccagagtgtgcctgtctgcgtggaagcggatgtgagcgacgggatgcctgtttttgagatggtcggttttctggcgtctgaggtcaaagaagccagggagcgggtgcgcacagcgctccgcaatgtggggtgtgcgctgccgccgcgcagaattaccgtgaattttatgccggcggacatccgcaaatccggagccgggtttgatctgccgattgcagtggcggtgctggctgcgatgggaaggcttccgcatgcggtactggatgatgtgctgatcgtgggtgagatcggattaaacggcgtggtgcagccggttcacggcgtgctcccgatggtggcggaggcaaaggaacgcggaatccggcgctgcattgtgccgcgggcgaatcgaaaagaggcggcgcttgtttccgggatgcttgtctgcggtgtggaaaatatcggggaggtcatgcgtcttcttgaggatgcgtcgtgggagaagtacgccgcagaggaatataatatagaagaaacacagcccgcagtgcttcccgatttttcggagatacacggacagcggctgatgaagcgggcgtgtgaggttgcggtaaccggaatgcacaatttgctgtttgtgggaccgccgggtgcgggcaagactatggtggcatcgcgtatcccgtccattctgccgccgcttgcggaggcggagcgcatggagttgtccaaaatctacagtgtaaaaggaatgctttctggggagaacggtctgcttacgcagcgcccgttccgggcgccgcatcacaccgtgagtgtgcaggggcttacgggcggcggaagaatcccgcagccgggggagatctcactggcacataagggcgtgctgtttctggatgaacttccggaattcgccagggagacggttgaggcgctgcgccagccgctggaagagggggcggttcatctggtgcgtctcggcggaagttatgtctatccggcagattttatgctggcggcggcgatgaatccgtgcccgtgcggctattatcccgatatgcagaaatgcaggtgtacgcagacggcgatccaccggtacttagagaggatcagccagccgatcttagaccggattgacatttgtgtggaggcgccggcgctgacattcggggaattaaccggacagcaaaaagaggagacatcggcggcaattcagaagcgcgtggcggtggcacaggacattcaacggaagcgctaccggaaggaggcgttttcgtacaacagccagatacctgccacgaagatccgggagtattgtgcgcttgataaaaagcaggagcagtatatggaagagatctacggaaagctgcagctcaccgccagatcttaccacaagcttctgcgggtggcgcgcacgctggcggatatggacggcggcggtcggatttgcgaccggcatctggaggaggcaatctgctacagaagctttgacagaaagttctgggagaggtgaagagatgaattatgcgtattggtttgcaaatattcccggactctccaactgtgcgaaaatcagtatccatgaaaaggtcgggaatgcacaggatatctattttcttagcgaaaagcagatggaaaatctgcaattattggcaaaagaaatacaggcggttcgggctgcgcaaaagacggacatggaggaagcgtacgctaagatgtgtgaatccgggatctcgtttgtgtcgctggaggatgcatcttatccaaagaggctccgccatatcgcaaatccgccgtacggactgtatgtaaagggatgccttccgcagggagagaccgttgcgattgtcggtgcgagaatgtgttccgaatatgggcggacggttgcgagggaactcgggagaatgcttgcggcgcgcggcgtcggtgttgtaagcggaatggcgcgtggcatcgatgctgcggggcatcagggagcgcttgatgtgggtggaatcagctgcgccgtcttagggtgcggcgtggatgtctgctatccgaagagcagccgggcgctgtatgaggagattctggaacggggctcggttgtctcggagtatccgcccggcacgcagccgattccgggatattttccgcagcgcaaccgcatcatatcagggcttgtccgggcggttgttgtggtggaggcaaagcagcggagcggatcgctgatcacggcggattttgcgctggagcaggggagggatgtctatgccattccgggcaggattacagatgccttgtcggcgggatgcaacagcttaatccggcagggagcgggggcagtttccgatctcgaatcgtttgtacaggagcttgcgccggatcccggagcgggcggggagacatgcacctttgaaaaattattacttgaaaaagaagaacgcttggtgtatagttgtgtagatttacgaccgaaaagtatggaagaacttctggaggagacagacctgtctgtgcccgaactggcgcagattctggggattcttctgaaaaaggggtttgttacggaagcatttaagaattgttatatcagacggatttgagaaatcagcataaaggagatgtatgaatggctaagtaccttgttattgtcgagtcacccgctaaggtaaaaacaattaaaaagtttcttggaaaaaattatgaggtagttgcctcaaacgggcatgtgcgggatctcccgaagagccagatgggaatcgatgtcgagcatgattatgaaccgaagtatatcacgatccgcggaaagggagatatccttgccaagcttcgtaaagaagtgaaaaaggcagacaaagtgtatctcgcaaccgaccccgatcgtgagggagaggcaatatcatggcacttaagccaggcgttaaagctggacggcaagaatgtgcggagaatcagctttaatgagattacgcagaacgcggtcaaggcgtccttaaagcagccgcgcgatatcgatatgaatcttgtcaacgcacagcagaccagacgtattctggaccgtattgtgggttacaagatcagcccgcttctgtgggcaaaagtaaagcgtgggctgagcgccggaagagtacagtcggtagcgctgcgcatcatctgcgaccgcgaggacgagatcaatgcattcattccggaagaatactggacgctggatgcaaagctcaaggcggacggcgaaaagaagccgttgacagcaaagttccacggggacgagaacggaaaactggcgattacctgccgcgaggaggcggaccgtatcatggacgagatccgcggagagcggtttgaagtcctggaagtgaaaaagggtgagcgcgtgaagaaagcgccgctgccgtttacgaccagtaccttacagcaggaggcatccaagacattgaatttcccgatctccaagacgatgcgtattgcccagcagctctatgagggcgttgacgtcaagggacagggaacggtcggtctgatcacctacctgcgtacggattccgtccgtatttcggatgaggcggatgcggatgcgagagcgtatatcgcacagaattacggggaagaattcgtagcgacacagaccgttacccagaagggcggcgccaagatccaggacgcgcatgaggcgatccgtccttccgacattgcgagaacaccggcggtggtcaaggaatctctttccagagaccagttccgcctctatcagctgatctggaagcgttttgccgcaagcagaatggcttctgcggtatatgagacgacgaacgtgaagatcggtgccggaaagtaccgctttggtgtcgcggcatcaaaggtctcctttgagggatttatgtctgtgtacacgagcgaggacgacgagaaggacacgaacaatgttctgctgaaaggaatcgatgaggatacgaagcttacgctggacaccttcgatgagaagcagcattttacacagccgccggcgcattacacggaggcgtccttagtcaagacgctggaggagctgggaatcggacgtccgagtacctactcgccgacgatcacgacgctgcttggcagacgttacattgtcaaggaagcgaagaatctgtatgtgacggagctgggagaggtggtcaatcagattatgaaggaatccttcccgagcatcgtggatgagcattttaccgccaatatggagtcgctgctcgacagcatcggagagggcgctgtgaactggaagacggttgtgcggaatttctatccggatctggaagccgcggtggaagtggcggagaaggagctgcagaaagtcaagatcgaggacgaagtcacggatgttgtctgcgaccagtgcggaagaaacatggtggtaaaatacggaccgcacggaaaattcctggcatgcccgggcttcccggagtgcaggaacacgaagccgtatctggaaaaaatcggcgtgccatgtccgaagtgcggaaaagacgttgttctccgcaagacgaagaaaggcagaaagtatttcggttgcgagaataatccggagtgcgattttatgagctggtcacgcccggtagcggagaagtgcccgaagtgcggcggctatatggtggtaaaaggcaataagatcgcctgtgcagatgcgggatgcggctacacccgtgacagaaaagcggacgaggatacaaaatagttaaaaaaatatgtcaaatattacgaaaatattgaattttcagaattgacgtgttaaaatatgaaatataacgaaaaagagattcgaaacgaaatgggggcacggacatgagtgttcaattgttggacaaaaccagaaaaatcaataagctgttgcacaataacagctcttcaaaggtcgtgtttaatgatatctgcgatgtgttgaaggatattcttgcatccaatattctggtcatcagcaaaaagggaaaggttcttggaacgggcgtgtgtcccggagtggatgagatccaggaattgatcgtggacgaggtgggaggtttcatcgacccgctgctaaacgaacgtctgctcggaatcctctctaccaaggagaatgtcaatcttgagacgttaggtttcgtagatcacgtgaaggaatacactgcgatcatcacgccgattgatattgcgggtgagcggcttggcacgctgtttgtctacagagaagacagacagtacgatattgacgatatcattttgagcgaatacgggacaaccgtggtcggtctggaaatgatgcgctccgtgaatgaggagaatgcggaggagacaagaaaggttcagattgtcaaatctgcaatcagcacgttgtcattttcggaattggaagcgatcattcatatttttgatgagatggacggcaaggagggaatccttgtggcaagcaagattgccgaccgcgtgggtatcacacgatccgtcattgtgaatgcactgcgcaagttcgagagtgcaggcgtgattgagtcgcgctcttccggcatgaagggaacctacatcaaagtattgaacgacgttgtattcgacgaactcgacaagatcaaaaagcagaatcagaaaaaataaacaggacgaaagggcgtatcgtaagggtgcgctcttttttatttccgtggaacgtggctttttatgcgggtttatttgacaattttgctaatatcttgtacttattatgcaaaaatctacaagatagtgtaaaaaataacaaaaatctcttgcaattacgaaaccatattttataatagaataagatagtttgggaaactaggtgaagcggagggcgatacatatgataactacgaatgcgttcgactatattaacatcatggataaggcggcggatgccagctggaaacgtgagtcggcaatttccaacaacatagcaaatgcggatactccgggctataagagacaggatgtggattttgaatctgcgctgaaacgggagcttggcagctcgaagtatattccgctggataagaaagtgcggggactgaactcggatctttcgggcttagatgtgtctacctatacggattcctccaattattcctatcgtctggaccgcaataatgtggatgtggatacggagcaggtggaactggcatcggagcagctccgctatgagatgctgacgacatcgatcaacgaagaattcaatcgtatgaaattagtgcttaaataaacaggaggtagcatatgggattatttcagtcttttgacatcagtgcgagcggtatgacggcagagcgcttccgcatcgacaccattgcagaaaacattgccaatgtcaatacgacgcgtacggagaatggtgaaccgtaccgccgcaagattgtgacgtttgcggaaaaggatctgactccgttcagcaaatattatcagtcatccagagcgcgggctgtaggcaacggcgtgaaggttacctccgtcaaggaagatacagagaccgattttacaatggagtatgatccgtcccatccggatgcggatgagaacggctatgtgcgttatccgaatgtgaatacggtgacagagatgacgaacctgattgacgcgtcccgtgcatatgaggcgaacacgacggcgtttaatgccagcaagagcatgattcaggcagcacttaagatcggtcagtaagacatagattaggatgaaacgggggaaatacagatggatatcagtttattgacgaatgccacttcaccggattacatgagtgcggtaacacagaagacactgttgtctgtggacaccgatgagagctttgactcggtgttgtcttcggcgatcaatatgctcaacgagacgaatgatctgcagaatgattcgcagtcggcaaagatccagttcgcgctgggcgaggcggacaatcctcacgatatgcagattgcggcagccaaggcgtatgaggcgctgcagtacacggttgcagtgagagataagatgctcgatgcatacaaagagatcatgaacatgcagatttaatgaatggagttagaaattatgccggaacaggtgcaaaagattttaacgaagataacggattggtggaaaaagtttacaaccaagcagagaatcctgctcggaagcattgtggcggtaattatactggcattggtgattctggcggtggttgtcgggaagccgaacatggtaacgcttatcgagtgctcctccacagcgcaggcgggtgaagtaaaagaccttctggacaatgacggaagcatctcctaccagatgtcggatgacgggctgacattctatgtggatgaaaaggacaatgcggcggcgtcgattctgcttggacagaacggcgtgccgacggaaggattttccatcgataatgtattcagcggtggattcagctccaccgaggcagacaagactaagaaatacaagctgtatctggagaattatttcgcagatcagctggagacactgtcaaatgtcgagagtgcttctgtgacactggacatcccgaatgatgatggcacgattcttgcaagagagcaggattcctacgcggcggtaattcttaccttgaattcagatatgagcgacgagcaggcacagggactggcacagtacatagcgacacagctcggcaatgacacgacggacaatgtcctgatcctggactcgaactccaatgtccttttctcgggcggggattccgactcgtcgattggaacggcaagcagtcagctttccctcaagaccaagacggagaatctgcttaagagcgaggtgaaggatgttctggtcggctccggactttatgatcatgcggaagtggcggcaaagcttgatatgaattttgatgcataccgcgagacggaacgccagtattcggcaccagacggtcagacgaacggtatgatcgacgaacagagcaattatgagtcgaacagtgtcggcggcgcagctgctacaccgggcacagattccaatgacgatacatcctatgtgattgaggataacaattataccgagtccacgatcaccgataccacgacaaagtatcagaacaatgaaaaagtgacggaccgcacggcggcgaccggaacgatcaattacgatacttcctccattgcgatcgtggtaaaaaattatgtgatctatgatgaggacacactcaggacatccggtgcgctggataacatgacatttgacgagtatattgcggcaaacagtgacccggtcaagacgacggtggatcaggataattacacgatgatcgccaatgcaacggggtttcctgaggcaaacatcagcatcatcgcttatgacgagccgattttccagtattcttccggtggaagaaccctgtcagattatctgcagatcatacttgcggtactgattcttctcctgcttggttatgtggtattccgcagcaccagaaaggagaaacaggcagagatggaggaggaactttccgtggaaagcctgctggaatccacaaaagagaaccaggagccgcttgaggacatcggctacaatgagaagtccgagacgcgtttactgatcgaaaaattcgtagaagaaaaaccggaggcggctgcatcgttactgcgcaactggctcaacgaggagtgggagtaatatggcaaaaaacgaggaatttacaggactgcaaaaagctgcaattcttctgattacactgggaccggagcggtcagcagatatctttaagcatcttaaggaggacgagatcgaggaacttacccttgagatcgcaaataccagaagtatttcaccgcaggtcaaggaggatgtcttaaacgagttctatcagatctgtctggctcagcagtatattgcggagggcggtatcggttatgcgaaggaactgctcgacaaggcgcttggcgcggacaaggcacaggaggttatctccaagctgacagcatcccttcaggtgcgtccgttcgagtttgtgcgcaagacagatccaagccagctgctgaacttcattcaggacgaacatccgcagaccattgccatgattctgtcctatctgacagcaccgcaggcgtcgatggttctgggggcgctgccgccggaaaaacaggcggatgtcgcaaaacgtatcgcgatgatggatcgtacatcgccggatgttatcaaggaagtggagcgggtacttgagagaaagctttcttccctggtcaaccaggattacacaatcgtcggcggcgtggacgctattgtcagcatcttaaatgcagtcgaccgttcgaccgagaaacatatcatggagtctctcgagatcgaagagccggagcttgcagacgagatccgcaagaagatgttcgtattcgaggatattctgctgcttgatgaccgtgcaatccagcgtgtactgcgagatgtggataatgcagaccttggcgttgccttgaaggcggcgaacgaggaagtacagaatgttatatttaagaacctctccaaacgtcttgctgcgatgatcaaggaagatatggagtttatgggacctgtgcgaatgaaggatgttgaggaggctcagcagaagatcgtaagcgtcattcgtaaactcgaggatgcaggcgagattgtaatctcaagaggcggaggtgacgagatcgttgtctaatctttataaacagtgggttgttcagacggattccacaaacacgcgcatcatcgattccaatgtgatcctgcagcagcacctgaaacaggatctgccgcagacacagacaccggcacagaatgtgcaggaagaggaaggcggattttcagccggacttgtgacgggtgatccgggtcaggtcatcaaagcggagccgcagattgattatgaggcaaaggcaaaggcaaaagccgaggagatccttgcggcggcacagcagaatgccgatgcgatactggcacaggcaaacgaagatgccgaggagatccgtacatctgcaaagacgcaggggtacgaggagggcagagcttcggcggagcaggagaatgagcagcttcgcgtgcagcttgaggagtcctacaggaaaaagcagggagatcttgacagcgattacagggacaaacgcgaacatatggaacaggatctggtggatgtcatcgttaccgtctttgaaaaagtgtttcatattcagtttgacgacaaaaaagagatactgatgcatctgattgaagatgccattttaaatattgaagacgacaagcggttccgggtgaaggtggcggaggacaatgcactgtttctggagaatcacaagaccgagatcctggatcgtgtgggacatgacattgagcttgagattgtctcggacgcgacggtggagggaaatgactgtacgatagagaccgattccggcgtgtttaactgcagtctcggtacacagcttgagaatctgatcaaagatatccggtctttatgttcgtaaggtgagagaatgatgacacatcaatttgaaaaatatttacaacttggagaaaagacctacttcaaccgccttggaaaggttgtaaagattgtcggacttacgattgaatctgtcggaccggatgcaaagttaaacgatctctgcagaattgtcattgacagagagaaagaccacgcggtgatggcggaggtagtcggattcagggataagagacttttgctgatgccgtttgaaaatgtggaaggcatcggggtaggatgtatcgttgagaataccggacatccgcttggggtgcttgtcggggacggcgttctgggacacacactggacggtatcggaagaccgaccgacggcggagtcattgagggcggatgcgaatatccggtcgaggcggatccgccggatccgatgagccgtaagattatctcggaggtgcttccgcttggtgtaaaggcggtagacgggctgattaccgtgggaaaaggacagcgtatcggaatctttgcgggttccggtgtcggaaagagcaccctgctcggtatgttcgcccgcaatacaaaagcggacattaatgtcattgccctaatcggagagcgtggccgtgaggtgcgcgagtttatcgagagggatctcggggaagagggaa

SEQ ID NO: 11636 - DNA, 12746 bp, Unknown
  gut microbiota DNA sequence
atattttttttatattttttatttttcttttatttttagaaaaatgcttattcctcgtcactgtcatccttggcatcgtcttcagcacgcttcaacagctcatccatcagctcgtcatccgtctcggaattgtctgactgaccggctgctttcttcgcattttctgctgcaagagccgcgcttgccgcctcttcctcatcggtcagaagctcagaagtatcggctgtctcaagctccttattctcgcgcaccttcgcaatgcttgccacagtcacattctcgtccagattgatcagcttgacaccggaggtaatacgtccaagaagtgccgtatccgctaccttaatgcggataatgataccctctgtcgtgattaacattatttcattgtcatggttgactgccttgacaccgacaatattacctgttttctcggtaatcttgtagcacttcacacccttaccgccacggttctgtgtggtaaactcggagattaacgtgcactttccgagacctttttcggaaacgatcatcagggaatctccctgggattccatctgcatgccgacgacctcatctccgtctgtcaggttcataccaatgacgcccatggatgttctgcctgtctttcttacatctgtctccttgaaccggatacactgtccgtatttggtgacaaggaaaatatcctgattattatcggtcttcttcacctcgatcagctcgtcgtcctcgcgcagattgatggctgcaagacctgtctttctcacatttgcataatcggtgatcggtgtcttcttcacgatacctttctttgtcgccatgaaaaggaaatgtccctcggtgtactcccggatcggaatgaccgcagtaatcttctcgcccggctgcagctgaagcaggttgatgattgcggtaccgcgcgcggttctgcttgcctccggaatctcataagccttcatgcggtatacacggccggtattcgtgaagaacatcaggtaatggtgcgatgtcgtcatcagaagttcctcgatgtaatcgtcatcaatggtctccattcccttgattcccttgcccccgcggttctgcgcacggaaattgtcaaggctcatacgcttgatatatccaagcttcgtcatggtaatgacggtattggtaaccggaatcaaatcctccatggaaatatcatattcgtcaaaaccgatggatgttcttctgtcatccccgtacttgtcggcgatcagaagaatctcctcacggatgacgccgagcagctttttcttgtcggcaagaattgccttcaactctgtgatgcgctccatcaattccgcgtattcgttctccagcttctcgcgttccagacctgtcagcgcacgcagacgcatatccacgatcgcctgtgcctgtacgtccgtcagcgaaaaacgctccattaagcggtcttttgcttcctgggtgttcttgctgctgcggataatgttgataacttcatcgatattatcaagtgctgttaataatccctgtaagatatgggcacgttcttccgccttgttcagatcatatttcgttcttctggtgacaacttcttcctgatggatcaggtaatagttgagcatctcgtaaaggtttaagaccttcggctggttgtcaacgagtgccagcataataacaccgaacgtatcctgaagctgtgtatgcttgtacagaaggttcagcacgacattcgggttcacatcacggcggagttcgatgcagattctcataccttgacggtcggactcatcccgcagatcggtgatgccgtcgattttcttatctctgacaagctccgcgatcttctcgatcagacgcgccttgtttaccatgtacggaagctctgtcacaacaatacggttcttgccgttctgcatcggctcaatgctggtcaccgcacggactctgacttttccgcgtccggtacggtacgcttcgttgattccggcggttccgagaatcgtacctccggtaggaaaatccggtcccttgacgatcgtcaaaagttcctcgatatcggtaccccggtcttccaacacctggttatcaatgatctttaccacaccgttaatgacctcgcgcagattgtgcggcggaatattggtcgccattccgacagcgataccggtcgtaccgttgactaacagattcggaaaacgggacggaagcactgtaggctctttttccgtctcatcgaagttcggaacaaaatcaaccgtatcttttccgatgtccgcaagcatttccatggaaatcttggaaagtcttgcctcagtgtatcgcatagcagcagcgccgtcaccatcgacggaaccaaaatttccatgtccgtcgacaagcggataacggaatgaccagtcctgtgccatattgacgagtgctccgtagattgagctgtcgccgtgcggatggtatttacccatcgtatcaccgacgatacgcgcacatttacggtgcggcttgtccggtccgttgttcagctcaatcatggaatagaggacacgcctctgtaccggcttcaaaccatctcttacatccggcagcgcacgctgtgcaatgacactcatggcatagtcgatgtaggaactttccattgttttcttcagatccacatcatgtatctggtcaaaaatcttgtcatccataggatttttctccatttctatcaattacatactctgtacagtccgtctgtcagatatcaagattctgtacatactttgcattttcctcgataaattcacggcgcggctctaccttgtctcccatgagcgtcgtaaatgtcacatcaatctcagaagaattctcctcatcaatcatgacacgctttaagatacgcttctccggatccatggtcgtctcccagagctgctcggcatccatctcaccaagtcctttgtatcgctggatcttgttgttgccgtcgcggccgatctctgtcagaatgctgtttaattcgttatcatcgtacgcataccacacgttcttgttcttctcgatcttatagagcggtggagtagccagatagacatgtccctgcttaatcagctccggcatgaagcggtacaaaaaggtcagcatcagcgttgcaatgtgtgcaccgtcgacatcggcatcagtcataatgatgatcttattatagcggagcttactgatgtcaaaatcttcatgaataccggtaccaaacgcggtaatcatcgctttgatctcagcattgccataaatcttgtctaatcttgccttctccacattcaaaatcttaccgcggagcggcaggatcgcctgcgttgcacggcttctcgccgtctttgcggaaccgccggcggaatctccctctacaataaagatctcgcagttcttcgggtctttgtcggaacagtcggcaagcttgcccggaagagacattccctcgagggcggtctttcttctggtgagatcacgcgcttttctcgccgcttccctcgcgcgctgcgcgagcagtgatttttcacagatgttcttcgccaccgtaggattctgctccaggaagtaggtgagctgctcgctgacaaccgagtcaacggcgcctcgcgcctcgctgttgccgagcttctgcttcgtctgtccctcgaactgcggctcctcgatcttgatgctgatgatcgccgtgagtccctcgcggatatcgtctccggtgagcgccggctccgtatcctttaaaatcttattcgcacgcgcataggtattgaaagtcttcgtcaatgcattacggaaaccggcaagatgtgtaccgccttccggtgtgatgatattattgacaaagctgtaagtcgcatcattgtaggaatcgttgtgctgcatggcaacttccacatagactccgtctctggttccctcgcagtagatgacttccggatagagcgcttccttgctcttgttcaagtaggtcacaaattccttgataccgcctgcatagtggaattcgtgtgtatgcaccggatccactctggcgtcggagagcacaattcttaagccttttgttaaaaaggcggtctcgcgcagtctctgttttaacgtatcgtaatcatagacggtttcctcaaagatcgttggatccggatggaaggtaaccttcgttccgtgtttttcggcagaacacttaccgataaccttgaccggttcatccggcttgccaatcttataactctgactgtaaatctgtccatccttgtatacctcaacagaaagcttcgtggatagggcatttacaaccgatgctcctactccgtggagaccgccggataccttatatccgccgccgccaaactttccgccggcatgaagcaccgtgtatacaacctccagtgcagactttccggctttgtgattcatcccgaccgggataccgcgtccgtcatcctccaccgtgatggaattgtccggattgatcgtcacttcaatatttttacaatatccggcaagcgcctcatcaactgcattatctacaatctcatataccagatgatgaagtcctctcgcagatgtacttccaatgtacattccgggtctttttctgactgcctcaagtccctctaatatctggatttgatctgctccgtattcattttctgtacccattttattctccatttctgcatcagccaggaaaatggctcacacttactatattgatctctcatatacatgaccggctataacttcaaatacccggtttaccgtaaaacgatttctcacaaattcatccagtcccgtacaggtaataatggtctgcgtatcggaaatattgttcagcagataattctgacggctgctgtcaagctcggacaacacatcatccagcagcaacaccggcgtatcggaaatggacttcctcacaagttcaatctcggacagcttcaacgacaacgccgatgttctctgctgtccctgtgaaccgtactttcggatatcgacgtcaccgatcgagaacagcaggtcgtccctgtgcggtcccaccgatgtctgacaaagctttttgtccttttccttcgccctgctcaactcatcttcaaaaaagatgtcgtcgatattcggctcatattttaaaaaaagctcttcctttccgccggaaatgcggtaatgaatgtcacttacaatctcccggagttcatccacgaactgttttctgcgtcggatgatcttctttccggtctcaataagctgcatgtcccagacgggcagcgtatcggaaagactcggccggtagatcatatcttttaatagcttgttgcgctgcgccagaattttattgtaatttgtgaggtctgccagatagatccgatccagctggcacaattcggaatccaaaaatctgcgccgctccgccggaccgttctttataatattcagatcttccggtgaaaaaaacacaatatttaaaattccgaaaagctcactggcttttttgatcggaatcttgtcgatggcaatccccttggcgcggttcttcttcagatgcatatcgatctgatattctctcccaccgcgcacgacaaccgttttcagatgagcttcttcctcaccgaaacggatcatctccctgtcacggcttcctttgtgggacttggtcgttccgctcatatatgccgcttctaagatatttgtcttgccctgcgcattatccccgaataaaatattggttccttcatcaaaagaaatctctaaattttcgtaatttctgaaattcttaagctcgattgaccgaatgttcatctgactatctttactgtctcgccattataggaaacaagttcaccgccgtgcagcttttttcctctctgcgtctctacttccccgttcacggttacaagtccatcctggatcacgaactttgcatccactccggactctacaagtccggcttttttcagtgcctgtcccagtttgatgaattcatcctctttgcgaatctctatttctatcatatctcttctacgcctcgtttctaaacggtgctggcattaaagttcaccggcagtatcagataaatgaactttccttcatcatccttgataaaacacggtgcctttggattcaccatgtaaaggcttacctcctcctcatcgatcacgcgaagcgcgtcaatgaagaacttcgggttgaatccgattaaaatatccttgccctcttttacaatatcaatatcctcattcatagaaccgatgaaggaattgatctttaactccatgtttccgtctgtcacattcatgatgatcggctttttgtcaccctctttgacgaggagcgtcgcacggtcgatacagtctaacagctcacgcttgttgatcttgacctttgtctcataatcggaggagagcatctgctcgatcttaaagtattcaccctcgatcagtctggaaacgacagtcgtatcatcaaattcaaatacaatgtggttgtcggtcaggaacatattgacatcttcctccgcgcttcccggaagaatcttgctcacttcctgcagcgtctttccaggaacgacaaccttcttgtgctcatagttattctttaactcgatgttgcggatggaaatacggtggccgtcgagagataccactttcaaatgattctcctcgatctcaaaaagctctcccgtcattaacttgttattgtcgttgtctgcgatcgagaagatcgtctggcgaatgacttcttttaaagtgaattgagataacgtgatggcttcatttctctcgatataaggaatataggaaaaatcatctccggattttcctacgatattgaactttgctttttcacaggtaatggtcgtcttaaaggaagcgtctgtctcaatcacaacatcactgtcaggaagctttctcacgatctcggaaaatatcttggcatccagagcaatcactccgcgttctgcgatctcaccttcgatcttcgtctcgattcccaattccatatcattggcagttaatttgatctcattggcagaagcatcaatcaggatacactccagaatggccatcgtggttctggttggaaccgctttcgatacgatattgacaccgtgcagtaaatttgatttggaacagatcagtttcatagttgttaataactccttcctgtggttcgtggaatatatggtgcgcacgccatacatgattgttataaaaagagattcaaagtaatattcttagggggtgtttatatgtgaataagtcacacagcccttgatctataagactttcaggtaaaaaatgaagggtgaaagtctgtgaattacgtgcggatgaaatctggacaacctgtgaataaaaaattatgtaaacttgaaagaaaaatgtgaaagaaaccttaagcggtttacataatgatatttatccagtttcatgaacaaaccttacacaatatttcaacaaccgaatgtgaatatctagttcgggttgatctttttcttgatggtgtcgatgagactgcgtgtcgtctcgtccgactcgtactcatccgaaatcttctggacgccgtggatgatggtagagtgatctctgccgccgagcagcgcaccgatggaatctaacggtgtgtcggtcatattcttacataaatacatggcaatctgacgcggccttgcaatgtctttgctccggttcttggagatcatctgatctaaggaaatctggaagtgctccgatacgacctcgataataagctgaggcgtaatctccttcggcttgtccggggtgataatattctgaagctccttctgggcaatctccattgtaatgtccgttttctcaaggttggagtaggcgagcagtttattgagcgcaccttccagctcacggatgttggacttgatgttggttgcaatgtaattaaggatctcgtcgcttaagttcatctcatccgcttcgatctttttgcggagaatcgccattcgtgtctcgtagtccggtgttccgatgtcagccatcagaccccactcgaaacgggaacggatacgttcttccagtgtctccatctcttttggcggcttatcggatgtaagaataatctgtttgccggcggagtggagggcattgaacgtatggaaaaattcttcctgcgtactttccttacctataataaactgtacatcatcgatcatcagaacatcgatggtgcggtatttttcacgaaacttgttcatcgcggctgcattaccgcttcggatggactcgatgacctcgttggtaaattcttcggaagtcacgcagataatcttcgcatccggattgcgttccaggatgaaatgaccgatggaatgcatcaggtgcgtcttgccgagtcccggtcctccataaatatagagaggattgtatgcctcgcccggagattccgcaactgcgagagaagcggagtgggcaaaacgattattgcttccgacaacgaatgtatcaaacgtataattggaattcagattcgatttggatgccgcttctgagtaaaaaggctttttctgtttattaggagaagaagcgatcgacttcgcctgttccggaagaatgaactttatctcgtattctgttccggtgatctctgtgattgctactttgagcggcagatagtacttcttggaaatatagctgagtcccaactgctcggacgggacaaggatatatgcggtgttcccagtgacaccataaaattcaaggggacgtaagaatgtgttaaaagcaatgtcgctgatgtcgtgttctgtcttcacggtcatcaggatctcgtcccatttttctaaaatctgatccatgtaaacgctccaatttcttatcatactaaaaaaatcctacaccctctatcctacaccattttagtgctttaatcaatgtttaatttgctttggagcgctatggcgtaggggacactgtaaaagaaaaaaaatcgctatttgggcaaaatacggtgtctatgagggaaaaaaagtgatgtcatgttatagaccgccaaaaatcagcgtttgtgatgcttattcacaacttgtccgtgtattatccatgttttatccacaagttatccacatttcggggataacttatgtcaacggcgtatttaagggctttccgggatccttaattttacttttttttgtggaatggttgtggaaagcaattttacaagatatagttggcatgagtttcttccttatatatatagtggttatttttttccacaaagagcagattgtggaaatgtagatgaattctggtggccgggattattattttatgcttgacttggagactttttctgatataattgagaatgatgttttgtaacgtagaggaggtgaatgcgatatgaagatgacattccaaccaaaaaagagacagagagcgaaagttcacggtttcagaagcagaatgagcacagcaggcggaagaaaagtattggctgcaagaagattaaaaggtagaaagaaattgtcagcttaggccacatcttatgtggtcttttcttctataaaggacatgcatacagaatgaaatattccgagtcattgaagaaaaccaaagatttccagaacgtataccgcaggggaaagtcatatgcgaaccggtaccttgtgatgtacgttctttcaaatcagacagaaggaaatcgtttagggatttccgtgagtaaaaaagttggaaacagtgttatcagacatcatctgacccggctgatccgggaaagctacagactgcatgaagacatgttcaatagtggtttggacattgtagtcgtcgcaaggagcacagcgaaggacatctcgtatcatgaagtggagagtgcgctgctgcatcttgggggtcttcacaagattattagtaaagaaaagaagatggaatcattttgaaaaaaattttgatcgctttgataaaattttatagaaaatatctttctccgatgaaaacgaccaagtgtccgtattgtccaacctgttcgttgtacgggctggaagctgtcgaaaaatacggagccatcaagggcggcacgctggctttatggagaattataagatgcaatcctttttcaaaaggtggatatgatccggttccatagtggaggtattttaagtgtcagaaatgttattaacagcgtatgacggtgcgattctcggaccaatcgcaaaattacttggatgggtaatgaatggagtctactatctgatggatcagattggaatcggtaatgtaggtctttccattattatatttacgattattatttatcttcttttgttcccgcttacttataagcagcagaagttctcaaagctgtcacagaagatgcagccggagctgaatgcgattaataagaagtatcagggaaaaaaggatcaggcatccatgatggcaatgcagcaggagacacaggctgtctatgagaagtacggtgtttccatgatgggaagctgcgtgcagatgctgattcagatgccgcttctgtttgctttgtatcgtgtattcatgaacgttcctgcctatgtaagcggtattaagaatctgttcacacagccgcttggcggcaatgcaacatccctggtagacggcatcatggcgacagagggatatcaggataccatgaccaatctggtgtctacacttaagatcacgacacagccggtagctaattttactgtttcggatccgaccgcgattgccaactcgatcgtggatgttacttataagatgaactccagcggatgggatgcgttaaaggatgcattcccggctctctccagtgagatttcatccacctatgagacggtgtcccatgtaaataatttctttggaatgaatatttcagatacaccgcttcatgtgattacatcaagtttttctgcaggtgcttaccttatggtcattgcagccttgctggttccgattatttcttatctgacgcaggtattgaacatcaagttaatgccgcaggcgactgcaagcggtaatgaccagagcgatgcgatggcacagcagatgaagatgatgaaccgcatgatgccgttattctcactggttatgtgttttactgttccggtcggtctcggtatctactggattgccggtgctgttgtccgtgttgtacagcagtattttctgaacaagcatttcgagaagatgaatcttgaagatattatcaagaagaatcaggaaaaggcaaagaaaaagcgtgagaagatgggaatcgccgagaatcagatttccaatgccgcaaaaatgaataccagacagatggtagacgccaataagaagcagttgagcagtgcggagaaagagcttgaaatcgagaaggcaaacgcagcaaagtcgaaggcaaaagccggaagcatgagcgcgaaagcaaatatggtacgtgattttaacgagcgtaacaacagaaagtaagtttcggggtggagtaagttagaaagggtatggtgatgaaaatggattatattgagatttcagcaaagacagtcgatgacgcaatcacagaagccatcatcaagctggggacaacccatgacaagatcgaatatgaagtaatcgaaaagggaagcgcaggtttccttggaatcaacagaaaggacgctgtgatccgcgcccgcaagaagaacgatacgaatgataatatccgtgatttccttgagagcgtatttaaggcaatgggacttaccgtcacgatccagatcgagaaggaagaggacagcaatgtcgtgaacgttgacttaaagggagacgatatgggtgttctgatcggtaagagaggacagacgctggatgctcttcagtacctgaccaaccttgcagtgaacaagaattccgaggagtatgtgaaggtcaagatcgatacggaggattaccggaagagaagaagagagacgcttgagaatcttgctaagaacattgcttacaaggtgaagagaacgaagcgcccggtttctttagagccgatgaatccgtttgagagaagagtcattcattcgactttacagaatgataagtttgtgacaacgcacagtgagggtgaagagccttacagacatgtggttgttaccctgaagaaatagagtacaaaatgggggtgtcgttcgacatccccattctttcattaaaggagatttatgaaaacagatactattgctgcgattgcgactgccatggcaggatcgggaatcggaattgtcagaatcagcggggaagaagcggtttccattacagatcagatttttcatatgccgggcggtaagaagctttcggatatggagacacacacgattcattacggacatatccgggatggagaggaagtcattgatgaagtgatggtattattgatgcgcggaccgcggagttataccagggaagatacggttgagattgactgccacggcggtgtttatgtgatgaagcgcattttggagacagtcatcaaatatggggcgcgtcctgcagagccgggagaattcacgaagcgtgcatttttgaacggacgtattgatttgtcccaggcggaatctgtcattgacgtgatttcggcgaagaatgaatttgccttaaagagttccatgaaacagttatccggcgctgtctcagatgcagtcaaagagattagaggagagattctccacgagatcgcatttattgaatcggcgcttgatgatccggagcatatcagcctggatggttatggtgagcggctggaatttaccgtga

SEQ ID NO: 11637 - DNA, 731 bp, Unknown
  gut microbiota DNA sequence
aagagggaatttctaccgtaattgttggaaaaccgaatgccggaaaatcgtcacttcttaatactttattgggtgaggagcgggcaatcgttacagaaatcgccggtactacaagggatgtgcttgaagagcagattaacctgaatggaattgtgctcaatatcatagacactgcagggattcgtgatacggatgacattgtggaaaaaatcggagtcgacaaggcgcggaagtatgtgaaggatgcagatctgattctgtatgtagtagatgcctccacgaatctggatgagaacgacagggagatcatgaaactgcttcacggaagacgcacgatcgtacttttgaacaaatccgatctgacgccgttgacaacagcggaggatattcgtgcacatgtggataaagactgtccggttatttctatttcgacgagagagcagaagggaatcgatgtctttaccgagcagatccgggaaatgtttttccggggagaagttacctttaatgatgaagtctatattacgaatattcgtcataaaaccgctttacaggaggcactttctagtttacatttagtagagcagagtatcgcggatggaatgccggaggacttttactcgattgacctgatgaatgcgtatgaggtgctgggaaccatcatcggggaagcggtggaagatgatctcgtcaatgaaatattcagtaagttttgtatgggaaaatagttg

SEQ ID NO: 11638 - DNA, 1068 bp, Unknown
  gut microbiota DNA sequence
aaaggagattcctatgcggaactttgattatatgacaagccctgcgaagttgctgacacccgaaattgttcagatggttagcagcatccacgaacataaaggcaaacaggaattatttctcgaagccaatgtagatgaactgaaaacactcttagaagttgctttgattcagagtacgggagcatccaaccgaatcgaaggtatttttacaagcgataaacgattggaagaattggtaagccgaaaagcagaaccccgcaaccgatctgaacaggaaattaccggttatcgtgaagtgctttccacaattcacgaaggctatgaatatatcaatccaagaccgaacattattttgcagttacatcgagatctgtattcctattcacagtggggtgccggtggaagttataagaattccgataatgtgattgcagaaacagatgccgcgggtcatcagaaagcacgttttattccagttcccgcatttcagaccgctgaagcgatggaagagctttgcgctcgtttccttgaagcatgggaggctgaccgcattgataaactggttttgattcccatgttcattctggacttcctgtgcatccatcctttcaatgatggaaacggcagaatgagccgtttgcttactttgctgcttttttataaggcgggatacatcgttggaaaatatgtcagtatggaaatgctgatcgaaaagacaaaagaaacatattatgaagcccttcaagcaagttctactggctggcatgagggcgaaaacagatatgagccttttgttaaatattatctgggtatcatgctgaaagcatacaatgaatttgaaagccgtgtagagcatttgaagcatcgcagtctttctaagcctgatagaattaaagcagttattgataacaaggttggcaagattacaaagaaagaaatcatggagctttgtcctgatataagcaaagttaccgtggaaaggactttgacggatctggttaaaagcgggtatatcgcaaaagttggtgcaggtccatctaccggctatgtccgtatttaatataatat

SEQ ID NO: 11639 - DNA, 1874 bp, Unknown
  gut microbiota DNA sequence
agcgacgatcgtggaaagcatgttagagcgcacgcatccggattataaggagacaccggacatcaaatggaactttaccaagtttttgattgacagagacggaaacgtggtggaacgttttgagccgacggcggatatggatgttgtccgcgaaaagattgagaactatttataagcgacaggtgccggaatgaaagataagtatgatgctttaaaattagaaaatcaactctgttttccgctgtacgcatgctccaaggagatcgtgcggcgctacaagccatatctggatgagattgatctgacctacacgcagtatattgcgatgatggtgctgtgggagcatggcaggatcaatgtgaaggatatgggggcgcttttgtacctggattcggggacgctgacaccggtgttaaagaagctggagcagaagggctacctcaccagagagcgtgatcacgcagatgagcgtgtgttaaatgtgacgatcacggaggcgggagagcagctaaaggagcaggcggtcgacattccgcggaagatgggcggctgtatcggactgtccggggaggatgcgagggagctgtaccgcatcctgcacaaggtgcttgcgttgatggagcaggaatgaaatggccacggtatgaaaacagtagacaatatacaaaaaactgatataatgaattcatacttatttaaaggagagtttgttatgattgagagaagaaatattgcggtgtgtattgtactgacacttgtaacctgcggaatttatggcatctactggatcgtgtgtctgaccaatgacgtaaatacggtttctggtgatgtgaatggaacatccggcggtatggtggtgctgctgacgattgtgacctgtggaatttacggcatttactgggcatataagcagggagagaagcttgactttacaaagaataaccgtggaatcccgtcaagcaacagcggtgttttgtatctgattctccagatttttggatttggaattattgcatatgcattgatgcagaacgagctgaataagctggcataacagatcggaaatgtaggatgacgaaaaaagcacgtttgaaaaaattgctattatatatgatgttacttggaatggcgggactgctgtacggaatatttgtgtcgtacacagggctcgccattccctgtctgttccggaaagtgacgggactgttgtgtccgggctgcggtgtgacgggaatgtgtgtggctctcctgcatcttgactggaggggagcgttttcctgccatccggtgctgtttgtgctgctgcttccgcttacggcagtattcatctgcggtgcggcaggatatgtgcagaatggacgattccggttcgcccgctggcagaatctcattctttacgtcagcgtcgccgcgcttgtaatcttcggtgtggtgcgcaatctggtgcgttttttgtgaaaaacaggcgaaaaatagattcagaataatttaacgtggtcaacacgtgatcttcacattggctttctatactaaccctatcaaaagaaaacagacattgacagagtcagagaggaatgaagatcatgaaatggaaaaaattagtaacattgggctgcatcgtagttatgacggtatcatccgtaacagcatgcggcagtaatacaacagagaaccagacggtagaagcaacagagcagagtgaggagaaccagagcgattctgtgatcgtgcaggttacagcagttgaaggcgatcagattacagcggatgtaggaacacttacaaccgcaagcgcagatgcatccggaaatggagcaccgggcggagacaacagtggaaacggagcaccgggtgacgcgccgagcggagacgca

SEQ ID NO: 11640 - DNA, 25684 bp, Unknown
  gut microbiota DNA sequence
agcggagatgcgccgggcggagatgcaccgagcggtcagatgccgggcggcagcagttttgaggcttccggtgagagcattacctttaccctgacagacgatacggcgatcacattagagtatctgcagggaagcgacgagggaaatgcagatgacattgcagtcggcagcgtattggaggtagttctggacgaagacaaccaggcagtgtcagtcactgtgcgcaacttaaatgcaggcggcggatttggcggaagcagtgaggtgacaaacggaacttcggcaaatacgattaccgaggacaccgaggtggatggtgagacttacacatccaccggtgatgatgagaacgcacttcgtgttgacggagcggccgttaccttaaaagatatcacgatcgagaagacagccggctcctcatcgaacacagaggatggagatttttacggacagaatgccggacttctggtgctaaacggcgcaacggcaacgattacgggagcgacggtcaataccagcgtgacaaacggtaacggtgtgttcagctatggcgagggcacggttgtaaatatttcggattccacgatccgcacgacagaaaataattccggcggtatccagacgaccggcggcggcaccatgaacgctacaaatctggatgtcgagacacagggaaattccgcagccgcaatccgaagcgaccgaggcggcggtacggtcaatgtggacggcggttcctatgtgacaaacggaacaggaagcccggcaatctactgtacagcagatatcagcgtgtcagacgcgactctgacagcgaatgccagcgagggcgttgtggtagagggcaagaattccgttgcattgaccgactgtgaagtgacaggaaatatgagcaacacttataacggcgattctgatgaaaatattcactgcattatgatttaccagagcatgtccggtgatgcagatgtcggagaggcaaccttttctgcagaaggtggcagcattatggcgaagacgggagatatgttctatatcaccaatacggattgtgagattacgctcaaggatgtcgcatttacacttgccaatgatatattccttcgcgtggaaggcaactcttcctcccgcggatggggcacagagggcgcaaacggcggagatgtgacgctgacggcggattcacaggagtttacgggcaatattctcgtggatgagatttcaagcctggcacttaccatgaagaacggcaccagctacgagggtgccatcaatccggacggggacggcggtacggttgacgtgaccctggatgacaactccacctggacactgaccggtgacagctatatcacaagctttgacggtgatacctccaatatcacggcaaacggatatcatctgtacgtgaacggagagcaggtactgtaacagattggagaggcagttgaaaaagaggctgccacatatcacaggtggcagttgatgataagtaatattacaggaagcacatgatgcagattccgggtggaactgcataggaaacattcgttggagaaaaatgtgtgtatttcttccagccggatgactgcatctgattccgtgtttcttccacgtttggacactgacgggtgcatgtccgacacaccggagacaatgggcggactttctggtgtccctaatggcacctcttcacagacaatataaaaccgcgcgaaccgaactcgccggcatctgctattgaaaatagggcagatgccgactcagacagcggcttcgcgcggttatgttttgttcagaggtgccataagggacacacacaaaagtcctacaaattgtcttccggagtgcggacatgccccgtcggagtgctccaaacttggaaagacacggatcatcgcagatgcagccaccggctggttagaaatgccgcattttttgaacagaatgttccctaggcattccacccgaaatcgtaacagtgtacgtcttataatattacttatctcgtcaaataggacgatctgctgaatgcggcagctttttttcaagagagagattatgtattttagtggaattatatcagacgctccggaagaatttcggatatgtggaaaaaggcagcaaaagtgtgctatagtgaatgaaaagaatacaatcatactggaggggagcagagatggaactgctggatattgtggacgaaaagggaaatccgacaggagagacagtgccgcgggaggtggcacaccgtgagggaatccggcaccgtacggcgcacgtgtggatttttcgcagacgcggcggcgtagtgcagatccttttgcagaaacggagcgacaataaggattcagatccgggctgttatgacatttcaagcgccggtcatattcctgcggggagtgattatattccttccgcggtgcgggagctaaaggaagaactgggtgtggacatgaacggcgatgaactgatttattgtggacaacgccggttccggtttgaaagggaattccacggcagcatgttttgcgacaaccaggtcagcaacgtgtatgcactctggcttgaccgcgaggagaaagcttttgtactgcaggaggaagaagtgtctgagatccggtggatgaactttgcggactgcgtagatgcggtcagagagaaccaaatttcccactgcatttatatggaagaactggaacttctgaaaaatgcactgcatctgcactgattcgaggggaggcagggagaacggctcagtatttccagcggagatccagccggtagtgtccgtccttcactgtgatcggcagatagtcagagtatgtctcctgtgcctccttggagtaatagcggatggtaactgcggttgcccagggggtgtcgtgatatacggtagttccctccagcaacgaaagatcccccacgtttttacggaaatacaccagatcatcatgaaaatattcttctgtgtcttccgcggttacagggatatctctgccgttataagaaagcgcggcgagggagccataatcctcctgctgtaaaagcgcgcagacctgtgcggcaaaatcatcggtatcctcccggcagacatatttgccggttgaaaatgggagaatgtgccgtctggccggaatgtatttcaggcgttttggatcggaacttttatagaaaatggtgccaagtacagacgagccgtctgcaccggcgcgtgccacgcggtttccggtgaaaaatgcctgaccgagtgaaagatctgcagtatagcgcgttccatcaacctcatattgcacggttaccaggtaatcggaaaaacgtctgatgataccggaatcgtaggcaccgatactctggtcatattcggtctgctccacatgaaggacttcgtaatcatccggcgtgagccggccggtataggcgatacttaaaaagatggtctgaaaaagagtaaaaacgagcccgagtacaaccagccacagggcgagatagagaataccgccatatctggattcgttgatgaaacgcccgagacgggtcgcacaaaaatgcgaaaaatgggggcggaaccatcggttgtgattgcccgggctgtctgaaaatgtcgacttcatagaaattctcctgaatataatgagctataaacgggtttgtgaaagctgtatcaatagcagtatagcataaaaaggcgggattttctattatttgacaggcgggaagtgctgtattaagataagggacagatttctggcagaaggagaagacagttggagcagataaagtattatatggcacccatggaaggcgttaccggatatgtctaccggaatgcatacgcaaaatattacggtggaatcgaacgctattttacgccgtttgtggcgaataaaaagcttggacaccgggagaaaaatgacgtctgcccggaacacaatgcgggaatggcagtcgttccgcagatacttacgaaccgcgcagaagattttctggcgattgcagagattctgcgggagtacgggtacgatacggtcaacctgaaccttggctgcccgtcgggcacggtggcggcaagaggacgcggcgccggatttcttgcgatgccggacgagctggatcattttctggaagagatttttgaaaaatgtccgctccggatctccatcaagacacggatcggaaaagagaacccagcggaatgggagcgtctgcttgccatatatgagaaatatccgctggaagaactgatcgtacacccgagggtgcagaccgatttttataagaaccgggtcaatctggaggcatttgcactggcagaaaaaaacagcagacattcgctctgctacaatggcgacattgtggacgcagcgtctgcggcacacatccgggagggctttccgtcggtggataagttcatgatcggccggggactgataaagcacccctggcttctggaggaactttccggcggcagacaggaaaagcaggagcgaaaagagcggtttttccggtttcacaatgcgatcctggagggataccggcagcagatgtccggggacaaaaataccttatttaagatgaaggaactgtgggcgtactggggagagaactttgcggatgcggaccggcatctaaaaaaaatccgaaaatgtgagcggattgctgagtatgaatgtctggtggacgcgctgtttcgtgaaaaagagctgtgcgtgtaggaaaagagtggggtatgcggcaatagatttgtgtgatataacaaaaaagaagctttccaatctgtaacatttatataaaaagacgaaaggaactttttatttgctgtaaaaagtattatactgtactccgtagtatgcttcatgagaacgataggggaattggggaagaggttttaaagagggtatatggaaagctatacgttagaggagaaagtgcttcgcaaggtcatgcggaatattccgatgggactgattgtgagcaaagaggggtttcggcgcaagatttactatgtcaacgacacggcgtgtgagattatgggatacacgcgggaagagtatatcagaaagatgcaggacggatggacggatctgatggatgtcgatctgcgggaggtcatccgcgagcacaatgagcagatccgctccgggacgccgtttgaggtgctctcaagaccgcagacgaagaacggcggttacaagtggatattaagcagggtgaatgtgcagatgcaggagggaccgctctgctatgtcagctttatggatgttaccgaccggatggagcgggaggaactgtgccggcaggagaacgaggtgctcagggagcaggcgatgcaggactcctttacgaagcttctaaaccgcggcgcgctggagaagcatgtctgcgaggcgcttcaggagagaggcggcgatgaggaggatgcattcattcttctggatgtcgataattttaagcagatcaatgacatttacggtcacggagtcggggatatgattttgatgcggatggcgggaatcttaaacgaagtgtttggagaccattcctgtatcggcaggatgggcggcgatgaatttgctgttttcctcagagacatcggcgaccggagagagattgaagagaagattcaaaagcttcttacggaggtacgcgccgaaaaagaacggatgcacctgagcaaggaaccgaccgccagtgtcggcgttgcatttgtgccggaatcgggaagcacgtttgtggatgtgtaccgggcggcggatcaggcgctgtatcacgtgaagaactcgacgaagaatggaatggcgttctatgattttgtataatttttcctattgaaaaaaatcatcatatacggtaagattaagatgttatatgactgacggaacaagtggaagaaccacatggagtataacgtatctaatgccgaccgtctgggcgaatgtacccgggcagtcggcttgttttgaatcagggggctttttatcgaaaaagcacccgggattctcacctctgagacaaaagatgctttggctcaaaaagcataaaatacccactgagagtaaggcaagacaaacacgcctggcaacaaaacttgatattgacagggaaaagcacgctatgctatagccataaaggttagctacaactaaccaatatcatgttttggcaatgctgcctgcgggcagggaacataatcacattacaaagtaagcaggaggaagaatcatgcagaatgaatggagaggctttcagcggggaagctgggaggaagagatcaatgtcagagattttatccagaaaaactatacgccttacgacggggacgacagctttctggaaggaccgacgcaggatacgacagatttatggaacgaagtgttagaactgtcgaagcaggagcgtgaggcaggcggtgtcctcgatatggataccaagattatctccacgatcacatcccatggaccgggctatctggacaagagcaaggagaagattgtcggctttcagacagataagccgttcaaacgttctctgcagccgtacggcggaatccgcatggcagtgaaagcctgcgaggataacggctaccatgtagatccggaagtggtggaatattttaccacgcacagaaagacacacaacgccggtgtatttgatgcctacacaccggagatgcgcgcatgccgttcggcacacatcatcacgggacttccggatgcatatggccgcggacgtattatcggcgattacagaagaccggcactctacggtgtggatcgcctgatcgaggacaaggaagaacagctcgcaacgacccgcacgatcatgtactcggatgtcatccgtgagcgtgaggagctttccgagcagatccgcgcactcaagatgctgaaagagcttgctaagatttacggctgtgacatttccaagccggcgaacaacgtgctggaagcgacgcaggcggtatatttttcctaccttgcagcagtcaaggagcagaacggtgcggcaatgagccttggacgtacctccacattcctcgacatctatgcggagcgcgatctcaaggaaggaacgttcacagagaaggagatccaggagatcatcgaccagtttgtcatgaagctgcgctgcgtgaagtttgcacgtacgccggagtacaactccatcttcgctggggatccgacctgggtgacggagtcgatcggcggaatcggtgtggacggcagacatatggtgacgaagatgtcctaccgctacttaaatacactcaacaacatcggagcagcgccggagccgaatatgaccgtgctctggtcggtacagcttccggagaattttaagcgtttctgcgcacagacatccatcaggcactctgcgatccagtacgagaatgatgatatcatgcgcgtggtacacggggatgactacggaattgcatgctgtgtatcctccatgcgcatcggcaaggagatgcagttcttcggcgcccgcgccaaccttgcaaagtgccttctgtacgcgatcaacggcggtgtagatgagatcagcggcaagcaggtcggaccgaagtaccgcccgatcacttccgagtatctggattacgacgaggtgtgggataagtataaggatatgatgaagtggctggcaggtgtttatgtcaatgccttaaacatcattcattatatgcatgacaaatactgctacgagaagctggagatggcgcttcatgacaagaaggtgcgccgctggttcgcgaccggaatcgctggtttttctgttgtggcggattccctgtctgccatcaagtacgcaaaggtaaagccgatccgcaatgagaacggaatcactgtagacttcgaggtggagggtgacttcccgaaatacggaaatgatgatgaccgtgtcgacgacattgcaaaggaagtgcttcacacattcatcggctatgtcaagggcaatcacacctaccgcggcggaatcccgacgacatcgatcctcacgatcacatccaacgtatcctacggcaagaacacaggtgcgacaccggatggcagaaagaagggcgttgcttttgcaccgggcgcaaacccgatgcatggacgcgacacgaacggtgcggtagcatctctcgcgtcggtagcgaaaatgccgtttatggattcccaggatggtatctccaacacgtttaccatcgtgccggatgcacttggcaaggatgagaagggcgaggagcagaaccttgtggcgctgctggatgcttacgtcgagaagggcggacatcacttgaacgtcaacgtattgaaccgcgagacgcttttggatgcacagaaacacccggagcagtatccgcagctcacaatccgtgtttccggatatgcggtaaactttatcaagctgaccaaagagcagcaggacgaagtcattgcaagaaccttccacgagcgcatgtagttcatgtggaagtgatacagacaggataaatcgcgcgaaccggaaccggtgccctgctgcttttgcggcggggacaccgggatacgccggctcgcgcgattgcattatgaatatcagacggatgggatcaaaaaggaggactttatgggaaaaattcattcgatggaaagctttggaacggtggatggaccgggagtccgctttgtggtgttctttgagggatgtcccatgcgctgcctgtactgccataatcccgacacctggcatctggaggatgggcaggagatgagcgcggaagagattctgtcacgcatggagcgcaaccggtcgttttaccggaccggcggaatcactgcgaccggcggagagccaatgctccagattgattttttgacggagctctttgccggggcaaaggaacgcgggattcacacctgtcttgacacgtcgggcattatgttcccggggggtggcggcacgtcggaggaggagcgggaacgcttaaagaaggtggaccggctgctttctgtgacggatctggtaatgcttgacatcaaacacatggatgcggcggagcaccgaaaactgaccggacaggacaatgagaagattcttgcgtttgcaaggtatctggatgaaaaacagataccggtctggatccggcatgtggtcgttccggggattacatttcagagggaagaactggaggctctgggccggtttcttgcgacactctcaaatgtggaaaagctggaggtgcttccgtatcactccatgggaaaagtgaaatatgacaatctcgggatagattacgcattaaaagatacgccacagctcaccaaggcggaggcgaagagtgcggagagcatcattctggaggcaatacgtcaggcgagaaacgtctgactgccggaacggatcgtgcagggaatgatagagaaagtgcatgaagtaaacgatgccgcgtccaatatggcggctatcacggaagaacagtgggcatctgcggagaagattgaggcgactgcggtcagcattcaggaactggcggatgttgtctccgagaacagtgcggacgtgcagaaagactcgaaggagatggaaaacacggctgagacgctgaaggaacatatttccaggtttacgatttagaacttgcagaagaggtactttcgtattatagtgtagatagagactcagattaagaaaggagcatgtattatgaagatcaagaacatcacggatatcgacggattttttaaggtaatagactcctgccagggaaaagtggaactcattaccggagagggggacagactgaacctcaagtcaaagctttgccagtatgtgtcacttaccagtattttaaagacggatgtggagattccggagcttgagcttgtcgcttacgagccggaagatacagagaaaattattaagttcctgatgaagggctgagaaaaagaaccgtcaacacaggttggcggttcttttatgtctttttaaaatttagaattgaggtatttatgaaaccagaagaaacagtatttcacgagataacactgcaggataaggcatggatggaccggaagttcgcggaggatgaccggaatgcctgcgaatactcgtttgcaaataattttatgtggagaaatgtctatcaggtcagagtcgcggaacttcacggctgtctggtagttcggtttatagatggagagattcactgcttttcatttccggttggaaacggcgacaaaaaagcggcggtggaggagctgcttgcgatctgccatgaggaggaaatccagctgctgatagcgcctgccagcgagcaggaccgcgcgcagatgctagagtggttcccgggaagattcttaatcgagggagaccggaacgactatgactatatctatacaagagagaagcttgcgacgcttgccggcaagaaactgcacggaaagcgcaatcacattgcccgctttaaagattcgggagactggtcttatgagccgatgaccgctgagaatgtagaagaatgccgcacgatgacgtatacgtggattcacatgcgcgaggaaaagtggaatgaggagatgaaccaggagatctcggtactccatgaggcgttcgaccatatgcaggagctggggcttgtcggcggagtgctccggagagatgggcagatcgtcgcgttttcgatcggggagcggttgaactcggagacgttcgttgtgcattttgaaaaggcgtatccggatcttcagggagcgtatccgatgatcaaccagcagtttgtcctgcatgaatgtgaagggtatgcgtatgtcaaccgcgaggaggacaccggcgatcccggactcagaaaggcaaagctttcctattatccggatattctccttccaaaatacgaactggaggagagcggggtggtctatgcggaccccgagcgggatgcaccgtatatccaggaaatctggcagaaatgttttggcgacgaggaagattatattcagttttatctgaagcaccgcatgacgagagagaacatgcttgtgattttccgagatggaagaccggtatcgatggcaagtttcctgccggtgcagtacctgtgcagcggggcgtatgtggacgcgcgctatgtgtatgcggttgcgacactgccggaataccggggacagaagcttgcggaacagattctgcgttttgcggaagaaaaatatcaggtgccgctcattctgtcaccagcggaggagtcgctgatccgttactatgaaaatctgggatttaagaatgcattccagggagaacgcaaaaatgtgagcggcagtgacattacggcgctcgaggtaaaggacacggagccggttgcatgcatggagccagtcacaccggaggagtatgtacggatccgggatgaaaagtgcgcgaaggaagggtatgtacactgggatgtggatgcggtttcctatgcgatggaacttgcggcaagctgcggcggcggtacggcggcagtcagctgtgaggataaaaacacacggaatgagcaggaagatgacagggatattctgatgtatgatatccgggaaaaagagctcgtgatactggagacaacgctgtcggacgacgctctctcacaggtgcttccgcagcttatggaagagacgggaaccagcgcagcatcgtacggacgggagcggggcatgatctggctgccggagacaatggcagatctgccggttgcgggcgacggttatctcgcactgacgcttggttgatgaattttcagaaaaaattatgaaaaatgcataaattttcttgctataaagccaaaatatgttataatataaccatgatatatcttgtatcaaataaacggcaaaggggttggacatcatgagaattaagattacaggaagaaacatcgaattaacagaggggctgaaggcagcagtagaggacaagctgaacaagcttgagaagtattttacaccggataccgatgtatatgtgacgctgagcgtggagaaggagagacagaaagccgaggttacaatcccggcaaaaggaaattatatccgctccgagcaggtaagcaacgatatgtatgtatccattgatcttgtggaggaagtgattgagcgtcagcttaagaaatacagaaccaagctggtgacaaagcagcagaatgcatccgctgtatttaagcaggaattcctggatggagccgcagacgaggatgaggagatcaagatcatccgtaccaagaagttctccatgaagccgatgtatccggaagatgcatgcgtgcagatggaactgctgggacacgacttcttcgtattcatcaatgcagagacggaagatgtcaatgtggtatataagagaaaaggcaacacctacggactgatcgagccggagaattaagagcgtttgagatgtgctgtctcataatgaactgatatatttacagaaagaagagggagaaccgtattgcagatgcggcactccctcttctttttgtggagaaaaaaggagtttgagctgacagagtgcgctttctgtaaaattttttgtgcaaaggggtgtacagttagtactaaagtatcttataattgtagctaagcacgccctgcgtgtgcgagaggtagaaaagttaatcatgtgtgaaacaaaagaaaagggctcaagtaggaaaagctacggacatacaaatgtattggtggatatgatgcagaattatccggggtttatggattatattgcatatcagtacccattggagggagaacggattgaattattggaacagattctgaccgcgcttgcggtgggaagaaagctggaagcggagcagatgatttatcattatggcagtatgattcacgggagggatctcattgcgaggcaggtttttctgtggcttttggggatggcagaatacagcagacgtgagtgtatagcggaagagcgtagataaaaagcaggaaaggggtcgcagcgcaggggcagagctttgaaaaaacaaggaatattcttgtcatcagatcgaaaaaggtatactataaagcgagaaaagttttgaaaaaggagagacggataccatgaagatagttgttttggcaggggggctcagcacagagagagatgtgtccttcaagacaggagagatggttacgaaagcactcagagagaacggacatcaggtaattttacttgatgtttttatgggatatagcaataaggaagaagatcttaccggaatttttgacagagccgaggcggtcagcgtcaaggtggcggcgattccggagaccgcgccggacctggaaaaagtaaaggcgcagagaaaggagcagtcggataatttcttcggaccgaatgtcatcgagctttgccggatggcggacatcgtgtttatggcgcttcatggagagaacggagagaacggtaagatccaggcggcgtttgacctgtttggcatccgctacacaggaaccggatatctgggcagtgcacttgccatgaacaaaggaatggcaaagcagctgttcctcgagaatggaatcccgacgccgagaggcacgtccttaaagcgtggcgaggatgcggcaaagatcgagacctgtggaattcatttcccgtgcgtggtaaagccgtgtagcggcggatcaagcatcggcgtatcgatcgtgcacgacaaggcagaatacgagcaggcattaaaggaggcattccgctgggagaatgagctggtcattgaggaatatgtaaaaggaagagaattttctgtcggcgtcatcgattttcaggcgcttccgatcattgagatcgcgccggtggaaggcttctatgattataagaacaaatacaaagcgggaagtacggtagagacctgcccggcggagctgtccgaacagattacaaaggaaatgcagggctatgcagagaaggtggcagaggtgcttggactcaacacttactcgcgcacagacttccttctggatgcggaagatcacattttctgtctggaggcgaacacacttccgggcatgacgccgaccagtctgctgccgcaggaggcaaaggtgaccggcgtggatttcaaccagctctgtgagaagctgatcgagagttccatgcgcaagtacaagaattaagaatgaagtctgaaatgggagccattatgaaaaatatgacattggagcatatcgcgcaggcgtgcggcggtacatacatcggggaagagtgcgaccgcaaaaaggagattcagggggcggtgattgacagccgtctggtcggggagggatatctgtttattcccatccgcggagcgcgcgtcgacggacatgatttcattccggcggtttttgaaaagggagcgcttgccgtgctctccgagcagcggctcgagcatccggcaggaccgtatattctggttgactctacggaggaagccatgaagaagatcgcggcgttctaccgccgctcactcgacatcaaagtcgtggggatcacaggaagcgttggaaagaccagcacaaaagagatgattgcgtcggtgctctccgagaaataccgcgtgttaaagaccgaggggaatctgaacaatgagattggacttccgctgacgatctttaagatccgggaggaacatcaggtggcggtgctcgagatgggaatctctgagttcggtgagatgcaccgtcttgcagagatggcacagccggatatctgcgtcattaccaatatcggcttatgtcatttggagaacctcatcacaagagacggcattttaaaggcgaagacggagagctttgagcatctggcaccggacgggatcgccgtattaaacggggatgacgataagctctgtgacaaaaagatggtgaatggcagaccggcggtgttctatggaatcggacaggaagcaaagacggcagagacagagaccggcagcaaacggctcgcggaaaaggaagtgtacgcgaccgatgtggaggcgatcggccttgagggaacgaaggcggtcattcacacgccggagcagcagtttgaggtggtgatcccgattgctggtgagcacaatgtatacaacgcgcttgcagcagtctgcgtggcaagacggctgggacttgatgcggaggagatgaagcttggaattgagcatgcgcacacgattggcgggcggagtaatctgatccggaaaaacggcatcacaattatcgacgactgctacaatgcgaatccggtgtccatgatggcttccatagacgtgctgtcccaggcgaagggacgaaagattgccgtgctcggcgatatgggagaactcggcagtgaggaaaagaagctgcacggaatggtcggcacacactttgcggggaagaagatcgatgcgctgtttgtgaccggaacacttgcaggggagattgcggaggaggcgcggcgtgtagcgccggagaccagggtctatgcggaaccggacaaagaggcgctggaggaggcgctgctggagtaccgcagaccgggggataccattctggtaaaggcgtcccattttatgggattttcggagattgtgaaaaaattggaacagccacagtgaataaggaaggtacacatgaaaaagaatatcatactgattggaatgcccggtgtcggaaagagtaccgttggcgtggttcttgcaaaagtgatgggataccagttcattgatgccgatctggtgatacaggaaaaggaaggaaagcttctgcgtgagattatcgctgaagtcggaccggagggattccttaaggtggagaaccgcatcaacagcgggatcgaggcggaacatgccattattgcaaccggcgggagcgtggtgtacggagcggaagcgatggaacatcttggccggatcggtacggtggtttatctgaaacttccgtaccgggaattagagcgcaggctctcggacatcaaggggagaggtgttgtcttaagagacggacagacacttcatgatctctatgaagaacgtgtgcctttgtacgagaaatatgcggatgtgattgtggatgaacatcatttgaacgtggaacagacgattgagaaaattatggaattgaaggaacgctttcaatgaagaaacaaacgtttacaaaacaggcagtctggcaggcagctgcggtaggagtcctggcggtcggcggagtccttttttgcctttccgggcagattggaatcggacagacataccggcaggtgcgcgtggatgaccgcatcatcgggtatgcgccagagaacactgatatggatgacatcgtccgtcaggcgagacaggaactgacgcaaaagaccggggagagaatcagcggcgaagtcgtatggagcagtgaggagtgtagaaaaccgttccagaagttgttgtcggagaatgaattaaaagaagccgtagagaacatactaagtgagaaaaatgcagaggaaaagcagcgcgtctatacagtggcgatcgatgaataccgcgccaactttgcgacgatggacgaggtggagtcttttctggaaaaagtgaaggcttctgcggatgcggcggatgaatacggggcggtcattgcggatcagggctcccatgtgagcggaattctgacagcgtctcttgccagaagggacgcaggggctgcagcggatgaaaaagcgccggaggagacacaggcttctctgccgcaggcaggaatcagcgcctatgtgatctgtacgctggaggaggcatttgcagatccaaaagccacgtatgagacaggcatccttgatatggaatttgtggagcgggtgaatgtgttcgagaactatgtcgatgccgatcagattgcagatgtggatgaacaggttgccgaagtaacaaaagagaaagaatcgaataaaatatatgtagtggagagcggagactgtctctccgtgattgcgatggatcatgatacgacagtgtcgtcgatcgtggcgttaaacgggctggacagcgcggatgcgatgataagggacggtcaggaactcatcattgcggtgccggagccggatctgcagcttcgggtaacaaaaggagaggtctatgaggaggactacatggaagagccgatcatcatagacaacgattcctggtatacgacaaaagaggttgtacagcaggagggaacgacgggacaccgggagcgcaatgacgttgtggtctatgagaacggtgtggaaacaagccgcgagatgatacatcagaacgttatggtggcgtcacaggcggcagtcattgagcgcggtaccatcattccgccgacctatatcaaaccgatttccggaggaagatatacgtcaggattcggcagacgctggggacgtatgcacaagggcgttgactgggcatgcccgatcgggacgacggtgtacgcatcctgtgccggaacggtaatctctgcgtcctataatggcggctacggcaataacgtggtcatcagccatgcggatggcagactgacgagatatgcacacaacagtaagcttctggtgaaggctggacagcatgttgagcagggagagccgatcgcgttaagtggaagtacgggacgttctacaggaccgcatgttcattttgagatctatatcaacggttcagcagtggatccgctcaaatacatcagcaactgatgggaagaggacacagactggaaatagttgtatgctgtacaaatggatgaaatttatggtataatgtacactatatggttgatgaacgaagaacttaagaattacttgacaaaatcatgtaagcgctagtataattacgtgtttgtataaagcgttcatagaggtgtgatatggaacagtatgtgatcaaaggtggaaatccgctggtaggagaagtggaaatcggaggcgctaagaatgcggcgcttgcgattttatctgctgcagttatgacggatgagaccgttacaatagaaaatgtacctaatgtcagagataccaacgttttactcaatgccatcgaggagattggagcgcgggtagagcggctggatgctcacacggtaaggatcaatggatcttttatccgggattttaatgttgacaatgaatttatccgaaaaatacgtgcatcttattatctgatcggcgcactgctcggcaaatataagcgggcggaagtggcgcttccgggcggatgcaacatcggcggacggccgatcgatctgcatatgaagggctttagggctctgggcgcagaggtggatatcaagtatggtctggtgcgggcttatgcagaaaagttaaccggcacccacatttatctggataaggtgtctgtcggggcaaccatcaatattatgatggcggcgtccatggcagagggcaagacaattatcgagaatgcggcgaaggagccgcatgtggttgacgttgctaacttcttaaacagtatgggagccaatatccgcggcgccggtacggacgtgatccggattgttggagtggagaagctgcatgcgacagagtattcgattattccggatcagatcgaggcaggcacctttatgctggcggcagcggcgaccaagggtgacgttaccgtgaaaaatgtgatcccgaagcatctggaagcgatcagtgcgaagctgcttgagattggatgcgaggtggaggagttcgacgacgcggtgcgcgtggtggcatcgaagccgctgcgtcatacacaggtgacgacacttccttacccgggcttcccgacggatatgcagccgcagatgacggttgtgctgggagtggcacagggaacgagtaccgtgacggagagtattttcgagaaccgttttaagtatgtggatgaactgacacgcatgggtgcaagcatcaaggtggagagcaacatcgccattatcagtggtgtggatcagtacaccggtgccagagtcaatgcgccggatttaagagccggagcggcgcttgtgattgccggacttggcgcagagggcattactgttgtggacgatatttattacattgagcgcggctacgaggcatttgatcagaagctgtcactgcttggggcattgattgagaaagtttccgacgaaaaagaaatacagaagtttacactgaaagtatcatagaatggaagttttgaatcattaggtctgctgtgggagaaaatcccgcagcagacattttttatttcataggaaatactgcggaacgttaatacaagaaagcagaaccttcctatgaaataaaaaaacgttcttttgacatgatagcgcggaagacagacttggaggataacaatggaagcacaggaaatacaacagaaagagttacatactgtgagaggagaactggcactgcttgttgcagtgctgattaacagcttcggggtggtgctgatgctgcactccggcgcgggaatctctgccatctcgagcgtgccgttcgcgttttcggaagtgtttacgcggatctcgctcggcacatggacatacctgttccagggcgtcctggtgcttagcctgatgattttaagaaaaaggtttgtgccgcagtatctgttcagctttgtggtgggatttgtgttcggagaacttttggatgtgcatgaggcgtggatcaatcttctgccgcttacgcttccgaaccgtattctctattttgcaatcagctatctgttgatctgcatcggaattgcactgtcaaaccgctgtggtctgccgatcataccgacagatctgttcccgagggaactggcggacattacgggcgccgcgtattccaacataaaggtctcgtttgatgtgatctgtctggcggtgaccgccggcatgacgatcttcttcctgggacatctggatggacttggaatcggaacgattctggcagcgtttacgatgggaaaggtgatcggggcgatcgggaaatggatggacggacatctgcagttcgtgtcggttctgactcccaaaccggcaaaactgtgttagaaagcccccggcaaccgggaaagcgtacaggagataagctgtagacaaaaaatgagggaaccataacgttccaatgtaaccggcagcggcgaattctttggagtaaaatccaggtagttcttccgtgccgcgtccggcatcgaatgctgtgtctttccacgtttggacagtcctcggggtgtgtccggcaattcgcagacaatggacggacttcctggcagcactagccgtgcttcctcatagacaatataaaaccgcgcgaaccgaaactcgttgacatctgctattgaaaacagggcagatgccaattcaaacatcggcttcgcgcggttatgttttattcgggagcacggtgagtgctgcacgtaagtcctaaaattgtctgcaggttgcggacacgccgcgtggaatgttccaaacttggaaagacacagctcatccaggatgccggacgcggcatggttagaaataccggattttacgatcagaatcgtcgctgccggttgcatttggaacgatgcgtttcgctaacttcccagcctacagcttatcttctgccggctatcgcaggcgccggatgcttttggacacgacattgacggtttagagaaccgcctgaatatgcagatcgcccgcagctgacagatcgatacaggaaccgtcgtctaactgcacgatcggtctggaaagctgcttgtcgttgagcatgacaatgttggcactacgaccatcacttaagaggatgcggtggttctggtaggtgccggcgatccggttgaggaacgcgagaacacatttggtatcgtatttctgcagaccgtcacgctcaaagttggcgataacttgaaaagcgcacaggggagcacggtaagagcgggcggtcgtcatggcatcataaacatccgcgatcgcaacaacgcgtgcataaggatcaatatcgttcgtcgtaagaccgtttggataaccggtgccatcacagcgctcatgatgagagagtgcggcgagcttgatgtgtgcatccagcggaagcggctttaacagttcgtaaccgtactgggtgtgcagcctaacctgcgcgaactcttcgtcggtgtatttgcccggtttgttgagaagctctgttggaatcctgagcttgccgatgtcgtgaagcagtccggcgagcgtcagcgtgtctaaagtggcgccttctgccttgagccattttccgatctgcctgcagatcagcgagacattcagggaatggacatagatgctgtcgtctgaggaatgcatgttatgtaacatattaaacaattccagagaagtcttacaggactggaataattcgatgaccttcgacaggagcgatgctgtgtctaacggcctgccctcgttcacgtagccttcaaagctgacacggatctgactgagtacgatcgtgtgatccacctggaaggactgaaacttctgcgaggtcttgatcttctgcgaataggacttgggagccgcctgcttttcttccccgtccacaatgcaggctgacttgatattataaaaggaaagccgcaggatcgactgctttgtaagttcttttcctttttcaagaaccacctgcccactgggggtagtgatgtcttttgcaagaaccatgccctcttttaaattgtacagtgccaattctttcatttgcttaccccttctacctatatttactacaactactttcagtataggagtttgaaaaaagaaagtcaataaaaagcttgacatagcggggaaaggggtgtaacgtatcagacgtagatttgaaaattcaatattgtgtgtaaattttcttattcagagtgatggagatacataggatctgtgaagtcacggcaacccctctacggaaggtgccaacctgagcgagcaaatactgttatggatgagcgctgtcagaagcgatatccgcgatagttcgaacaataagaggatttgattatctatacgtcacttccacttgtttttcgcaagtggtttttttgtgtcattttacatgatgagaaagggagtaataaagaatggaaaagagattatttacatctgagtccgtcacagaaggacacccggacaaagtctgcgatgcaatttctgatgcgattctggatgcgtgcatggcagaggatccgatgagccgtgtggcttgtgagacggcaagctgtaccggatttgtgctggtaacaggagagattaccacaaaggcaaagctggatattccggcaatcgtgagacagacagtcaacgagatcggttacaacgatgcgaagaccggatttgacggaaatacatgtgcggttatggtagcacttgatcagcagtcaccggatattgccatgggtgtagacaaggcactcgaggcaaaagagggcgggttaaaggatgagttggataccggtgccggagatcagggtatgatgttcggttatgcgacaaacgagacaccggagcttatgccgtatccgatttcccttgcacacaagctggcattacagctgaccagggtgcgcaaggacggcacactttcctatctgagaccggacggaaagacacaggtttccgttgagtatgatgagaatggaaagccgcttcgtctggaagctgtcgtactgtccacacagcatgatgatgatgttacacaggagcagatccatgaggatatcaagaaatacgtgtttgacccgatcctgccgaaggaactggtagacgcacagacaaagttcttcatcaacccgaccggacgttttgttatcggcggaccgcacggagatgcaggtctgactggacgtaagattatcgtagacacctacggcggatatgcacgtcacggcggcggcgctttttccggtaaggactgcaccaaggtagaccgctccgcagcttacgcggcacgttatgtggcaaagaacatcgttgccgcaggtcttgcagaaaaatgcgagattcagctttcctatgcgatcggtgttgcccagccgacatcggttatggtagacaccttcggaaccggaaagctttctgacgagaaactggtggaaatcgttcgtgaaaacttcgatctccgtccggccggaatcatcaagatgctggatttaagaagaccgatttatcgtcagacagcggcatacggacatttcggacgcgccgatctgaaccttccgtgggaggcagtcgataaggtggagacattaaagaaatatttgtagagttttatgaaaagtttagacaattttacataaaataaataggtttttggatgtttcgtgttataatgggtcatagaattacagttctatgacccgtttttttgcgggaatttgcggggtggacaaagcagacatgaagttcaaaaataaaattatcatttcattttgtattatcatatttatccccattcttcttgcggtggcggtgcttttcggattccagaagatccagttgaagtcgattgaacagacatacggcgtggagagtgacgattacagttatttttccaattccatgcagctgctcagccgttttacgcgcgagtcctttgagacgcttctggatctttcaaagcaggatccggataagctggaggataaggcgtttctggcgcagatgaatgacactctgcgcgagaagtattcgtatcttgtcgtgcgcaggggagacgagctgatctatgtgggagatgataaggaggcgtcgctgctgacggatctgccggcctacggaggggaagagtccggggcagacaccggcatctatgtcgacggagacaagcaggcgctgatcaagcagattgattttgtgtatacggacggaagccagggcagcgtttttattatcacgatccttgaggagaccgtgccggagttgaagagcctgatggcggatgtggtgatctcgattgtcctgatcttaatcctgacggcatgcatgctgacggtatggatttatacgagttttatcaatccgatcaagaagctgcaggtggcggcgcagaacattaaggacggtaatctggattttacggtggatgtggagacgaatgacgagatcggggagctctgccgcaatttcgaggagatgcggcagcggctgaaggataacgcagaggaaaagctttccggtgagcgtgagaacaaggcgctgatcagcaatatcgcccatgatttaaagactccgatcacagctgtgaaggggtatgcggagggactcatcgacggtgtggcggatacgccggaaaagcgtgacaagtacatccggacgatttataataaggcgaatgagatggatacgctcatcaatgagctgacattgtatgcgaagatcgataccaaccgcattccgtacaattttgcaaagctgaatgtggcggagtatttcaatgactgcatcgaggagatcgggctcgatctcgaggcgaaaaacatcggactggcatattttaattatgcggacgaggatgtccagattattgcagacccggagcagctaaagcgcgtggttaacaatatcgtggggaattcggtcaaatatctggacaagcagaagggatttatcaatatccggatcaaggatgtcggtgattttatccaggtcgagattgaagataacggcagaggaattgccgcgcgcgatctgccttacatttttgaccggttttaccgtgcggatgcgtcgcgcaattctgcgacgggaggcagcggtatcggattatcgattgtgaagaagattattgaagaccacggcggtaagatctgggcgacaagcaaggagtccatcggaaccgtgatgtattttgtattacgaaaatatcaggaggtgccatatgagcagagtattgatcattgaggatgaggtggagattgcagaccttgagaaggattatctggaactcagcggatttgaggtggagatagagaatgacggaaccgtcggcctgaaacgggcgttgacggaagattttgatatgtacatcctggatctgatgctcccgggcattgacggttttgagatctgcaagcagatccgggaggagaaaaacacgccgattctgatggtgtcggcgaagaaggatgacatcgataaaatccgcggcctgggactgggagcggatgactatattaccaagccattttcgccgagcgagctggtggcgcgcgtgaaggcacatctggcgcgctatgagcggctgatcggcagcaatacgcctgagaatgatacggtcgagatccgtggaatccgcatcgataagacggcgagacgtgtctgggtcaacggcgaggagaagcagttcacgacaaaggagtttgacctcctgacattccttgcggagaacccgaatcatgtatttacgaaggaagaactgttccgccagatctgggatatggaatccatcggggacattgcgacggtaacggtacacatcaaaaagatccgcgagaagatcgagatgaacaccaacaaaccgcagtacatagaaacaatctggggagtagggtacagatttaagctgtagagcttaaatcgtaaggatgtgtaaaggtgtgcaaggcaggcgctccacagcgaagctgtactgaaatgagcgcctgcgctgcgaagcagtaacaatctggggagtagggtacagatttaagctgtatagcttaaatcgtaaggatgtgtaaaggtgtgcaaggcaggcgctccacagcgaagctgtactgaaatgagcg

SEQ ID NO: 11641 - DNA, 82768 bp, Unknown
  gut microbiota DNA sequence
caacaatctggggagtagggtaccggtttaagctgtaatttataatttggaaggagtgcaggaaaatgaaaaagtatgtaaaaccagaagttgtggagacaaaagaatatgcggagggcgtatatctggcgagcggcggttcgacagataattcgtcgggaccggaagaatctgtctgtcgatttggcagaaaggaagcaaacgcgggttcggacacctgccaggagtgctctaagagcggcgggcagagaaatacgccgcttccgggcgaggagtctgcgcgcgaagcagattttaccggatgtattgacggcagaccggtgaagaattcataggcagcaggatgacagagcgggcgaaggagagcacagatgagtgggaaaaaaattgcaatcatatacaaaagtctgacagggaataccagacaggtggcagaagcaatacgggatgcgcttggcggtgaagagattgtatacttcggtgagccgaagccggacattgtggcggatctttattttgtaggatcctggacggacaagggaagctgtgatggaacggttggtgagtatttgaagcagttggaaggaaaaaaactggcggttttcggcactgccggttatggtggctccagagaatactatcagaagctggcgtgccgggtaacggagtgcgttccggataccagtgaggtgctcggaagcttttactgccaggggaaaatgccgatcggagtgagaaaccgctatgtggcgatgctgcgggagcacccggaagatcagaagctgaatgcgagcgtaaaaaattttgacgaggcgctttcacatccggatgagaaagattttgcggatgcacgccagtgggcacagactatggtggatgcggtttagaatatggagatcagaattttatttgaagatgagcagattattgtctgtgaaaagccggcaggtgtggcggtacagacgaaaagactcggacaggcggatatggagagcctgcttaaaaacaggcgggcggggaagggcgaactgccgtatatcggagtggtgcaccggctggatcagccggtatccggagtgatggtgtttgcaaagacgaaggaggcggcagccgcacttggcaggcagattgcgtcggggctggcggacaagttttactatgccgtgacagacggggtgccggaagccggaaaggggcagtttacagattatcttctgcgtgacggcagaaccaatacgtctgcggttgtagaaagcagtacgccgggagcaaagagggcagagctttcctacgaggttttagagcagaaaaacgggcgcgccgttcttcggattcatctgggaaccggcagacatcatcagatccgcgtgcagctggcacatgcagggatgccgattgtgggagaccggaagtacaattttaaagagaatatgaagccgtcgggggagccgctctgtctctgttcgtacaaaatcgggttcagacacccgaaaacacgcagaaatcttgcgtttgaaattgacaaccctttccatttatcataaaatcataagttgtgcaggagttgcacacagacaaccttgaagctgcttgcaacggcagtaagagctatgaaaaggagatagatgatggcaaaggacaacaagaaattagtagaagcgatcacatcgatggatgttgatttcgcacagtggtacacggacgtggtaaaaaaggcggagctgatcgattattccgcggtaaagggatgtatgatcatccgtccggcaggctatgcgatctgggagaatatccagaaagagcttgaccgcagattcaaagagaccggcgtggagaatgtatacatgccgctttttattccggagagcctgctcgaaaaagagaaggatcacgtggagggatttgcaccggaggttgcatgggtaacctacggcggattgaacccgttgccggagcgtctctgtgtcagacctacatctgagacgctgttctgcgatttttataaaaatattattcactcttaccgtgaccttccgaaggtatacaatcagtggtgctcggtggtacgctgggagaaggagacgagaccgttcctccgttccagggaattcctgtggcaggagggacacaccgcgcatgcgaccgcagaggaagccgagcagcgcacgatccagatgctgaatctgtacgcggacttctgcgaggaggtactggcaatgccggtcatccgcggacgcaagaccgagaaggagaagtttgcgggcgcggaggctacctatacgattgaggcgctgatgcatgacggaaaggcactgcagtccggtaccagccacaactttggcgacggattcgcaaaggcgttcggtgtccagtataccgataaagataataagcttcagtatgtacatcagacttcctggggtatgaccacacgtctcatcggtgcgatcatcatggtacacggcgatgattcgggtctggttctgccgccgagaattgcaccggtacaggcgatggtgattccgatccagcagtacaaagacggcgtcatggatgctgcaaagagcgtctgcgagcgccttggaaaagtatgccgcgcgaagctggatgactcggacaagagcccgggctggaagttctccgagcaggagatgcgcggaattccggttcgtatcgaacttggaccgaaggacatcgaggcaggcaagtgcgtggtagtgcgcagagataccagagagaagatcgaggtcgcactggaggatctggagcagaagattccggagattttagagactatccagaaagagatgttcgagcgtgcaaaggcacaccgcgacgcgcatatctgggatgcccacaattatgaagaattaaaggacatcgcggcaaacaaaccgggatttatccgcggtatgtggtgcgaggatcaggcgtgcgaggacaagatcaaagaggagcttgccgtgacatcccgctgtatcccgttccatgatcaggagcagatttccggaacctgcgtatgctgcggcagaccggcgcacaagctggtatactggggcaaggcgtattaaggagaagtgcgtggataaaaatgcaaagatcagcctgcctgcgaaggttgcgaggattctgaataccttaggcgggcacggatatgaagcgtatgcggtcggaggctgcgtgcgcgactccctgctcgggagaacgccgcaggactgggacattacgacctcggcgaggccggagcaggtcaaggctcttttccggcacacgattgataccgggatccagcatgggacggtgacggttatgctggatcatgagggattcgaggtcacaacctaccggattgacggagaatacgaggatgcgaggcatccaaaggaagtagcgtttaccgcgaatcttctggaggatctgaaacgccgcgattttacgatcaatgcgatggcctacaatgaagtgaccggactggtggatgcctttgacggaatcggcgatctggagagaggcatgatccgctgtgtgggaaatgccatggagcggttttcggaggatgcccttcgcatgctccgggcggtccgttttgcagcgcagcttggtttttcgattgaacaggagacacaggaagccattgccggactggcgggcaatataaaaaaggtcagtgcggaacggattcaggtcgaactggtaaagcttttgacttcgccgaatccgggagagctgaaagtggcatattgcacggggcttacggctgtttttctgccggagtttgacgtgatgatggagacgctgcagaacaatccgcatcactgctacagtgtgggagagcatacgctaaaggcaatcgaagtggtgccggcggataaggtgctccggcttacgatgctgctgcatgacattgcaaagcctgcctgcaggacgacggacaaaaaaggcgtggatcatttttacggacatccggtgcgcggaagcgagatggcgcgtggaattctgcgccggctgaaattcgataacgataccaccgaccgggtgtgccggctggtacactggcacgacgataatccggagctttccgggaaggcggtccgcagggcggtgcacaggatcggcgtggaacagtatccggcattgtttgcggtcaaacgcgcggatattctggcgcagagcgggtaccggcgcgcggaaaagctggcgtatgtggacgcatatgaacagatgtaccaggagtgcgtggagaaaaaagagtgtcttacgatccgggaactggcggtttccggtcaggatctgattgcagccggaatgcagccgggaaagcagatcggggagatgctgaatgaactgctggatcgggtattggaagatcccgggctgaatacgaaggaacaattattaaaaattgtgacaggaaagatttctgatcaaaacaggtcatgaaataaaaacccctcacatatgatgaagagacacggcagagcagccgcagatcaatcatatggaggggttttcgtgtataatcgaccggagcaggtattggagcagtacgacctggaagtgagagcggtttccaaagggcgtgaaagttatatttgtgatacaacacaggggcagttacttttaaaagaatacaaaggctcggcggagcgggcagagtttctctctgccatgctcgggcatctgggtggacagggactcttaacggagcaggtcgtgcggacgaaggaggacgccccgattgccgtcgcggaggatgagacaaagtatatggtattgacggctgtttccgggagcgagtgtgacaccagaaaccgggcggacatgatcgcgggggcggaaaaactggcaatgctgcacaacgcggcgggaacttattcggagacggttccggagtttgtctgcaacgacccgaatgaactgcaggaactgtatgagaaacataaccgggaactggtcaaagtccggaattacatacggtccaagaagaaaaagaatgattttgaagtgctcttttacgggcagtatgagcgctttatggaaaaagcaaggcaggtggcacaggaactttcggcgatgggacagggcgggcagagcgccgggttttgtcacggtgactataaccagcacaatattctgttttccaaaaacggaatcggcattgtccattttgagtgcttttcctatcagatacaggtcagcgatctggcgaattacatgcggaaaatgctggaaaaaaacaactggaataccggacttggcatggatctcatctgtgcgtatgaccgtgtgcgccggctgactgccgtggaactgaactatctgtatctgtatatggcatatccggaaaaattctggaaaattgcgaaccgctactataacacacacaaggcatgggtgtccggacgcaatattgaaaagctggaaaaattcatacggcaggaggatgagcgggaacgattcctggaaatgatgcgccatttcaccttgcagccgcccgcgtcctgagataaaagttccgctgagttgtttaatatgatataatgaatcttgacagattcatattagaagttccggtggaacttcggatgcgcagaaagcagcgcaaaaaagatgatataatcaatctaacggtacttttgccgtagaattgtgtacacgataaaggagcagatatacttgaagaagaaaatagttcgatggatcctgccggtctgcatgatgctgttactggcaggatgcggaaaaagcagcaatacagttgtgacaggaacttactataatccgtcaaaggatgcggaaaacacagcacagaccgtcgggacggaggcggatgcgaacgacgtgctggatgcgatggaacaggggacggagcaggaaggcacgtcgatcggagcagacctgtttttaatcaccaacaatgatatgcaggcggagtgtctgattttaacacagttgaactccggcaagcagtatatgtataattacacgattgctacccggttccttgacaaatatggcagccggatgccggtgtctggatttgacgcgggtcgcattatccgtgtcggggaaaaagataagcagggcaggcttgtggaagcgcagatctccgatctggcgtgggaatacccggatgtgaccagatacagtgtagatgaggagcacggtgcatttaagattgcggatacaaattattcgtatgatgaggatctgtttgtggtttcggacggaagtcccctccagctttcagatctgacggcactggatacgcttcgggtggtcggaattgacaagaaaatctattccatctcggtgaccaccgggcacggttcgttaaagctggtcaataccagtgtctttgatggaagttacattcaggtgggaagcaaggtgtttgcccagattaccggagagatgacgattgagattcctgagggaacatacacggcagctgtcgcgaataacggatacggcggaagtacggagattacgatcacgagaggtcaggagacggttctggatcttgagacgttaaagggcgagggaccgaagtacggaagcattctcttcgcagtcaatgttgagggcgcatggcttcaggtagacgggcagctggtggattacagccagccggtggaactacagtatggagtgcatacgctcaccgtgacggcggacggttatgatacatacagcaaaaagctgtttgtgaattcaccggaggcaacgatcgccatcggaatgacaggagaatcgggaagctcgtcgactacgaccggaagtgagacgcagtcatcggaggcagacagcagtacatccacaggagagagcgcagacggacaggcgggaagtctcgcgggaagcctggcaggaagccactcggacagcagttccacgggttcgtcttccagttcatcttcgggttcgtcgtccacatcgacgggaacatcggacacgacgagtgacgctgcgctggatgccatcgtaaacgagattctggatgatgatggggagagtacaaagagcagcaacagttcttcatcagattatctttcaacgctgacggaacttcttaaggctattaagggaagctgaaagaattgtatcacttttttaggggaatagtacttgaaaaagtgatacagggaagataagatagatttagaaaaaagcaggaggaatctgagatgggatatagagaaacatatgagtcatggctgaacaatccgtattttgacgaggcgaccagagcggagcttcaggcgatcgccgggaatgagaaggagatggaagagcgcttttacatggatctggagttcggtactgccggactgcgcggcgtgatcggagcgggaaccaaccgcatgaatatctacacggtgcgcaaagcgacacagggactggcgaattatatctgcaaggtgggagcacaggcaaaaggtgttgccatcgcgtatgattccagacatatgtccccggagttcgccgacgaggcggcgctttgtcttgcagcgaacggcattaaggcatatgtatttgaatcgttaagaccgacgccagagctttcctatgcggtgcgcaagcttgggtgtacagcgggcatcaacatcacggcaagccacaatccgccggaatacaatggatacaaagtatactgggaggacggcgcgcagatcacacctccgcatgacacgggaattatggatgaagtgagaaacgtgacggattatgcttctgtgaagacgatgccgcttgaaaaggcaaaggcagatggtctgtatcagacgatcggcgcggatattgacgatccgtatattgcggagctgaaaaaactggtgcttcatcaggactgcattgacaaagttgcatccgagttaaagattgtatacacaccgcttcacggaaccggcaaccttccggtacgccgtgtgctcaaagagcttggattcacgaatgtctacgttgtgccggagcaggaactgccggacggcgatttcccgacggtaagctatccgaatccggaggcggcagaggcatttgcattaggacttgcactgggtaaaaaagtagatgccgacctgattcttgcgacagatccggacgcggatcgtctgggtgtttatgtgaaggatgcacagaccggagaataccacagcctgaccggaaatatgtccggatgcctgattggcgactatgtgatcggacagcgcaaggagctcttcggactgccggaggacggcgcatttatccgttcgatcgtatccacgaatatggcagatgcgattgcggcatactacggaatagatctgatcgaggtgctgaccggatttaagtttatcggacagaagatcttagagtttgaggagacaggaaagggcacatacctctttggtatggaggagagctatggctgcctgccgggaacttacgcgagagataaggatgccgttgcagcatcgatgatgctgtgcgaggcggcggcttactataagacgaagaacatgacactctgggatgcaatgcttgccatgtatgagcgttatggctactacaaggatgatgtgacttccatcacattaaagggaatcgaaggactggcgaagatccaggagattatgaatacgctccgtgaaaatgctccggcagagattggtggatacaaagtgacggcggtgcgggattataagctggacaccatcacggatacggcagcgggtgcagtgcggccgacaggtctgccgaagtcgaatgttctttattacgagatgaccgacggggcatgggtgtgcgtcagaccgtccggaaccgaaccgaaagtcaaattttatctcggcgtaaaggggacatcgctcgcggatgcggacgcaaaatcagaagcgctctcaaaagcggttcacgcattgatcgacaccatgatgtaaatgcttcccaaacgtaaaaaagctcggaaaatccccatattttggggatttttcttgacaaagaaagaaaaaacaagtataaatatgaagtaggtattttgagaacctcgaatattatttatattgaaaatccagaggaggaatttttaacatgaacaaagcagagttagttgcagcaatggctgagaagactgagttaagcaagaaggacgcagaggcagcattaaaggcatttacagatgttgttgctgaggaattaaagaagggcgagaagatccagttagtaggattcggtacatttgaggtatctgagagagcagagagaacaggaagaaatccgcagactggtaaagagatgacaatcgcagcttccaaggctccgaagttcaaggctggtaaggctttaaaggatatgatcaacgcctaagtgatatagagatagcagagtggattttgcggttgcagaatccacttttttgctttcagggaaaaggagcctttggaagcaggaacgctccgcaggcataaggagaagaagatgagactggataaatttttaaaagtatcccggctgatcaagagacgcacagtggcgaatgaagcttgtgacgccggtcgtgtgatggtcaacggcaaaccggcgaaggcttccgtgaatgtaaaagtcggcgacattattgagatcggttttggaacgaagaccgtgaaagtccgcgtgctggatctgcaggatacgacgaaaaaggaagaagccaaggatttgtttgaatatgtatcataatatgaaaaacctcccatatactttctaatagaaaaggaaagcgggaggtttttttatggaggaaaagaattataataatacggcaaaatcacataaggtcctgctggtaaaccggggaaacggcgcgttttccggtgttgtggatgtgctgtcttttgatgtggcggagattctgctcgagacggaactggggatgctgctcatcaagggacaggatctgcacgtgaaccgactgagcctggaaaaaggggaagtggatattgagggacggattgattccctgacctattcggatgtcaaaacggcgggaaaacaggcggaatctcttctgggaaggctgttccggtagatggcggtaagcacatcaatctatcaggaactgctgtttctcgggagctctgtgctggtaggaatgggacttttctttctctatgatatcctgcgcattttccgccggattcttccgcacggaaatatctggatcggcgtggaggattttctgtactggatcatttttacaggcgtggtctttgtccttttataccgggaaaatgacggcatggtgcgcgggtttgcgtttggcggtctgctcgtcggaatgacgtgttattatctgctgctcagccgcctgatcgtgcactgtcaggtgtggatctggaaaaaaatactgggaatacttggaaatgtgctgggattttttgtgcgtccggtgtggaaaaccttaaaaaaagttgcagcattttgtggaaaacgattgaaaaagtttgtgagagcggttaaaataggtttatgtaaactgtaagttgctacatagatgcaggaaatgagggacaggaatggcagcaaagaagagaaaatcaaatcggaataacagggcgggcaagatctgtatcagcatgattctggttgtatttgcagcggcaatgtctgtccagattgtaaaagcttatcagaaagatcaggagtacgccagaaagcaggaacagctggaggtgcagcttcaggatgagacggcaaggcaggaggaacttcagaattaccagtcctatacacagtcccaggagtatgtggaggatattgcgaagagcaaactgggactagcctatgacaatgagattatatttaaggaagaaccttaagaacatgagaatgacagaataaaaggagccttacccggagagatcatcccggataaggcttcttttttggctgttaaagtgtaatctgatcgatcgcgtcgagttcttctggcgtaaaggaagtatgtccgacaatggcgatattgtcgagaatctgttccgggcgggaagcaccaatcagcacgctggtcacgtcaccgtcctttaagatccagcttaatgccatctccgcgagcgtctgtccacgctttttggcaagctcattgagagcgcggatctgtgagagacgctccggcgtaagtgcggtctccttgaggaaacgtccgtcggtcgcgatgcggctgtcagccggaataccgtttaaatagcggtcggtgagcatgccctgtgccagcggtgaaaaggcgataatgcctctctgcagccttctggcagtatctttcaaaccgtttttctcgatcgtgcggtcaaagatggagtagcggttctggttgatgataaacgggcacttcaagtcgtttagaatcgcacatgcacgttccagtgtcggaccgtcatagttggacagaccgacatagagtgcctttccgcttttgacaatggaatcgagagcgcccatcgtctcttcgagcggtgtctcaggatccatgcggtgatgataaaaaatatccacataatccagccccaggcgctttaagctagcgtccaggcttgcgatgaggtacttgcggctgccccagttgccgtaaggccccggccacatatcgtagccggctttggtgctgattagaagctcgtcccggtacgcagaaaagtcgtcccgcaggatttgtcccaggttgcgctctgcgctgccgtaagcgggaccgtagttgttcgcaagatcaaaatgcgtgataccgttatcaaaagcggtgcggcacattgccttcatgttgtcataatgtccggtgtccccaaaattgtgccagaaaccgagagaaaccattggaagctttaaaccgctggcgccgcagcgattgtactgcatggtatcatagcggctttcttttgccatataacccataagaaaatctcctttcatatcatggtggctatgcttttgcgtacattataacaccggcatgaaaaaatgtggtagaggaatatttctggatgaacttcctaaaaggcacgaagcgcttcaaagtccatgaaacagacaatggaaccgatattttggcgaaaagtttttcaaaaggggtccttcctttgacaaagattttccgggaacaaccctataatcgatgtcacccgcgaaaaacaccgggacagaccggaggcgggaatggaggtaggcgatgaaaaaaatgaatgcaagacaaatgatgctctgtatggcgggaagtgtaatgtgcagtgtgggcgtgatggggtgttaccctctggtgccggcgtattttgcggcgctgtatctggagcgggtcagcgggccggtgctgctcggtatgatgtacataggaatgtttgtgtttatgccgacggcggcagcagtaaagtatgcggtggcgcttgtcgtggtgatgggagcaatccggctcgtggaatgggccaacgagggatgcccctcctatatggcgggcagtatggcagcaattattaccatgatcctgtcggtggcggggggacttcttgaatggaaggatcagcccggaattctggcggcggcgctggagggcgcgtttatattgggagccgtgatcctttttaaccgtgtcctgcatatgatattacactggggaagaaaggcgggggtgccagagcggccggatggaggaagagaggagcggctgctggggtatgcggaatcgtttcagggcttgtcccaggtttttcacagtatgagtgccgcacatcagaacggtgcggcggaggaactgggacagatacagaacgagctgactggaaagatctgcgcgtcgtgtgacgcgtgtgcagtctgctgggagagagatcctgcacccttatacggcgcgctgtcggggatcctttccacgatctggaacggagagactcccggggaggagaaaaagcaggagcttgcacagtattgcaggcacagcagcgatatggtggaggaggcggtgcgcgtctttgaacgtgtcagcttaaaccgggcatggtaccagagactggtggagaaccgggaggtgatagcggaacagctggatgcgatggcgtatatcatgcaggactgcgccagggaggaaaaaattctggacgtgggggaacgccatgtcctctcggagattcaataccgtgcgaaggagcaggggattgtggtggaagaactgcacctgatcgaggcggtggacggaaggatccggattgacgcagtgctaaaaagccggttgggaggctgtgtcgcggtgaagacatttctggcgctctccggcgccgtgcttggaaaaaaactccggacaaccgcggatgcgcggacgtttatcgcgaaggagccgttccggttcctgatctacgaggacaccgcataccggagcgtgcagggaattgcgcgggtgaagaaggatgaggcaaaaatttcaggcgacaacttttcctttctggaactcgagcgtggggaaatgctgcttggactgtcggacggcatgggctccgggagtagtgcctgcaaggagagcgagatggtgctggatcttgtggaacgttttctggaagcagggttttccctggagacggcgatacgcatgatgaattcggcgatggtgatgaaaggggaaaatgacatctactccacgttagacctctgcatggtgaacctgtacagcggtatggcacgcttgtacaaggtgggagcggcggctgcctttatccggcgggaggatgaggtggagtgcattgcatcggaaaatctgccggtgggggcgcgtgcgcacctggatgcaaaaccgagggagatacagctgaacgacggtgattttattgtcatggtgacggatggtgtgttagaatacttacatgttccgaagccggaggagacgatgcgggaaatgattctcagtatcaaaaccaacaatccgggaattctggcaaaaaagattatggacagagtgatgctttttaccggcgggcgcgcgcaggacgatatgacggtacttgcggcatgcatctggaaaaaggcatagaatagaatgtggaacgatagaggaaatgcgatgcagaagaagggaatggaactggaggggcttgttaaatccggggatgtggtgcttgcaggcgtctccgggggagcggactcggtgtgcctgctgcttatgctgcttgagtaccggaaacactgcaattttctcctggaggcggtgcacgtggaacacgggatccggggagatgccagcaggagagacgccgcgtttgtaaaaaagctttgcgaaaagcggggcgtttgctgcaggatttatccggtggatgtcccggcgtatgcaaagggacacggcctcggcgttgaggaggcggcgaggaagctccgctatgagtgtttcagggaggcagcagaggactatgacggcagaccggtgaagatcgcgctcgcgcatcatgcggatgataatgcggagaccatgctgttccggctgatccgggggagcggactccacggactctacggtatgcgcccggcgcgcaggcttgcggagggcgtcacggtaatccggccgctgcttggaatggagagagcggagattgaggcgtatctggagacacagggacagccttactgccgggatgcgaccaatgaggataccgactacagcagaaaccggattcgccataaggtgatgccggaattaaaagcggtgaatacgggggcggtgcatcatatgatgcagagcgcacagatgttaagggagctgtcggattatctggaggaagagacgcgccgggcggcagagcgcgtgtgccgtgacaatccggatgcctgtgtgattgatgcggttcttttttcggaatatcccgtgcttttaatccgggaagtgctgcttggggcgctgcaaaaagtggcgggcagcagccgtgacatcggaagcgtgcatgtggaagaactgtgcacactgtatacaagacaggtcggccgtgtgatctgcctgccctacggcgtgcgtgcggagcgcgtgtatgagggaatccggctgtacagggaagcgccggcggctgatatggaacgggagagcatcgagattaccggggagatgctttcgcgcgcagaaaaggaagaggtggtgcttgcgctgccggatggcaggctgcacctgcggatacgtgatttttcggggaatatgcaggaaatcccgaaaaaaacatatacgaaatggttcgattatggtaaaataaaatctggtctgcggctgcgcagaagagagagcggcgattacctgaagatagatgctgccggacataccaagaagctgaaggaatattttgtcaatgagaagattccggcggcgaagagagacgctatatggcttctggcaacggggtccgagatcctgtgggtggcaggcgggcgcatcggcgccggctgcaaagtcggagagaatacagaaaagatattagaagtacggttaagtggaggaaacgattgtgaagatcaagaaaattaacgttcatctcacagaggaacagattgagcagagagtaagagagttgggagccgagatcagcaaggtgtacggagatgagccggtatgcctgatctgtattttgaagggatcggtattttttacctgcgaactggcaaagcgtattacttcaccggttgagatagagtttatgtcggtatccagctatggatcaggcacaagttccagcggcgtggtgcgtatcgtaaatgatcttggaaccagtattgaaggcaagaatgtgctggtaattgaggacatcatcgattccggcagaactttaagctatttgttggagaatttgaagacaagaaatccgaagacactcagactgtgtacgcttctggataagccggaccggagagtggtggatgtcaatgtggattatgtgggatttgtcattccggatgaatttgtggtaggatacggtctcgactacgaccagaagtaccgcaatctgccgtatatcggatttgttgagatagaggaataaaggagaaatcgattgaatagtaagagaagcagttacagaggatttggcatctatctgctcctgatacttgccatcataggtatctggtattggatggacggaaacacgtcaaccaacagttacacgcgggcacagtttgagactgcggttgcagatggaaatgttgcacagctgaagattgtaccgaaccgcggcgaggtgccgaccggtaatgtatacattacatttaaggactcctcgacacaggttctggcggtaaacgatgtaaatgatatagaagactatctgcgcgatcagcagtttacgtcttacaccgtggagaatccgccggagcagagctggatcgtgacgatacttccgtatctgattatttttgcggcgatgttcattttcttcatgattatgaccaatcaggcggctgccaattccggcggcggcggtaagatgatgaacttcggcaagagccgcgcaaagctcatgacagatgacccggcaaagcgggtgacatttgccaatgtggcaggtctgaaagaggaaaaggaagagcttgaggagatcgtggatttcctgcgtgccccgaagaagtataccaggcttggcgcgcgtattccaaagggtgttcttctcgtgggacctccgggaaccggtaagacacttctggcaaaggcgattgccggtgaggcaggcgtgccgttctttagtatttccggttcggattttgtggagatgtttgttggcgtcggcgcttcgcgtgtccgtgatctgtttgaggaagccaagaaaaatgcgccgtgtatcgtgtttatcgatgagatcgatgctgtcgcaagacggcgtggtaccggtatgggcggcggccacgatgagcgcgagcagacattgaaccagatgctcgttgagatggacggtttcggtgtcaatgagggaattatcgttatggcggcgacgaaccgtgtggatattttggatccggcgatcatgcgtccgggacgtttcgaccggaaggtgcatgtgggacgtccggatgtcggcggaagagaggagattctttctgttcatgcgaagaacaagccgctcggggatgatgtcgacttaaaacagatcgcacagacgactgcgggctttaccggcgcggatcttgagaatcttctgaatgaggcggctattatcgcagcgaaggaagaccgtgcgtatattacacagacggacatcaagaaggcgtttgtgaaggtgggaatcggcgcggagaaaaagagccgcgtgatctccgagaaggaaaagcgtatcaccgcattccacgaatccggtcatgcgattctgttccatctgcttccggatgtcggtccggtctattccgtatcgatcattccgacgggagcgggagctgccggttacacgatgccgctgccggagcgtgacgacatgttcaacacgaaaggcaagatgctgcaggatattatcgtatctctgggaggacgtgtggcggaggaacttgtatttgatgacatcacgacaggggcatctcaggacatcaagcaggcgacccggatggcaaaggatatggtcacaaaatacggaatgtcagagaacattggtctgatctgctacgacaatgacgacgatgaggtatttatcggcagagacctggcgcacacgagaggctatggagagggcgttgcgaccaccattgacctggaagtgaagcggatcattgacgaatgttatgaaaaagcgaagcagatgattgcggagcaccgcgacgtgctggatgcctgcgcgaatcttctgctggacaaggaaaaaatcagccagcaggagtttgaggcattgtttgagcagtaattgtgcataacggcaatgaaaaaagaaaaaccgagcagaaggtactatacaaaatgaataaaaacgtgtgcacaaaattgtgaagtttgtgcacacttatctggcggggcatgctattataataaccgtaaaaaccccccaatacattatatatagtttttgctataccccatagtaaaaataccttctcctaaaaagacagcagttcgacaggctgtcttttttttaccttctaataaaaatatttgaaatgggatatgttttattataagaatatcggagaaaatgaagttccagaatgcaaccggggcggcaattttttgaagcaaaatccgaggatttcttccgtgccgcgtcggacatcgggttctgtgtctttccacgtttggacagtccccggggtgtgtccggcaaaaccgcagacaatgagcggactttctggtgcccctagtggcaccgcttcgcagacaatataaaaccgcgcgaaccgaactcgttatcatctgctattgaaaacagggcagatgacaactcagacagcggcttcgcgcggttatgttttactcagtggtgccaacaaggggcacacacaaaagtccttaaattgtctgcggtttgcggacacaccacgtggaatgttccaaacttggaaaaacacagatgatcagggatgtccgacgcggcatggttagaaataccggattttgtgattagaattgccgccccggttgcatctggaacgtgatagtctctggttcttataataaaacgtatcccatttattgtcttttcttgcggagattcacaaacgtgagatagatatcatagtagatattttcgcggttctgctccgtaagcatctttaaatcgttatataattcccggtcgcttagaatcacatccaccatatcaggattgtactcggtgccacgtcctgccttcagttcgttcaataccacatcgaacggtttcgcgcggtggtaattgcggcttaagtaatcggtcgctgcatccagacagtcacagatgtggatcaggtcgatggcgtcccggtacggcgaggcggtattgtcaaaactgagcggataaccgcgggtaccgtcgtaggagcggtgatgtccgagcgcaaccggctggtagattaaaaagtctggatcggacgacagatagtcggagcccttctgcggatgtgtctgaataatgttaaattcgtagtcatttaacttgcggtgctgcgtgttgatgatcgggatcatgccgtttttcccaatatcgtggaataaagctgcgggaacgatatagtccaatacttccgcgggggaggcataggcatttcccgccagataggaggacggaatccgcaaaagctccggtcgtgcggctaaaatatgttttccgatcgcttctgcgagataggaaaccataacggagtgtgtgaatgtcgtgagatgtctggttacgaccagatctacgataaagttcattttttccatacggttctggaaagtcccgaggatcagcgggtgaaacgccaccagctggacaccgttgtttaacgtgtaggaattgagactggcaggctgattcatcagatagctggtaatcagattgcggtagcgccggtaagttgcctgcttaaactcttccttgaaatgcgtatgccccagcacgtcgatcaggttgagcggcagattggtataaaaagcaagcaggtcaggcgaggaaacctgaccgatggtctgcatcttgtggacataataatcgtccagaatctgccaggcggcttcccaggtgattgtaccattgcgtgcctgcacatagtggtaattaaatactgtgaatacagggcactcatagatggaaccatgctcgtgcaatatctcggagtaatagatctgcgtcatattctccagagaggacaggatcgcggatggtgcaataacacgttcaacgttaagaacagcgccgtacgcgcggaaatcgttgattgcacggtcacagagctgcggaatccgtggattggtggtatcgtactggcagaatttgggcatggtacggatctgacagagctcctcccagagccggtaagcggtctcaatgtctaagatgccaagacccggcgccacccggatcagattgtaataggcaataaaaatatagtcgcggcttgcagccgattcaaagaattcaatctgatcgcggtaagagagcactttggtgtagaaatatatagtcttatcgcgagaggtgggctctccggttcgtgagagctccatgtatgaaaagccggcgcagatatagagaaaaagcaggctttccgtatcgctgcggtcttcataatgtggaagcagaatatcaataatgcggatcagcagagccggttcggtatagttgctgtagtaaaaatcacggcaaaaagaaagtaaaagatcatatccctcatcggacagaagagcaggattgctgcttagcggatagagatactgttcaagcagtatctgattgtccgcacagcgctgctgctggtcgtctgcacatgcgcgaagtgttgccagccattcctcacggctggcaggctccagaaggtaatcctcccaggcgagactgtgcatgaagttgtcatagtaagtatcaaaaaagtaacggatatccgtgttgctgatcatgtattcctccgcctgcgcatttaaatatgtgtgaaaaccacccaatttgtccataagcgcaaatataataatattataacaaatagatcataaatgtatatagtaatttggatgtgcaggtggtcaaaaacgtgcatcaacggctaaaaaagaattaagaaaatttagaaattctttatttgcccctgcctgcgaggaggaatacaataaaggtgcggcggtaagatccgttgccgcaagaacggaacagggaggcagccatgtcgaacacgacaaaacttgcactggaggcatcacttaaaaagcttttgcttaagaagccggtggataagattacgatcaacgatctgacggaggactgcgggatcagccgcatggcgttttactatcacttcaaggatatttacgacctgattgagtgggcgtgcctggaggacggaaagcgtgcgcttgcggataagaagacgtacagtacgtggagtgaaggtctggagcagatctttgaggcggtactggagaacaagccgtttattttgaatgtttatcactcggtcagccagaagaagatcgagagctatctctataagctgacctacgatctgctggcggatgtggtagaggaagaatgtcgtgatgcggcggttagcggggaggataaggcgctgatcgcggagttctacaaatacggctttgtgggtatgatgctgcactggatcgacggcggcatgaagacggattacagagagcttgtgcagcggctgagtacgatgctacgcggcagtatcttaaatgccgcccggaattttgagcagaagcaatcagcaagcttagcaaaagagccggaatgataagttttttatcattttgatctttttgtaaattgtgtcattcacctgggcagactaagataaggacacaaagaatttacagcataactggaaaggtggtagttacgatgggaaaaggaaaacatataggacttggcgtggctgcgctggcagccggagcaggtgtggcggcactggcggcaggcagccataagaacaacggcgagcgtgcgcagaagaaagcggtcgaggagaaggcgagagcggaataccgcaataccgagcgcggcaagcatgagaagaacagcaagggtatctactataccaacggtaattacgaggcttttgcgagaccgagaaagccggagggtgtggatgagaagagtgcctatattgtcggcagcggactggcctctctggcagcagcctgcttcctggtgagagacggtcagatggaaggttcccacattcacattcttgaggcaatggacatcgcgggaggcgcctgcgacggtatcaacgatccgaccagaggatatgtgatgcgcggcggacgtgagatggagaaccattttgagtgtctgtgggatctgttccgcagcattccgtcgattgagacgccgggcgtctccgttctggacgagtattactggctgaacaaggaagacccgaactattccctgtgccgtgccacagaggagcgcggcaaggatgcgcacacagacggcaagttcaatctgagccagaagggctgcatggagatcatgaagctgttcatgacaaaggatgaggatctctacgacaagacgatcgaggatgtgttcgacgatgaggtattcaattctacgttctggctgtactggcgcacgatgtttgcttttgagaactggcacagtgcactggagatgaagctctatttccagcgtttcatccatcacatcgcgggactgccggatttcagcgctttaaagttcacgaagtacaatcagtatgagtcgctgattctgccgatgcagagataccttgaggaagccggtgttgacttccagtttaacaccgaggtaacgaatgtcattttcgacatcaaagatgacaagaaggttgccaaggcgctcgagtgcaaggtcaacggtgtggagaaaggtattgtgcttacggagaatgatctcgtgttcgtgacaaacggaagctgtaccgagggtacgatctacggtgatcagaaccatgcgccgaacggggacgcggaagtgcgcacgagcggctgctggagcctgtggaagaatattgcaaagcaggatccgtcttttggacatccggagaagttctgctcggatgtggcgaagacgaactgggaatctgcaaccgtgaccacgttggacgacaagatcattccgtacatcacgaatatctgcaagcgtgatccgagaagcggaaaagttgtgaccggaggtatcgtaagctgtaaggattccagctggctgctcagctggacgatcaaccgccagggacagttcaaggatcaggataaggataaagtatgcgtgtgggtatacggtctgttcaccgatgtgccgggcgattatgtgaagaagccgatgaaggagtgtaccggtaaggagatcaccgaggagtggctgtatcatctgggtgttccggtggaggagatcccggatctggcagagaacagcgccgtatgtgtaccgacgatgatgccgtacatcacagcgttctttatgccgagaaccaagggcgaccgcccggacgtcatcccggatggctgtgtgaactttgcgttcctcggacagttcgcggacacaccgcgtgatacggtcttcacgacggaatattcggtcagaaccgcaatggaggcggtatacggactgctcggtgtagacagaggcgttcctgaggtatggggaagtgtctatgatgtcagagagctgctcgacagcagtgtgaagctgatggatggaaagtctccgcttgagatcgaactgccgggaccgctcaatgtattgaagaagccgctgcttcgtgtggtcaagggaaccgtcgtggagaagctgctccgggatcatgatgtgatcaaggatggtatgttatagggaatcctgatgtgtagaaaactctgattttctgaatgaacggcaatgcccggaaagcctttggttttccgggcatttattgaaaataggtgacactttttaaatttataacttgcatatctgcttaggctgtgatataatttacctctgtcaggacacattgacaaatgggcagattcccgagtggccaaaggggacagactgtaaatctgctgcaaattgcttcggtggttcgaatccacctctgcccatgaattgttgaaagaaccattgccgtaaggtagtggttctttttttgcgcagctcgcaaaaagcagctgaaaagcgaaaatggattttgaaaaaaggcttgcactacggaacaacttatggtatgattttgcggattagtcacgactaaccagcaaaacataacaaaggagtcagagattgaagattaaaaaatattttttcgcagccgccgggggtatcagccttgcgctgggctgtatcggtattgtgcttccgattctgccgacggttccattttttctgttgacgcttttttgcttttcacaaagttcaacgcgccttcatgactggtttaccggtaccgatctttacaaaaagaatctggaatcctatgtgagaaaagaaggtatgcagatgaaaaccaaggtcagtattgtcgccactgtgacgcttcttatggcgatcggatttatctgtatgaaaaatgtgcccgtcggacggattgttttatccgttgtgtgggtatgtcatgtcatctactttttttgctttgtaaagacacttccggaagaaaaaacaggaagcgggggaatcgaatatgaagaataaacgcagcctgcatttttgtaatcctgctggtggcgcatatggtccagcacagaatgtctggcactgcatcataatacatgcaggagaggagtgcttataaaaaccagattttctcgtttgtggaggagatactggtcgcgcctgcatccaaaagagcgaggatgtcttccttttcggagaccagcccgccggcaatgaccggtgtggaggtggactgacagactttggcgatgaccttgggcatcagtgccggcaggatttcgatcagatccgggcgggaggatttgacctgacggtcgatgttctcatatgccatggagtcaatcagaaacagccggaggattgtaaagagccccagctccttggcgcgtttgataagtgtcggcttcgttgtgataatgccgtcggcattcgtgtatttttgaagaaagtcgactgccacttctttggaactcagtccgttgatgagatccagatggacgatcgcaagctttccggcggatttgacggtctccacgatgtcactgatggtgacgatgtcgccgtataagataaagataatgcggctgtcgctggtcaggcatctggagagaccttcgtcgtctttgaccgctgcaatgatgggagaatcctccagggcttctttaaataatttcttcatgacaatctcctgtattcggtgaattaataaggtcatcatgctgatcgcatgatgaccttattatataataaagtgagattctttgaaagcgcttattttgcaggaacatttctggcggcaatgatgtcgacaccagttccggcaacgtcggataagaccacatcgccgatcttaagcggtgcattgacggtgatatcctttaaggcgttgacacagtcgaaaatcctgcctttcggaatgtcggaggctgttttcacgtttgccatcgggtagatgcctccgttcacccggaccgtcgatgttacgatacgggtcggattcgtaacttcctttctggcgtaggcatcgcctctcggacaggtattgccggtgacggcggtgacggtagatccgtccatggtaactgtgatggcgcacccgagcgggcagccgatacaggtcaattctcttgtgctcatgatgattcctccattctatttatgaattttcttcaatgcggattgtgattctggacagatccgggaattcagcaagttttttcttgtcgagaattacctgctccatctcgccgggagccataaccggacgtttgcgcttgctgattaaggtgtcatcaaagtaagtcgcaatcgagcagttcttgtataccgcgcccacacggaagcggacggtcaaagtgtcgtccatctcggtcggacggacatatttcggaacggtgtagcgcacgccgtccaccgggaaaatctcgacggatgcggcatctttgctggagccgttttggatataagcggcggcatttttcccggctgcggttgcttcctgggaaacatagtccacaaggtcatgtacatgaaggacatttccacaggcgaacacgccgtcgatgctggtctctaagctgtcattgacgattggaccggaggtgacaggattgatggcaacgcctgcgctgcggctaagctcgttctccgggatcagtccgcaggagagaagcagggtgtcgcaggtgtagcgctcctcggttcccggaatcggtttgcggtccggaccgacttctgcaattgtgacagcttcgacacggtttttgccctcaatgtcgatgacagtgtgactgagcttcaacgggatgccgaaatcatccagacactgtacaatgtttcgcttcaggccgccggagtaaggcatcagttcggcaacaaccttgactttcgcgccttccagcgtcatgcggcgtgccatgatcagaccaatgtcgccggaacctaagatgacaacttcgcggcccggcatatagccttccatgttgaccagacgctgtgccgtacctgcggaaaaaataccggccggacgatagcccggaatatttaaggcacctctggaacgctcgcggcagcccatggcgagaatgaccgcttttgcgtggatctcaaacatgccgtcctcgcggttcatggcggttactttttttgtgattacgtttccggacggggcatcggcagcgatgtccatgaccatggtatttaatttgtactcgatgccgcgctctgccacctgctcgatgaagcgggaagcgtattccggcccggtcagctcctccttgaaggtatgtaagccgaaaccgttgtggatgcactggtttaagataccgccgagctctttgtctctctcgatgattaagatgctctcgatgccgtggtctctcgcggatacagcggctgcaagtccggcaggacctccgccgacgatgactaaatcatagtttttcatagtagaatccccctttaaatctctttgttgatgccgatgacgatattgccgccgacgccgtttttggtaatatcaaacatactcattggtacttcccgctctaagatctccatggtacgcggggagcagaaacctgcctgacagcgccccatgccggctcttgtgcggcgttttactccgtcgagggagcgggcaccgagcggacggtgaatggcgtccatgatctcgccctcgctgatcatttcgcagcggcagatgatgttgccatattccggatgctctttgatcagctgattgcgctcctccatggaaagcgtctccggtcttaagatgcctttgcgtgtggagatgaaatctgttttttccgtaagagaaagaagatcggcggcgatgcctgcggccatctctccgattgccggtgcggaggagagaccaggggactcaatgccggccgcgttgataaaacctttcgcgtcttccacttccccgatgatgaaatcgtcgccgtcttcgtgtgcgcgcagacctgcaaatgaggtgataacctggcgcatcggaacatttttgacactcaatgcggcagtctttgcgagggaatccagtccgtcctgtgtggtgttgactgcttccttattcgtgacatccactgcggtcggaccgactaagaggttgccgtgtacggtaggagtgacaagcacgccttttcccattttggatggaagctggaaaatcgtgtgtgatacgtgtgttccggcctctttgtcgagcaggcagtattcgcctttgcgggcggtaatatgaagcttgtgctcacttaccatattgttgaattcgtcagcgtgaacgccggcagcattgatgataaccttcgcctcgaaggtttccggtgtgtctgtatcggtgtggatggtctctaacgtgtaaccgccgtcttttttctggatggaggtgactttggtatttaagaaaaaggaaacaccgttggtgtatgcgttttctgcaaatgccatggtcatgtggaacgggcagacaatgccgccggtcggggcatacagaccgcaggtgacgtcgtcacttaaattcggctccagctgaagcagctcatcgcggtctaagatgcgcagccccggtacgccgtttttcgcacctttttctaaaagggcgtcaagaccgctgcggtcctgatctttggtacatacgacgagggaaccgtttctcttaaacggaatgtcgaggtcttttgagagggcatccatcatctcgttgccgcggacatttaactttgcctttaaggaaccaggggctgcgtcgaagcctgcgtggatgattgcactgttggctttggaggtgccatcacagacatcctcttcgcgctcaatgacacagacgttcgcctggtatctggataattctcttgcgattgcactgccgatgactccggcaccgataattgctacatcatacataatacattctccttttctttgaaatacaaaaagagcaaggcaaacaaaaacgatctcatcgtctctgatcttaccttgctcatgtctctcggtaatccttatgaatttaactatattataacacgaaatgaacaggatgcaagacctgattgaaaaaaacagatcccgtatccgactttgcaagaaagtgccccatattatcacgaattagggtataatgtgaataagcaatgagcagtgcagacaggagaagcggcgtgttttcacgctgcactgcgaaaaaatgccggacacctgcatggaaaggacaacatgtcatgggaagaggaagaagcgagaagcagaaacagaagctgctttacatggcgcagcttttatatgagagaacggacgaagatcatcctgtgacgacgcaggaggtgatcgactatctggaggtggacggaatccgctcggagcgcaagacagtgtacaccgatatggaggaactggaagatttcggtctggatattatacgggtgaaggagcgccccggcggatattatcttgccagccggaaatttgaactggcggagttaaaacttctcgtagatgccgtgcaggcgtcgaagttcatcacgacgaagaagtcgagagagctgattgccaagctggagacgctctgcggcagggaacaggcaaagcagctccacaggcaggttgtggtgaccaaccgcagcaaggcggtcaatgaaaacatttattataatgtagatatgatttacaatgccatcgcggaaaatgtgaagatccgttttcagtattttgaatggacggtcaataaagagatgaaactgcggcgggacggcagttactatgaagtgagtccctggctgctctcgtgggatgacgaaaactattatctgatcgcctacgacgacagaagccgcgacatccgccattaccgtgtggataaaatgctaaagatcgaacttacggcggaaagcagagaggggaaggagcagttcgggaactttgacgtggcggcatattcccgaaaaacgttcggcatgttcgcgggggaggacgagactgtgaccttaatctgcgaagacgccctcacgggagtcatgatcgaccgtttcggcaaggaggttgcgatgcgccggtatgatgagacaagaatccgggtgcgggtgagcgtcgcggtcagccgccagttcttcggctggctggcgggacttggcgcggcagtgcggattgagtcgccggaatccgtcgtgcgggaataccgcgagtatctggaaactattttgaaaacatacggggagcaggaactatgagagagcgcacttatgagataaagatagagggcgtgccgatcattgtcacgaaaaaacggatgaaaaacatgtatctgcgcatcagtaaagaggacggtacagtgcggatctcagcgccgcatcagatgagtgatgcgcggattgcggcatttgccggagagcggatcgaatggatacggaaatatcagcagaaatacaaagaagccggagagcgccgttcggaaaaccgggaactggatgcggcagaaatcgcgcgcagaaagaaacagttaaagcgtgaggtggagcgtcttgtggcaaaatgggagccggtgatgggggtgaaagtctccggaatcaccatccggcagatgaaaacgagatgggggtcctgcaatgtgcagacacatcacatcaacatcaatctggcgctcttgtccaagccgccggagtgcctcgagtatgtcgtggtacatgagatgacacatattctggaggcaagccacaatcagcgcttctggggatttatgacgaagttctacccggactggaagcgcgtgcgaaaatatctaagtgacgagactgtggattagcgtgccggaagaagcggggctgacggatcagataaactgattggtcgccgaatcgtactcgtagtctatattttttaatgcagagataacctctgcggcatcaatctggtagattgcggcaaattcttccagcgacgggtagtggtcacgaagctgtgtgttgacaaagcttaagagcatgacgggatctttgggaagtgtattcatggtatgggttcctcttttcttaattttatgttaaaatagcacggcataagagaaattgcaagaggtgaaacgaatgggacagaagatagacaaggaagtatttgataaattttttaaagagagttactgcaccgtcgaatatgagacggtcaaggaggagtttgagcggatcgcatcgatcgggaacgagctgtttacgggaagctatgaggcgagaaacctgaaccgcgagaactttattttatatctgaccagtgacagctattgtgattttgaggctgccgtgcaggaggcgatggatgatctgaacccggagattctggatgcggtgatggatgtgacggaagcgcaggaggacggtgatgagatcacggaggtttactgggatacccagagggaattgctgcatgattttctgctgcggctgtatgatgaagtgatttcaacatggaaatagaacagaaatgcgaaaaggaggacgtcttatggcgaaggcaagctgtgacagctgtgtatacaatgtgtacgatgaagatgacgagacctactactgtgaagtggatatggatgaggatgatgcggcgagactgatgcagggacattatagagaatgtccgtattatcagctggacgatgaatatgcggtggtaagacaccagatgtaaaaagggaagggcgcagctttaaagctgcgctcccttccttttttatctatcttatttctcgctgcaccggatcgaagcttccacaaagcccttaaagagtggatgtggacggttcggtctggactttaactccggatgagcctgtgtggcaacgaaccacggatgctccggaatctcgatcatctctacgattctgccgtccggagaggtaccgcagagcttcatgccgctctcggtgagagaagcgcggaagtcgttgttgacctcataacggtgtctgtgtctctcatggatctcttcagcaccgtatacctcgtatgccttggaggtcttgtccagaatacacggataagaaccaagacgtaaggttccgccgatgtcctcgatgccgttctgatccggcatgagtgcgatgaccggatgcgtggtgtttggatcaagctcgatgctgtgcgcatcgttgaagccgcagacatgtcttgcgtactcgatgatcgcaacctgcatgccgaggcacagaccaaggtacggaatctgatgctcgcgtgcgtactttgcggcaaggatcattccctcgacaccgcgggaaccgaatccacccggtacgagaataccggatacatcggataagatctcgtccacgttctctgttgtgacgtcctcagaatccacccacttgatattcacggttgcgcgctccgcaatgccgccgtgcttcaacgcctccacaacagagatataagcgtcgtgaagtgcggtatattttccgaccagtgcgacagtcacttccttgttcggatgacggagtgcatcgaccattgcttcccagtcctttaaatccggttccggacagtccagatgaagcgcttcgcaggcaaccttggcgagattctccttctccatggcaagcggcgcctcatagagatattcaacgtcaagattctgaagtacattgcggttcggcacgttacagaacagcgcgatcttgtccttgagactctgatcgagcggatgctcggaacggcagacgatgatatccggctggatacccattccctgcagttctttgacgctcgcctgtgtcggctttgtcttaagctcgccggatgccttgatatatggaatcaatgttacatgaatgaggattgcattctcgtgccctacttcgtgctggaactgacggattgcctcgaggaacggctggctctcgatgtcgccgacggtaccgccgacttcaatgatggcaatgtgtgtctccttggaagtaaagttccggtagaagcggctcttgatctcgtttgtaatgtgagggatgacctgtacggtacctccgccgaaatcgccgcggcgttctttctgaagaacagaccagtataccttaccggttgtaacgttggaattcttggtcaggctctcgtcgatgaaacgctcataatgtcctaagtccaggtctgtttctgcaccgtcatcggtcacaaatacctcgccgtgctggatcgggttcatggttccgggatcgatgttgatgtacgggtcgaatttctgcatggtcactttgtagccacgggcttttaaaagtcttcccagagaagcagccgtgatacctttcccaaggccggaaacgacaccaccggtgacaaagacatattttacaggcatagggttttcctcctcatataaaagtacagttgtgtgaataatagtaatacgctctatataacccatacagtatacaactaagtgtccggaaaatccagcacaatttcaaaaacacagaaaatagtatgccgggaaattttagaattattttagaaatgacaggaaaacttcacgaagaacgtattgcttttaaattccattttcaatataatatagaagatatacgataagaatccagactctgaactggcggagcctgttggaaaggataaatacttcaatggacaatcagggatcgaataacaattacaataacggtaattcaaacggagggaataacggagacggcggcaaagggaatcacaatggtcagattttgatggcatttatactgatttcactgattgcgctgtttattatgagtcttgtaaccaatcagttcaaccagatgagcacgcaggaggtgtcttactcggagtttctcgacatggtgaacggcactggcaaatgggaaggcagaagtgtgaagtcagtggagatcggttcgtaccagatcgacatcacactgaattccgatgagaaaacaccttacgaggtgacttactactgcgggcgtgtggcggatgatgagctgattccgttacttaaggaaaagggcgtggatatcagcggagtgattccggataacacatccacctggatttacagtattttaagctacctgattccgctggtgctgatctgggttgtgctcggcgtggtgatgcgccggatgggcggcggcgccatgggcgtcggcaagagcaacgccaaggtttatgtggagaagcagaccggcgtgacgttcaaggatgttgcgggacaggatgaggcgaaggaatcgctacaggaggttgtcgatttcctgcacaacccgaaaaagtaccgcgacatcggtgcgaagctgccgaagggtgcgcttcttgtgggacctccgggaaccggtaagacgctccttgccaaggcagtggcgggcgaggcgaaggtaccgtttttctcgctggcaggctcggattttgtggagatgttcgtcggtgtcggagcttcccgtgtgagggatctgtttaaggaagcacagaagcaggcaccgtgtatcatctttatcgatgagatcgatgcgatcggtaagagccgtgacacccgttacggcggcaacgacgagagagagcagacattgaaccagctccttgcggagatggacggttttgacacgtccaagggaattctgattctcgctgcaaccaaccgtccggaggtactggacaaggcgttgctccgtccgggacgttttgaccgccggatcattgtcgacaagccggatctgaagggtcgtctggagacactcaaggtacattccaaggacgtcatgatggatgagaccgtggatctggatgcactggcacttgcgacggcaggtctggtgggttctgatcttgccaatatgatcaatgaggcggcaatcaatgccgtcaagaacggcagaaagtttgtcaaccagtccgatctgtttgatgcgtttgaacttgtggcagtcggcggcaaggagaagaaggaccgcgtgatgagcgacaaggagcgcaagatcgtgtcctaccatgaggtcggtcatgcgatggtgacggcgcttcagaagaataccgagccggtacagaagatcacgattgttccgcgtacgatgggggcgctcggctacacgctgcagacgccggaggaggagaagtatctccagaccaaggatgaacttttggcgaagattaccacttacatggcaggacgtgcggcggaggtgctggtattccagtcggcaaccagcggtgcggcgaacgatattgagcaggcgacggcgattgccagagcaatggtaacgcagtacggtatgtccgataagttcggtatgatgtgcctggcgacggtggagaaccagtatctggacaaccgcgcaggactgatctgcggtgaggacacggcggcgcagattgataaggaggtacttgccattatcaatcacgcatatgatgaggcgatgcgtctcctcacggagaaccgggaggtgctcgatcatatcgcagaatacctctacgagcatgagacgattaccggtaaggaattcatgaagattttccgtgaactgaaaggaatcccggagccggaggacgaggcggagaagaagacgttcttcgagcaggcggaggaagcccgtcaggaactcgaggagggaaaaactgccgcagagagtcagaacatggatgatgtattgctgcgcaatacgcaggatcatgaggaacagtaatgtttgtaattgaagaagaacttaaaaaactcccggatcagccgggagtttatattatgcatgacagccgtgatgccattatctacattggcaaggcggtcagtctgcgcaagcgggtgcaccagtattttcagccaagccatgatgagggtattaaaaaagcgcagatggtaaaacagattgcgcggtttgagtacattgtgacggattccgaactggaggcgctggtactggaatgtaatctgatcaaagaacatcggccgaagtacaacaccatgctgcgggacgataagacatatccgtacatcagagtgactctcggggaagattttccgagagttctcttttcccgccagcagaaaaaagacaaatcgcggtactttggcccttacacgagcgcgggagcagtcaaggatacgatcgagctggtgaacaagatctatcagctgcgcacctgcaaccggaacctgccgcgcgacacgggaaaggaccgcccgtgtctgaattatcatattcatcagtgcacggcgccctgccagggatatatcacaaaggaagcgtaccgtgagcgcgtggatgcggtggtggaatttttaaatggcaattatgcgccggtgctaaagtctctggaagagaagatgaatacggcgtcggccaatctggaatttgaaaaggcgattgagtaccgggagcttttaaacagtgtcagacagatcgcacagaagcagaagattacgcacacggacggcgaggacaaggatattattgcgctggcggcggatgaccgcgacgcggtggtacaggtattttttatccgtgacggcaagctgatcggcagagaccatttttatgtgaagatcggagcagaggacaccaaagcccagatccttaccacattcttaaagcagttctattcgggaacgccgttcattccgagagagattatgctgccgcaggagatcgaggagcaggaggtgcttgccgactggcttggcgagaagcggggcagcaaggtttacatccgcgtaccgcagaagggcatgaaagaaaagctggtggaactcgcacagaagaatgccaggatggttcttgcgcaggatcgtgagaagatcaagcgcgaggaaggcaggacgatcggcgcgttaaaggagattgaacagcttttagatatgaaaggattaaaccgcgtggaggcgtacgatatctcaaatacgagcggttttgagtcggtcggttccatgattgtgtatgagaaaggcaagccaaagcggagtgactaccggaagttcaagctgcggacggtgtcgggaccggatgactatgcctccatgtatgaggtgctgacgagaagatttacgcatggcatgcgtgagatggaggagatggaagaaaaagacctgtcggaggagtatggcagtttcacaagatttccggatctgatcatgatggacggcggccgcgggcaggtgaacatcgcactcagagtgttagaggagctgcatcttaatattccggtctgtggaatggtaaaagatgataatcaccgcacgcgcgggctatactatcataatgtagagatacccatcgaccgtggaagcgagggatttaagctgattacgcgaattcaggacgaggcgcaccgttttgcgattgagtaccaccggtcgctccggagcaaggagcaggtacattccgtgctggatgacattccggatatcggaccggcaaggcgcaaggcgctgatgaaaaaatatcagtcgctggaggcaatccgggaggcgacggaggaagaccttgcacagacggacagcatgagcccgcaggcggcgcgctcggtttaccggtttttccgggagaaagaacgggaaaaccagccgtccgattagttgaagattccatgtgcctatggtataatttgcacaaaagtaaatcacatacaaaggagcgtaagggatgagtggtgttggtgtagcaaaagtggcgcagattctcgatctgtgcaattttattccgcagatggaattaaaaggacatcggatcatgatccgtgatgtcaaccgtccggcattgcagctgagcggctatttcgagcattttgagcagtcccgtgtgcagatcatcggtaccgtggaatacacgtatctgcagcaactggatgagaagaaaaaagaagcgatctaccgggagtttatggcttacgatattccgtgcgtcattttctgccgtgatttaaagccggacgagatgttcctcaaaattgcggaggagagcaatctgccggtattcggaaccaagcgaagcacatccgagttcatggcggagctgatctattgcctgagcgagcagctggcaccgtgcatcaccattcacggcgtgcttgtagatgtctacggcgagggacttctgattatgggagagagcggcatcggtaagagcgaggcagcactcgagcttgtgcgcagaggacatcgtctggtaaccgatgatgtcgtggagatccgcaagatcaacgagcatacgctgatcggtacttcaccggacatcacacgttactttatcgagctgcgcggaatcggcatcattgatgtgaagacgctgttcggtgtcgagggcgtcaaggagaagcagcagatcgatctggtcatcaagctggaagactggaagaaggataacgagtatgaccgtctgggacttgaggaggagtacacagagttcctcggcaataaagtcgtatgtcattcgcttccgatccgcgccggacgtaaccttgcagtcatctgtgaggcggcggcagtcaaccacagacagaagaagatgggttacaatgccgcacaggagctgtaccgccgtgtacaggagaacctgacgaagaagtccgacgatgaggaagacgaatagatcaatataggttaggagaaacaacagcaatggaaagaatgaacgcatgggagaaatacccggaaggaaaaaagagaaacgaagtttttgattttgcagaggagtaccgtaagtttttgtcagactgcaagacggagcgcgagtgcgtcacctattttgcacagaaagcagagaaggcgggattcgtaaatgtggataccgtgctggagaagggtacaaagcttgcagccggagataaagtatatgcaaacaatatgggaaaaggacttgctatgttcgtaatcggtgagaagagcatggagcacggcatgaatattctcggcgcacatatcgattccccgcgcatggacttaaagcaggacccgctgtatgaggataccgattttgcaatgctggatacccactattacggcggtatcaagaagtaccagtgggtgacactgccgctggctctgcacggcgtcattgcgaaaaaggacggcaccgtggtcaaagtgagtgtcggagacaagccgggtgatccggtattcggcgtgagcgatcttttgatccacctttccggagagcagatggagaaaaaggcagccaaggtcattgagggagaaaacctcgatctgatcatcggcagcattccggcggaagcggatgaaaaagacgacgtcaaggaaaaagtaaaagccaatatcatgaagatccttgcaaaggaatatgatatagaggaagaggatttcctctctgcggagattgaggtcgtgccggccggcgaagcgagagactacggctttgacagaagcatgattatgggttacggacacgacgacagagtgtgcgcatatccttcctttgaggcgattgcggcgatggagaagccggagatcacaagtgtatgccttctggtagacaaggaagagatcggaagtgtcggcgcgagcggtatgcagtcccgtttcttcgagaatacggtcgcagaggtgatgaatgcggcaggaacgtattctgaactggcactcagacgtgcactgaagaactcgagcgttctctcttcggatgtatcggcggcatttgacccgaacttcccgtccgtgatgacgaagcgcaacgcagcatattttggaagaggacttgtgtttaacaaatataccggagccagaggcaaatccggatcgaacgatgcgaatgcagagtacgtgggagcactccgcgcgatcatggaccgcaacgaggtggcattccagacggcagaactcggcaaggtagaccagggcggcggcggaacgatcgcctacattcttgccaactatggcatgcgtgtgattgacagcggtgtggcagtgctgaacatgcatgcaccgtgggagatcatcagcaaggtggatctgtacgaggcatatcgcggctatattgcatttttaaaggaacaggcatgaaacaacagttattggatacgttagaacagatcgcaggaaaagaaaatattcatccgaacgagccgatgagccgccacacgacctttcgtgtgggcggtccggcagatgtgctggtgacgccggaagcggagaagcttgcagcagttaccggtgcatgccgggaggcgggagagccatattacattgtcggaaacggcagtaacctcctggtgggagacggcggcatccgtggggtggtcattcttaccagagacgggatggatgagatttcggcagacggcgtgcggattacggcgggagcgggagcactcctgtcacgcacggcgtcgcttgctgcgtcacatgcgctgaccgggatggaattcgcagccgggattccgggaacgatcggcggtgcagttgtgatgaatgcgggagcttacggcggagagatgcgggacatcatagagactgtgaccgtgctcgatgagacgggagcacagcatatgctgtccgtggaggagctggagcttggctaccgcacgagctgcattttaaagaagcactatattgtcacacaggcggtattgaagcttgcagcgggagaggagcaggccatccgggcacggatgaaggaacttgccacgcagcgcgccgaaaagcagccgctcgaatatccgagtgcgggaagcacatttaaacggccggagggatattttgccggaaagctgatcatggatgcgggattgcgcggataccgggtcggcggagcacaggtatcgcagaaacactgcggatttgtggtcaacacagggaatgcgaccgcacaggatgtgaggacgctgattgcggatgtgagcgcagaggtggacagacagtttcaggtgaagctggaaccggagattaagatgcttggcgaattttagcccaatggacaaagataacagcaggatacgcaggaatggagagtgactggcatgaagttcgtgattttgaccggaatgtccggggccggaaaaagtacggcaattaagatgatggaagatatcggatactattgtgtggataatcttccgatcgcgttgcttgaaaagttcgtggagctgtcgagtctgcaggaaacggcagaactgcagaaggtggcggtcggtattgacatccggaacggccaggcgctggaagagatgcgtgacgtgcttgcgcggatcaagaaaaagcaggtacactatgagatcctgttccttgatgcggaggattctgtgctggtcaagcgctacaaggagaccagaagaaaccatccgctgtccggcggagaccgggtggacaagggcattgaagaagagagaaagcgtctggcgtttttaaaagagagcgcggattatattatagataccagccagcttctgaccagagagctgaaagcggagctggataagatttttgtgcagaatcaggactataagaatctgtttattacgattctgtcgtttggatttaagtacgggatcccggcagactccgatctggtctttgacgtgcgtttcctgccgaatccgtattatgtggagggattgcgggcaaagacgggcaatgacaaggagatccaggattatgtgttccagtatgaggaggcacatacgtttttggacaagctcgaggatatgctgaatttcctgattccgaattatattgcagaagggaagaaccagcttgtaatttccatcggctgtaccggaggaaaacaccgttcggtcacactcgccaatgcgttgtatgaacggctttccggacagaagggatacggactgaaaatagagcaccgcgacatcggcaaagatgcgcttcgcgggaaatagaccccgcagacaaagggcagagccgatggacgcgggggacggttggagtaagctatgtcattttcaagtgaggtaaaaacagaactggcaaaacatctgggaaagagcagacattgccagattgcagagctggcggcgctgattgcgtttgagggaaggattcctgcggcagagtcggagaaccggctgctgatgcaaaaatatcagctgctgttagcagaactgtttcatatagaagaaatccataccgaggaggaggcgcgcagcgttttttccacggttaagatgtacaacgatgccacgggggaggcggagccggaagatacagtcaagggactcctcattcagcagagctgctgcaagagggcgtacataagaggggcgtttctggcgggaggatcgatcagcgatcccaacaaatcctaccattttgagattgtgtgccgaagtatcccgcaggccgagcagcttcgggatgtaatcaacagttttgacatggatgccaagattgtggcacgcaaaaaatatcaggttgtgtacttgaaggaaggctcgcagattgtagatattctaaacattatggaggcgcatgttgcgctcatgaatctggagaacgtgcggattctgaaggaaatgcgtaattcggtgaaccgcaaggtgaactgcgagacagcgaatatcagcaagacggtaaacgctgcagtcaaacagcttgcggacattgaatatataagagagactgccggcttgtcatatctgccggagaatctcaaagagatggcactgcttcggctggaatacccggatgcgccgcttgcagaactgggaacctacctgaatcctcctgtgggaaaatcaggtgtgaatcacaggcttcgcagaatcagcgagatggcagacagcctccggcagcagacagtgtaaggtgtaagttaaaaagcgaggatgggaggatgcaatgaaaaagagtgtggtagtaaagatgcagcaggattttgaggcaagaccgatcgcaaatctcgtgcaggtggcaaaccggtatgaaagcaaaatctatctggaacatggtgacagccgtgtcaatgcgaagagcattatggggatgatgagtctggcgttgttaaacggtgaggagattcttgtggatgcagagggagcggacgaagcggaagccgttgcagcgattgaggaattcctcgtctcatagaaagaaataagataagggtgtataaataatgggtacaaagaaaaagttactgtttgtgtttaatccgttttcaggcaaggcacagatcaagaatcagctgttggatattgtggatgtgatggtgaaggcggattatgaggtcaccatttatccgacacaggcacagggagacgcgatacataagatcgagacggaagccggcgattatgatctcgtcgtgtgcagcggcggggacggtacgctggatgaagtggtgacggggatgatgcaccgtgagaaaaaggtaccgctcggctatattgcagcgggcagcacaaatgattttgccacatcgctcggcattccgaaaaatatggtcaaggcggcagagacagccgttgcaggacgggtgttcccgtgcgacatcggagcgtttaacggggacttcttcgtatatgtggcggcgttcggactgtttacggaagtttcctacaagacgagccaggagtggaagaatgtgctcggacacgcggcttacatcttagagggcgcgaagtgcctgcatgacatcccgtcgttcctcatgcaggtagagtatgacaatgtgcgtcttcaggacgagttcatctacgggatgatcagcaactccacctctgtgggcggatttaaggggatggccggaaaggacgtcctgctggatgatggagtcttcgaggtcacactcatcaaaaagccgaagaacccgatcgagttaaacgagatcatcgcatcgttgatcaatcttgtggacgatacggacatgatctactcgtttaagaccagcgaggtgcggttcacggcgaagaatacgattccgtggacgctggacggggaattcggcggcgaccatgaggaggttgtggtgaagaacctgtgcagggcggtcgagattatggtgccgcagggcgagtgagagaccttgtcgggaagtatgttttgttaaaaatttaactttattttttacaggaagtaatatataatagcggtagggtaaaaacaactgccgcattgcggcaaattgattaagttatggaggaattcattatgttagtatctgcaaaagaaatgttagaaaaagcaaaagctggtcactatgcagtaggtcagttcaacatcaacaaccttgagtggacaaagtctgttctcctgacagcagaagagttacagtctccggtaatccttggtgtttccgagggcgctggtaagtatatgaccggtttcggtacagttgcagctatggttaaggctatgcatgatgagctcggtatcacagttccggttgcacttcatctggatcatggtacatacgaaggatgctacaagtgcatcaaggctggattcacatccatcatgttcgacggttcccattatccgatcgacgagaacgttgagaagaccaaggagctggttcaggttgcacatgcaatgggaatgtctatcgaggctgaggttggttccatcggcggcgaggaagacggcgttgtcggcatgggcgagtgcgcagatccggacgagtgcaagcgtgtagctgatctcggtgtagatatgcttgcagcaggtatcggtaacattcacggaaaatatccggcaaactggaagggcttaagctttgagactctggatgcaatccagcagaagacaggtgttatgccgttagttcttcacggtggtacaggtatcccggctgacatgatcaagaaagcaatctctctcggtgttgcaaagatcaacgtaaacacagagtgccagttatctttcgcagatgctacacgtaaatatatcgaggctggcaaggatctggaaggcaagggctttgacccgcgtaaacttcttgctcctggcgcagaggcaatcaaggcaactgtaaaagagaagatggagctgttcggttccgtaggtaaggcaaacgactaattctttatggaatgaagttgttttgtcggacaacagaattttttcacaataatttgactagaactttattatttttgttagaagtgtaaaaattaaaaatatataaagttttcgcttgcatttcgttttaaaaagtattatcttaataccaacaaaacgatgtgagcgatgaacaagggtgttccaatagacttggaatgcccttttttctgtatacagaactttacatgaagttctggttgaaatccgacaggaaatcgcgtacattagaataagcaagtctggtcttaggggattggattagtgagaagaaaggatgtagaagatgagcgaaacaggataccttaatgcagcagagattttcggtgaaaacgtattcaacgatgcagtgatgcaggaacgtcttccgaagaaagtctacaagaagttaaaggaagtaatcaacgagggaaaagaactggatctcgagacagcggatgttgtcgcacatgagatgaaagagtgggcgattgaaaagggtgctacccattacacacactggttccagccgctgacaggcgtgaccgcagagaagcacgatgcatttatcacagctccgatggagaacggtaaagtgctgatgagcttttccggtaaggaattgatcaagggcgagccggatgcttcttctttcccgtcaggaggtcttagagcaacatttgaagccagaggctataccgcatgggattgtacatcaccggcattcgtgagacaggatgcagcaggtgcaaccctttgtattccaaccgcgttctgttcttacacaggtgaggcacttgaccagaagacgccgcttctccgctctatggaagcaatcaatgagcagtcacttcgcttattaaaattattcggaaatactacatcaaagaaagtaacaccgtccgttggaccggagcaggaatactttatcgtagaccgcgagaagtatttacagagaaaggatctcatctttaccggacgtaccttattcggagcaatgccgccgaagggacaggagatggacgatcactatttcggatcaattcgtgagcgcatcggtgcatacatgaaggacgtcaatgaggaactctggaagcttggcgttacggcaaagacacagcacaacgaggtggccccggcacagcatgagcttgctccgatctacgcagaggcgaacgtggcagtcgatcacaaccagctcgttatggagacattgaagaaagttgccggccgtcatggtttacagtgtctgcttcatgagaagccattcgcaggtgtgaacggttccggtaagcacaacaactggtcgatcacgacagacgatggcatcaacctcttagagccgggcaagacaccgcatgagaacatccagttcctgttagtccttacctgcatcttaaaagcagtagataggcatgcagatctcttgagagaggcagcagcagatgtcggaaacgatcacagattaggagcaaacgaggcaccgccagcaatcgtatccatatatcttggtgagcagctgcaggatgtgctttcacagctgatcagcactggtgaggcaacacacagtatctccggcaagaagttagagaccggtgttaagacgcttccggatttcatgaaggatgcaaccgaccgtaaccgtacatcaccgtttgcattcacaggcaataaattcgagttccgtatggtaggttcccaggattccatcgcccagtcgaacgtggtactcaacacgatcgtggcagaggcatttgcagaggcatgcgacgtcttagagaaggcagatgactttgacatggcagtacatgatctgatcaaggagtatgcaaccgagcatcagagaatcgtattcaacggcaacggatattcagacgagtgggtagcagaggcagagaagcgcggtcttccgaacatccgctccatggtagatgcgatcccggcactcaacacagagaaggcagtgacactgtttgagaagttcaaggtatttaccaaggctgagctggattcccgtgtggagatcgagtatgagacctacgcaaaagagatcaatatcgaggcaaaggcaatgatcgacattgctgcaaagcagatcattccggcagttatcaaatatacaacggtactggcacagtccatcaatgccgtaaagagtgcatgcggcgcagatatcagcgcgcagacagagatcctcacagaggtatccgatcttctggcagacgcacagaatgctctcgacaagttaaaggatgtgacagagaaagcatctgcaatggatgagggcagagagcaggctgtatactacagagatacggtaaagacagcgatggatgaactcagagcgccggtagataagctggagatgttagttgataagtcaatgtggccgatgccgtcctatggagatttgattttcgaggtataactgctaccatcaacctcctaaataaaaaatccccctaaagggagaaaaaactccccgaaaggggaggattgccaggtgacaatcgtcacctggcagattatgaaaaagttttgtgggtagtaacaaatactgataactatcatttgtatggttatagtatatggagcagaaatgaaaatttcatgtttacaggatgaaagatttttgaatcttaaatgaataaactgtgaacagcagagggatgggagcagcgctttcgctaaaactgaatataaaggaggagcttggcatgaaaaaactggaaattattattaagccggaaaaactggaagacttaaagggcgtgctggataccgaggaagtaaacggtttgaatatcgtcaacagcatgggctatggtaaccagaagggaattattaagaactaccgcggtgcagagtattccgtgaatctgcttccgaagatcaaagtcgagacggttgtggcagacgaagttgcaccgaagctgattgataagatcgtagatgagattaacaccggacatttcggagatggtaagatcttcgtgtatgatgtcgaagatgcaatccgtattcgtacaggtgagcatggcacgaaagcattgtaagcctgtttaaggagtgctgttataggaggaattgaggagcctgctataggagcgataaaggagcactacagattattatgaaaaaatcaaatattgtaacatattatcaaaggggataatagagaacacaggaatgtctgtgctcgctgttatcctctttttttgcaggaggataagcttatggatatgagtgtatggttccttatgggagcagcgttagtcttttttatgcaatgtggattcgccatggtagaggcaggatttacgagagcaaagaacgtcggaaatatcacgatgaagaacctgatggatttctgtatcggaaccgtggcgttttatctgctcggttacaaccttttgtgcggcgatggaaaatttgtcggctggggactgaacccgtttacgaatttcgacgagaccgactggtcggcgtttgtgtttaacctggtattttgtgcaaccgctgcaacgattgtatccggtgccatggcagagagaacaaagttcattacctactgtatctacagttttatcatcagcttatgtgtgtacccgatcgaagctcactgggtatggggcggtacaccgtggctgacagatatgggatttacagatttcgcgggctctgcctgcatccatatggttggcggtatcactgctttcatcggtgcggcaatgttgggaccgcgtattggaaaatatgacaagaacggcaagccgaagcctattctcggtcacaacctgttgatcggtgcccttggcgtatttattctctggttcggctggtacggcttcaacggcgcagcagcaaccgacaccatgcagctgtcacagatttttgcaaccacaacgattgcaccggcagttgcaaccgtaaccgcaatgctttatacctggatcagaaacggaaaaccggatgtgtccatgtccttaaacggttcgctggcaggccttgtggcaatcacagccggatgctcgaacgtagatgcaatcggagcttttattatcggagcagtcgcaggtgtgcttgtctgcgtggcagtatactttattgaggataaactgaaagtagatgatccggtcggtgcagtggcagtacacggctgcaacggtatctggggtaccctcgcggtaggattctttgattacaaggacggactgttctacggcggcggtgtacatcaccttgccatccagtgtctgggaatcctctgcatcgcaggatggacgatcatcacaatgacaatcgtgtttaccgtattaaagaaaacgatcggtctcagagtcaccgcagaggaggagatcgagggtcttgactcgacagagcatggattagagtccggctatccggatttcgtatccagagagttacattaatatgcactaatctaatttgattagattggtgaatctaatccccttagttagtatatacatcaacgcgggaacgcccggcagattgccgggcgctttcgcgtttttgactgtaaagtccataaattgtgattgtatagtaaatacgaagaaaaaatctgcgaaggcagttttgcggatagaatatctgagggagaaagtggagaagaagtctattgaatagttggggacattctattataattcaagataagaaaataaacgaaaagtagtgtgggaaatatcagcagatatagggttggaaaaataatttgagacctgtggaagaagtaaaggcaacgacataggaggaatgtgatatgggacaggacgatacaaagcataatctgctgttcatcagcaagtatccccagatcattcatgaatttacagatgcgatgaaggatcgggatattgagattgagacggcgataaacggcatagaggcggcggcaaagatcaagaaaaagaattacgacatcgtgataacgggactatccctggaggggtacaacggggagcagatcataacgtatctgaacaagacggcacccagtaccgtttgtatcatctatacgaccacaatcagttcggcgcagcttcatttcttcatcaacgagcggaatgtattccgtgtatttttacgtccggtagacttccgtggagcattctgggaggcgcttgaggaggcgtatgaatatcatgccgtgcaggtcaaaaatgaggaggatacaggcgcgcggagacaggagcaggaaaagcaggagcgcgagattgagatcatggatcagcgcatgcgcagtcagcgccaggccagagagacgacgaatcgttatatgaagcggctggcaggacttacgatcaaagaatacacgccggcggcactcagcgcggaggccagagggcatctggaacgtattgaggcgagaaccatcgatttttgcagtgagcagggagaacatgcagcggaatcgctggacaaggcggaggaggtactgcagacggtaagatcctttacagagaattaaaacatgacagataaaaaaatgcgcccgggttttgagagtttcaaaacccgggcgcatctttttattgactgccgtcggcgttgtcgccggtattctcagcagagccgccggtattgtcaccggtggtctgattctcacccgtcgatgtgccgctgtcacccggggaggtgctgttgtctgtggttccggtattggtatcctgcgacgggagatccgtcacgcccggaacaggtgtgtacggcgtcgactcatacggtgtggacggtgcattgtgcatcgtacaggtattggcgagagcctcttcggtcagaagataaggagcatcctctgtgttcgcagagccgccaatcacgtatacgccggttgcgtaggtgttcggacaatttgcgccggcgagctgtccggaatccgcacagatgttggccagaatatggtggtcacagtaatcggtcggtgccgtgccggttgcaaaatattcggtatatgccatgttgccgcgcggatcgttcgtacatacgccgtcgatggcaagctttccggattctttgcagacggtagcagtgacgatgccgtccggtttttcaaagtccgcataaggaagatcctcgtgaatccggctcatgaccgctttccagatcttcttcggataggtggtctgtccgctgttctgaaccgcattgtcgtcgtaaccgccccataccacgcaggtgtaataaggtgtgaatccggcaaacagggcatcacggttcttggtggtggtaccggattttcctgcctgcgccatactgcttccgaagtaggccggcgtaccggttccctgtgtcatgacgtccttcatggcgtcggtcagaagccatgcagtggtctccttcaggacggtgtgcgattccggtgccgtattgtcaagcagtacatttccgtcatgatccagaattcttgtatagaattttggcttgatgtaggttccgctgttggcgatggtggcgtaagcggcggtcagctccaggttggtgacaccgttggtgagacctccgagtgccagtgtctcgttgccgctctcgtcgatgccgacggtggtaaaaccaaagttgcggatgtaatcgtaacccagggaaggaccaatctgcgccagcgtcttaaccgctacgacgttgatggaatcaatgataccttcgcgcagtgtggtgaaaccgcggtagcgcttgtcgtagttatttaccgctccgccctgtccggaaccgtaattgtacggcgcatcatcctggacatcggcaagtgtgagacctcccgcgtccagtgcaggtgcataggcagcgataatcttaaaggtggaacccggctgtcttgtggtgtccgttgcacggtttaacgttttgttggccgtcttgtcgccgcgtccgccgacgagcgctttgacttctccggtggactgatccatgacggttaaggcagcctgcggctgaacggtaaaggtaagcgtctcgctgccgtccacaacgacgtcgccgtcctgcataagatccgtcttatactgctcgatcgctgcgcgggcgtcatcctcgctggcaaagttgatgctgtagttcttgtttgacttctgataataggaaagcatcgtctgctggctgtaattcgagatggtgccgtccggggactggatcgatacgcggtaggagaaggataccttcggatcggtcgggtagttctccagattattgacctcttcatcacagatattctggatatccgggtcctgcgtggactcgatggtaagtccgccctgatagagtgctttgtaagcctgcgtctccgtgtagcccagacggtcgatcatatcctgaacgatctgatccgtcatctcatctacgaaataggaattgatattctcatcctgtgactcgacattgacgacctgaatccggtcgtacacattgtccgcaacggcctcatcatactcgctctgtgagatatagccctggtcaagcatgttgttcaagaccttctgccgccgctccttattgtgatccggatgcgtgatcggattgtaataactcgggctctgggtgattgcagcgagcacggcgcactcggagagtgtcagctccgagacatcttttccgaaatagcgctccgatgcgacgccgacgcccagcgtattctgaccaagattgatagcgtttaaataattttccagaatccagtccttgtccacaaccttttccagctggagagccaggtactgttcctggaattttcgctcgaacttgtccgccatggattgttcgcttgtccactgggtaaacacggtatttttgagcagctgctgtgtgatggtacttgcgccctccgaaaaatgaaaaccggatgcgacgccttttaatcccgcacgcagaataccctgcagatcgataccgttgtgatcgtaaaaacgctcatcctcgatcgcaacaaaagcatgctgcagattgatcggaatctcgtcgatcgtcacgtatttacggttggaaccggacgcaacgagcgttgcggtctggttgccctggttgtccaacacggtcgtaaggtatccagtcggggttgcatcaatatcttcgattgatggagcggaagcaataattccggagatcactccgaacgcggaacatccgccgacaatcacgactgcaaaaaagcatataagcaatgccttacaaaaaattacgttgaattttttgcgaatcatggtacccttggaagcaagttcatgctcgcgcttccgagtacgtttctttccataattcatagtaggcctccttttctgattcaccatcaatgtattataccaaagaactgtgtcagaataaagaaaaaactgaaaatacggacattcttcacagtttcttaaggattcgtattgcaaaaaagaaagctgccgtgttactatttgaaaagagtggaaagcgaagggaaaggacccgggtggcgggattgtggatcatatgaagacagtgtatatcggcggcgagggtgagattgtagaaaagaagtccagatttatagcgacggtccggccggttgcctcggaggaggaggcggtggcattcatcgcggagatgaagaaaaaatactgggacgccagacacaactgttccgcatttgtgatcggagaccggcaggagttaagccgctgttcggatgacggtgagccggcgcagacggcgggcagaccgatgcttgatgtgctgctgcgggaggagattcataacgtggcggtcgtggttacacggtatttcggcggcgtgctgctcggcaccggcggtctggtgcgggcatatcagggtgctgtgcaggcggggcttgcagcgagcaccattatagataagaaggaaggcgttcgtctcacagtcggcacggactataccgggcttggaaagctgcagtatctgatcgcgcagcagaatctcacgctgatcgacaccgtgtatacagaaaaagtggaacttcagcttatggttccggcagaacagcagcaggaagtggaaaaagaaattgtggaggcgacgaacggaagtgcccggatttcctggggtgagaaggtgttgtacgcactcgtagacaaaaaaatcgaaatttttgaaaaaaacacttgattttttctgccgacctgttataatagcttttgttgacagcacttagggctatcgccaaatggtaaggcaacggactctgactccgtcatttcaaggttcgaatccttgtagccctgcttctaagacctcatgaacatcgttcatgaggtcttttctttatccggcatctgcttcctgtcattgaaaaacctgtccccctgtgttactattactacgataataacagacacaggcattgaaagaagggactccatgtatcagtttgaaagtcgcgtacgttacagtgaagtggacagcgaacggcatttgacactgccggcggtgatggattatctgcaggattgctgcaccttccagtcagaagatatggacatcggcgtggaatatctggcagagcagaagcaggcgtgggtactgtcttcctgggagattaagatcagacgctacccggttatgggagagaaaatctgcgtggagacatggccgtatgcatttaagggattttatggataccgcaatttccggatcacgaacggacggggagaggaactggtgcttgcgaattctgtctgggtttacatggatatggaacggatgcgcccgatgcgtatcccggagaaagtggcggatgcctaccgaccggagatcggagaagaactgccgggcgagtggggcgcgagaaagctatcggttccggagggcggaactgagatgccgccggttccggtggcgggattttttattgacaccaaccaccacatgaataacgggaaatacattctggtggcaaaggaatctgtgccggagaattttgcaatcggcggcgtgcgggcagagtaccgacgtgcggcaatgctgggcgacgtgctgtatccggttgttgcggtggcagaggaaaagataacggtggtgctgactgacggtggagaccagatctatgcgatcgtggaatttgcggcggcagagaagaattgatggaaaatgaggatcgagatgaaattaggcgaatatcagaagttaaaagtgatcaaaaaagtagaatttggagtctatctggcggagcatgagggagatgagacgcgtgtgcttctgccgcagaagcaggtgccggcggacgcaaagctcggggatgagatcgaagtattcctgtacaaggattccaaggaccgcatcattgcgacgaccaaccagccgaaactgacgcttggcggactggcggtgcttgaggttgccgagattggaaaaatcggtgcgttcctggactggggactggaaaaagacctgtttcttccatataaagagatgacgaaaaaggtgcagccgggggatgaggttctggtgacgctctacatcgataagagccgcagactctgtgcaagcatgaaaaagctgtacgacctgatgcgcacggattctccttataaaaaaggagacacggtaaacggacggatctacgagttcggtcatgatttcggaacgtttgtggcagtggatgattgctactcggcgatgataccggcacatgaggactgcagccatcttcagatcggcgatgtgattgaggcgaaggtcaccggggtgaagccggacggcaagcttgacatcacgatgcgggaaaaggcatatctgcagatggatgcggacgccgagaaggtcatggaagtgattgaggaatttgcgggcgtgcttccgtttacggacaaggcttctccggaagtcatcatgcgtgagacggggctgagcaaaaacgcattcaagcgtgcggtcggcagactgtacaaggagcgccgcatcgagattacggagcgcgcaatccgcaaattatagtagcatcgctgtttcaggtgtgctatgatagatgaaaccgacagactataagaaagaaggaatacagcatgaaaaatgtaatcagcacggacaaggcaccggcagcgatcggaccatattcccaggcgattgaggtaaacggcatggtatacacttccggtattattccggttgtaccggcaacgggcgagatcccggagggatctgtggcgcaggcaaagcaggcgctgacgaacctgtcccatctgcttgaggcagcaggcaccagcatggcgaacgtggtaaaaacaaccgtatttattaaggaaatgaatgatttcgcagcgatcaacgaagtatatgcgacattttttgagggcgcgtacccggcgagaagctgcgttgaggtggcgcgtcttccgaaggacgttatgctcgagatcgaagcgattgctaccaaataattgctgcgacaggaacaggaatacctgagactgccagaggagatccggaacataaaaagacgcggcacactgttacatcgtgtgccgcgtcttttcttttcagagagcatctgttacatgatccctatacgtacatatcgatattgccgccgagctccgggttcaccgaatgttccatcatctgaatcatggaggcgcccatctgctgggtcaggtctaatgactgactgagaacggccgtgccgactgcataggcgagactgccggagctgacagaagaaccggagtcgtaggccgtcagtgtgccaagcgccagatcaacattggaaaaatccatacgaatcccacctttccttcttatgatggctttattatgccacagatggaggagaatggcaattatgaaaaatgcaacaaattataaaaccggaaaggcataaggcagcagcaggaagggaaaatctgggagcatatgtaacccggatttgtcggaaaatggcgcagattgtggaaaagacatgtcgaaaaagaaaatattgtgtaaaatccgcggagtattacaaaatatagcgggttgacatcatatagacgctttgttataataaccatgtaataaatgtaacaaatttgtaataaatccgttggaggcattcatgaacagaagaacactgagagctacagggattgtattgactggaatgttattggcaggagatcctgtatctatgatatatgcagcaccggttgcgggtgtgtccgttgctaccacagcagaagcagtggcagtcggaacgggaagcagcagcccgagcgcaggcgtttcgcttgcagtggcagattgtctggtcgcaagcaatgaggaagtggcgcaggaagcagcagcgcagcaggaacaggtaagcgagaatgagacaccggtggtagagtccgaatatgcagacattgccattgcgcaggtagataactacgtaaacgtgcgtaccgagccgaacacagagagcgaggtagtcggtaagctttacaataattcagcggcaacgattttacagaccacagaggatggctggtatgagatcacatccggcaatgttaccggttatgtgaagtgtgagtacgtggttgccggagatgaggaacttgcaaagtctgtaagtacccgctatgcaaaagttacgacgacaacgctttatgtgcgtacagagccgtccacagatgcagcggttttaaccatggttccgattgaggatgaccttgtggtaaccgatgagtccattccgggctgggcacttgtgacgacagaagagggagacggctatgtatccaccgattatgtcacattgacgacagagtatgtgcaggcggagtccaaagcagaagaggaagcacgtcttgcgaaggaagaggcagagcgtgaggcggcggcagcagcggcagctagcgccagaaagaagaactctgagagttcatccagttcatccagctcctcagattccagtgcatcctacagtgcaccgaccagttcaaacggtcaggcagttgcaagctatgcatgtcagtttgtcggtaatccgtatgtatatggcggaagcagccttacgaatggaacggactgttccggatttgttatgagtgtgtattcagcatttggaattggccttccgcattcatccagtgcgttgagaggctgtggttatgaagtaagcctttcatctgcacagccgggtgacattgtatgttacagcggacatgttggaatctatatcggaaatggaacgatcgtgcatgccagcacaccgtccagcggtatcacttactccaatgttacctaccgcagcccgatctgtgtaagaagaattttctaaacgagaatataaaatgggactatcacttgtgatagtctcatttttgcgtcataagaagaggaagagaagaggaagagaagaggaagctcttttgattttcagctacattctgcctgataacgaagggacatgattttctcaatattgcacctcaaaacgcaggattattgcaaaaaatgaaggaataggacaaaaggcacagtctatacaatatgcacaaattgtaaaaaatgaaaaaggaaaactgactaaatgagtgtgaattgcaaaaaagttatccacaatgcagaaacggaaaaacaggaaaaatcgagttatacacgaagttattcacattatccacagaaaagtgggaaaaaaatctggtttacatagtaaaataatcgaatgtctgttttgtgaagaaataataaagttgtccgatttcgtggaaagtttggaaaagttattgacatttcaaatataaaataattataaaaaagcagtaaaagaagtctgtaaatttgactggaatggaagaatcttgaaatacgaatacaagtttgctatactaaaaacatatctttcgcagacgaaggtatgttttttcaaataatggtaatgatataggtgcacaatgattaaaaaaatagatattatggggatcggtcttgacaactataccgtgcgggaatcgatgcggcaggtcgagaactatctgagtaatgatgttttaaatacaatcgaaaacatttccatgcagatgctgattgcgtcagggacggacccggtggtacacaacgtgatctcggagctggatctttccgtcattggggagaaggagatcttaaaggcggcggatgcggacagcatgcagcgtgtgcaggagacggagcagaatgatttttcatatgaattctatcggaggatcgagcgcaataagcggagcatttttgtgctgggacagacggaggagggcgtgcagaaggtcaaagcggaactgcaggaagcattcccgaagctgattctggcgggagaatatgcactggaaaattgtgtggggaatctggatgccgtcatcaatgagatgaatgcgacgacgccggatgtgatcgtttcgattctgccgtctccgctgcaggaacattttttcgcggagcataaggataagatgagcgcgaccatatggttcggcatgggagaactcggcgttcatggaaaaaagcatggacttggaagtttcgttaagaaccggctgcatctgggaagattgaagaacagtatgaacaagtatcaggatcaggaaaagttcggggaagcggagtgaaaaagaggaaatgcataaaaaaaatgcatttcctctttctttttttgctgttttgcattaaaatatagcttagatatttttgttccgaggtagaaaggcggctttttattgtgaaagttgctcatagggaagaaacacagtgaccggacagaagagtttcagcagaagcaggatgagaaggagcggagcttatgatttcaaatcaaatacttcagaatacaatcgatggattaaagggaatcaccagaatagatctgtgcattattgatgtggaggggaaggtgttagcagccacttttccggaggcggatcagtacattgagccggcgcaggcgttcgtggagtcaccggcagacagccaggtggtgaacggatatcagtttttcaaggtatttgatgagcaccagcttgagtatattcttctggcaagcggagacagcgatgatgtatacatggtgggaaagattgccagtttccagatccagaatcttctggtagcatataaggagcggttcgataaggataattttatcaagaacctgctgctcgacaacctgttgctggttgatatttataaccgtgccaagaagcttcacatcgacaccgaggtgcgccgcgtggtattcattgtggagacgaaccgcgacaaggacggcaatgaactggagaagatccgcggaatcttcggcacgaagacgaaggattttgtcacagcagtcgacgagaagaatattatcgttgtgaaggaagtcggcgagaacgaaggttacgaggagctgaacaagatcgcggagagcatggtcaacctgttccgtgcggatgcggacagcgacgttcatgtggcatacggaacgattgtcggcgagatcaaagaggtatccagatcctacaaggaggcgcggatggcacttgatgtcggcaagatcttcttcgaggagaaggatgtaatcgcttactccacactcggtatcggtcgtctgatctaccagctgccgattccgctgtgcaagatgttcatcaaggagatttttgacaataagtccccggatgatttcgatgaggagacgctgacgacgatcaacaagttctttgagaacagcctgaacgtatcagagacttccagacagctttacatccaccgcaacacgttagtgtaccgtctggataagctgcagaagagcaccggactggatctgcgtgtgttcgaggatgccatcacgttcaagatcgcactgatggtcgtaaaatatatgaagtatatggagtctctggactactaattcttaaaatttgcatacgggtattgcaacaactgcatacattgagtagactatatgggatgggacagagcatttgattctccggaaccatcggagatgcatacagaaatgaggtaatttcatgataaagttagagcatgtcagcaagtcgtactctgcgggaattcctgcacttaatgacgtgagtcttaacattgaggagggagagtttgtatttgttgtcggtgacagcggttcgggcaagtcgacgttgatcaagctcctgttgaaggaactggaaccgacggagggaaccattacaatcaatggcagaaaattaaataaaatcagacgaagacaaatcccgaaattccgccgcaacattggggtggtttttcaggatttccgattgttaaaggatagaaatatttatgacaatgtagcctttgcacagaaggtcattggcgaatccaaccgctccatcaagaaaaatgttccaaaactgttgtcgatggtgggactggcggcaaaataccgctcatacccgagacagctttccggaggggagcagcagcgtgtggcgattgcgcgcgcgctgattaacaagccgaagattctgctggcggacgagcctaccggtaatctcgatgcgaataatgcatgggagattatgaagctgatggaggagatcaacgagcaggggacaacggtggttgtagtaacacacaatctggagattgtgaaagcgatgaataagcgtgtcatcacgatgcaaaaaggcgttgtgatagacgataccgcttcggatcattacggtaaggatacctctgtcgaacaggacgatgatctgtttgatgatttcttggatgatggaggtgacgacgactatgcggattagtacgtttttttatacaattaagcagggaatcgtgaatatctggaagaacaagctgttctcactggcgtcgattgccacgatgacggcatgcattttcctgttcggtctgttctatatgattgtcgtgaacttccagtccatggtaaaggatgcggagtccggcgtggcagtgacagtgctgtttgatgagggaatctcggatcagcggatcgaggagatcggggagctgatttcggagagaccggaagtatcacattatgactttatctcagcagatgaagcatgggaaagcttcaaggaagtttactttgagggaaatgaagcggcggctgcaagttttgctggcgataacccgctggcgaattccgcgagctatgccatctacatgaatgatatatcgatgcaggactcgctggttacctacctgaagtccgtcgatggagtgcgtgaagtaaaacagtcccagcaggtggccaacacgctgaccgactttaacagtctgatcgggtacatctcggcgggcgtcatcctgattctgctcggtgttgccgtctttttgatcagcaatacgatcacggtcggtatctccgtccgcaaggaagagattgcgatcatgaagctgatcggagcgacggattattttgtgcgcgcaccgtttgtggtcgaaggtattgtaatcggactgatcggagcggcaattccgcttggcattctgtacgcattgtacgggaagattgtaatgtacatcagcgataagttcagctttatcagcaatatgatgaagttccttagcgtgaacgagattttccataatctgatcccggtggcattgattctgggtgtgggaatcggttttatcggaagccgcatcacaattcgcaagcatttgagggtataatgataagatgccatacaggaaacacatgaagtttacaatgatacgaagaataacagcgctcggactgattctggtgctggcggcgggcataccgatccaggcatcgtcggcttccacagagaaagtgacggaggacgccgcttccacaaaatccctgcaggaggcgcaggacgagaaagcccagctggaaaaagcgctcaaagaggcgcagggcacgattgaggatctcaaggattccaagggtggtatcgagagcaaggtaacagaattgaaccagcagctgatagatatatccgcgcggatcacggatcttgagaatcagctgacggcaaagagcgaggatatccaggagacgaaggacgaacttgccggagccaaagagagggaagcacagcagtacgcggatatgaaagtgcggatccagttcatgtatgagaacgggcagacctcttatctggaggcgcttttatcttccagaaacatttctgaatttttaaattccgcagattatatcgcacagatacagagctatgacagacaaaagcttaccgagtaccaggacaccgtggagtcgattgtgaatctggaagcccagctggagcaggagtataccgatctggaggcactcaagtcgacggtcgagagcaataaagcgactgttgccgctatgatgcggcagaaggagtcggagcttgcggacatctcgggagatattgaagatgcgcagagcgacgccgactattatgcggcggagattcaggcgcaggaagaactgattgcggcgatcaagagagcggaagcggagaaagcggcagccggggtggaggaacatccgtataccggaggagcgttccggtggccgtgcccgagcagcacgcgggtgaccagtgattatggaacgagagtatccccgatgtcgggagcgtcgtcgaaccataagggaattgatatcggagcatcggcgggagcggacattatcgcggcggcggatggaacggtaacagcggcatcctacagcagtgcggcgggcaattatgtgatgatcgaccacggcggaggactctacaccgtctacatgcacgcatcatccctgctggtatcgcccggacagaccgtgtcggcgggagatgtgatcgcaaaagtcggaagtaccggcatttcaaccggaagccatctgcatttcggcgtctctttaaatggaagttacgtcagcccgtggagttacctgggcggctgatggagaaagtacacgtaggcattgaccgaaattccctgtccttggacagggaatttttacatatcttattacggatagcatacagaaatgagggaaactatggacgaacaaagagaaaatatgcaaaacggcatgatagaaaatgagacaaccggagagcagaagccggacggcggaaaagagcgcagacgccgtggaatgggaaccggcatccttcttggaatctgcggaacactggtcgtcggagcgattggtatttatctgatctgccgctttaccggaagtcagatactcatcaccaatgcagcggcagatacggacggaacgaccctgctggatgcaaagacaacggcaaagatcaacgaactgtcagcttacattgatctgtattattatgaagataccgatgttcaggatttgaaggacggtctgtatgcgggactgctggagggactggatgacagatattcggtttactacacggcggatgagtacgcgcagacgcaggtcagcatgacgggtcagtattacggaatcggggcagggcttgcgcaggatagagataccatgcaggtcacaatcacaaaggtttacgagggaacaccgtctgagagtgcgggacttcgcaacgaagacgtaattctgtcggtggacggaaccgaggcggatacgatggatgtcacggatcttgtgaagctgatccgcggggaagccgggacgacggtacatcttgagatctatcgcccgtctaccggagagaatctctcgtttgacgtggagcgtgccgatgtgacgctgccgagcgtatcttcacagatgttaaacgatacgattggttatatccggattgaatcttttgagaaggatacggcaaaccagtttgagaaggcgcttgcggaactggaaggggaagggcttacatcgctggtggtcgaccttcgctataacggcggcggacttgtcgattccgtggtacagattcttgacgatattctgccggaaggtctgatcgtctacacggaggataagaacggacaccgcgaggagtaccgctccagcggagacacgcattttgactatccgatggcggtgttaatcaatcaggacagcgccagcgcttccgagatttttgcaggagccatcaaggattacaactacggaacgctgatcggaacgacgacattcggcaagggcattgtgcagagcctgttcccgttggaagacggagacgccatcaagctgacaaccgcgaaatattttacgccgaacggcaactatatccacggtgtcggaatcgatccggacattgaactggaatatgagtatctcgacccggacggagagcagtatgagatccagtacgataatcaggtgcagaaggcaatcgaagtgctgagtgagaagacacagaacgactgatcggagtgaggagacgggatgaagcttcggatataccgtgtgataacaggaggacttctgcttctttgtatggtgatgattttccggttttcggcacagccggcatcagaatcggagcaggtcagcggtggggttgcctaccgcattgtggaaacatggagtcatctgacaggaacagaatatacacagagcgagatggaggcatatgccgaccggattgattatccggtgcgcaagctggcgcatatgacagaatatggaatactctgtctgctggcgtgcgcttttgtgcacggatattccggtaactggaaagtgtgcggaatatcggcggttgcggttgcggcgctttacgcggcgaccgatgagatccaccagctgtttgtcccggggcgcgccggacggttctcggatgtgtgtattgatacgctgggagcggtgatctggctgctgctttttacagcgctgcgaaaattgtgggaaaagattgcgaaaagacggggcttccagtacaataagaatagaaaaaaatgaaagaggtgataactgtggtagaacttgatcaatttaaagtgaccctgaacacatacagggaaccgctgcaggaagtgagggattcactttgacctggtaaataaagaacagcggatccaggagttagagagggagatggaagctgcggatttctggaatgatccggaggtctcccagaaaaaaatgaaagagttaaagagcatgaaggacgatgttgccacatatgcttctttgacgacacagtttgaagatattgagacactgatcgagatgggatatgaggagaatgacgccacgctgatcccggagatcgaagaaatgctgacggagtttacgacgacgtacgatgccatccgcgcaaagacgcttctgtccggcgagtacgatggggacaatgccattgtgtcgcttcatgcgggcgcgggcggtacggagtcctgtgactgggcagcaatgctttaccgcatgtatacacgttgggcagacgataagggatacagtgtggatgtgctggactccctggacggagaggaagcaggcatcaagtccgtgacattccaggtaaatggagaaaatgcctacggctatctgaaatcagaaaaaggcgtgcaccgtctggtgcgtatctcgccgttcaatgcggcgggaaagagacagacctcttttgtgtcctgcgatgtcatgccggatatcgaggaagatctggatgtggagatcaatgacgacgatcttcggatcgatacgtaccgctccagcggtgcgggcggacagcatatcaataagacgtcttccgcaatccgtatcacgcatcttccgaccggtattgtggtacagtgccagaatgagcgttcccagttccagaacaaggacaaggcaatgcagatgttaaaggcaaagctgtacctgttaaagcagcaggagaatgctgagaaggcggcgggaatccgcggcgaggtgacagagatcggatggggcaaccagatccgctcctatgtcatgcagccgtatacgatggtgaaggatcaccgcaccggtgtggagaccggaaatgtggacagcgtgctggacggcaagctggatatctttatgaatggatatctgaagtggctctccctcggctgcccgaagggacttggaggagacgatgagcagtgatgtgatccgcaccttaaagtgggtgtttggaaaaggcggtctgattgaggaatataagcgccaggaacagatgttggaggagacaccgaagtcggtggcttccatgacgcggatttttgcaccccagatttcccgtgatttcccgggaatgaatctggagcagtttgaggcgctcgcacagcagcagcttgtggcggcgcttcaggcagtgtcggcggggaatctggaaagtgtcgcgcgcgcttccgatgaactgaaggagcaggtcagccgtcagattgagggaaaccgtgcggcaggagtgcgtgagacctatgagcagatccgcattcatcagacagagatttccaattacgaaaaaaagaacggcacttgtgtgatcacatttcagagtgcggtagagcattaccactacaaggaaaaagcgggcaaaattatctggggatacaaagaccggaagctgcagacaaagtacaatatggagctgctctatgtacaggatgcggcgcagcagacggagggaaatgccttcgggctgaactgcccgaactgcggggctccgatgaagggacttggacagcagatctgtgaatactgcggcagcccggttgtaccggtagacaccagagtctggcggatggtacgtttttctgaggtggattatcaccatgtgtgaatacatttttggcgcatgattctgcgcatatgaagttttgcaggaacttccaataagaactcgtcagagtacaacgaaagaatagaacaggaggaattgttatgggaattatcaaggcaatcggtagtgcgatcagcggaggactggcggatcagtggctcgaggtattcgaggcggatgatatgggggaacagaccgtctttacgagtggtgtgctgatccggagaggacagaataccaaggggacgaacaatacggtgagcaatggctccatgattcacgtgtatgacaaccagtttatgatgcttgtggatggaggaaaagtagtcgattacacggcagaaccgggatattataaggtagataattcttccctgccgtccatgctaaacggtgaactgggagaatctgtaaaagagacgttcaaccgtatcaagtacggcggacagacgccgacggcacagaaagtatatttcctgaatctgcaggagatcaaagggatcaagtttggaacgagaaacccgatcaattactttgataatttttataacgcagagcttttcctgcgcgcacatggtaattactccatcaagatcacgaatccgctccagttctatgcggaagtgatcccgcggaacaaagatcgtgtcaattacgatgagatcggcgagcagtacctgtcggagtttttagaggcgctgcagtcggcaatcaaccagatgtcggcggacggaacacgtatttcctatgtgacttccaaggcgatggagctgggcaagtacatgcaggacattctggatgccgattggaaccagatgcgcggtatggagatccagaaggttggtatcgctggtatctcttatgatgaagagtcccagaagctcatcaacatgcgcaatgagggcgcaatgctcggaagcgacttcaacgttatgcgcggtatggcggtcaagaatattacggagggtgtgcgtgacgccggaagcaatgcgaacggtgccatggcaggctttatgggagtcggcatgggaatgaatgccatgaatcagacgctgtccggacttggtgcaatgcagacaccggcagacatgcaggcgaatgcaggaatgcagcagggcggcgcggcacaggcaggacagatgcaggcggcaggcgcagtgccggcaggacagacaccgggggcaggtgcccagggcggctggacatgtgagtgcggtcacgtgaataccggaaagttctgcagcgagtgcggaaaaccgatgccggtatccgatgaatggacgtgcgagtgtggccatgtgaataccgggaagttctgcagtgagtgcggaaagccaaagccggtatccggtgagtggacgtgtgagtgcggacagacgaacaccggaaagttctgcagcaactgtgggaaagcgaggaactagcgatggcaattatcagttttaagtgtccaaactgtggcggagaactgatttttgacccggcgacacagaagtataagtgtgaatactgcaattcgctgttcacgcaggaagaactggatgcgatgaagccgatgcagggcgaggagccggacgctgtggcacaggagcaggcaggcggagagcgggcagatgagacggcagcggtggagcagacagccggagagcgggaaagcgaaccggagggcgaggcggtgtattacagctgtccgtcctgcggcgcagagattgtgacggacgcgacgaccgcggcgaccttctgctattactgccataatccggttgtgctcggaaagcggctggaaggtacctatctgccgaacaagatcattccgttcgagatcagcagagaggaagccgagaagaagttcctggattttgtcggcaagaagaaatatgtgccgaaagcattttttgacaaaaagcagattgagagcatgacaggcgtctatttcccgtactgggtctacgatgtggagctggagggaaagatgcagggagatgcgagaagtgtgcgcatgtggacgacaggcaatacccagtacacggagacaaagtattatgcggtggagcgcgagggcgatgtgacgcttcgcaatctgacggagaatgcgttaaagaaggcaaatgtaaagcttaccagcggtgtgatgccatacgcctatgataaaatgaaggatttccacatgggatacctttccggattccttgcagagcgcagagatattgaacagaatattgtgcagggcaagatgcagcacaccatgcgtgagagcgcggaaaagctgatgcgcgataccatcagcggctacaacagcgtatcggtcaagaataccttttttgcaccgaagaaggagacctggtcgtatgtgctgcttccggtgtggacgattacatataagggcagagacggaaaagtatactactattccatgaacggacagaatggaaatatctgcggcgatctgccggttgaccgcccgaggcttgcgctcaccagtatactgacggcgcttggcattctggtattcggactgttaggagggtatttcttatggtagagaagatgaaaaaatcactcctgtggtgtctggtatgcctggtgtgtcttgttccgtgcagcggtgcggcactggcggcggaggcggacgcggcgcaggatgcagcggatggttatgtgtacgatgcggcaggacttctgacggcagatgagatttcagacctgaacgatgagattgcctcctttatggaagaatccggctggaatgtctatgcggtcacgacagatgatgcacaggggaaaagtgccaccgcctacgcggatgatttctttgatgaacattccacggaacaggaagacggtgtggcactgctgattgatatggataaccgcgagatcacgatttccacctgcggtatcgcgatccggtatctgacagattcgagaatcgacaatattctcgacgcagcatattctaagatcagcaatggcgattatgacggctgtatgcattccatgctgaccggtgtggagacttactatgaaaaagggatttcagagggacagtacaattatgactccgagacggggaagatttccagataccatgttctgacgcttggggagatcttcggcgtgctggcggtcgccatcggagccggctgcatcatttattttacgatcagcaacagttacaaggtgcgcggaaagggatattattacgcttaccagcagaattccaaggtcaatctgcgcgtcaaggaagatcgtctggtgaatcagacgacgacgcatcacaggatctcaacgagcagcggcagcagtggaggacattcctcctcgcacagcggaagaagcacgacgcacacgagcagcagcggcagatcacacggcggaggaagccgcaagttttaaagggagaatagcttccataactaaattttattacggatattcacaaaagaggttgcctgtgcagcctctttgtgttattatcttcctcatgaggacaagtgtcagcgtgctgcacacattgcactcgtgagggataccagaagaaagaggattataaggaacatgaaagacaaaggccagtattatgtattaaaggaaaaggcggtgccggatgtactgctccgggttgtggaggcaaagcgtctgctggattcggggaagacggactccgtgcaggatgcaacagagcaggtcgggatcagccggagttctttttataaatacaaggatgatatttttccgtttcatgagacagcaaaggggaagacgatcaccatggttatccagctggacgatgagccgggactgctgtcgattgtgctcaagacggtggcagagtttcacgccaatatcctgacgatccaccagagtattccgatcaacgggatcgcatcgctgacactctcggtcgatgttctgccggagacgggagatgtgacacagatggtggcgcgcatcgaggagcagacagggatacattatgtgaagatcctcggaagagagtaggaacagaataggatagaagacgaaagtggaggcagtatgatcaaagtagcggtaatgggatatggaaccatcggttccggcgtagtggaagtattagacatcaataagaacagcattgcaaagcgtgccggagaagagatcggtgtaaaatatattctggacttaagagattttccgggggatccgattcaggaaaaggtggtacatgattataaggtgatcgcaaatgacccggaagtgcagattgttgttgagacgatgggcggtgtggaaccggcgtacaccttcgtaaaggcaatgcttaccgcaggaaagcatgtgacgacctccaacaaggcgctcgttgcggcaaagggtgcggaactgattgcactcgccaaggagaaaaatgtcaatttcatgttcgaggcgagcgtcggcggcggcatcccgattatccggccgctcaattcctgtctgacggcagatgagatcgaggagatcaccggaattgtgaacggaaccacgaactacatgctgacgaaaatgaccgaggagggatcggagttcgacgatgtgttaaaggatgcgcaggcgaagggttatgcggagaaagacccgaccgctgacattgaaggatacgatgcctgccgcaagatcgccatcttaacatccctggtatgcggacagcaggtggattttgaggatattcacacagagggtattacgaagatcacagcgacggacatccggtacgcgaaggcaatgggcagagccatcaagcttctggcatccagccacaaggtgggagacggatatgtggcgatggtagcgccgttccttttaccggcgacacaccctctctacaatgtcaacgatgtgttcaatgccatctttgtacacggtaatgtgctcggcgatgccatgttttacggaagcggcgccggcaagctcccaacggcgagcgcagttgtggcggatatcgtggatatggcgaagcatctggacaccaatatcgcggtggagtggagctccaagaagctggagctggtggattaccgcaacgtcgagaaccgctactttgtgcgcacgaccgcagacgcgaagcgcatagaagaagtcttcggtgaggtaagttatgtaacggcggaaggcgtatccggagagaccggatttgtgacggcgcgcatgagcgaagctgattatgagaaaaaggcggcggagcttggcagtgtacttcagatgatccgcgtggcacagtaaaacaggggccccgatgtgatgcagcaggctgataacagcagaaagtgaagtgtgagatgaagtatttggtaattcttggagatggcatggcagaccgcccgatcgagagtctgggcggcaggactccgctagagtatgcaaagacaccgaagatggatgaactggcagcgaaaggtgagatcggcatggtacatacgatcccggacggcatgaagccgggcagcgacactgccaatctctccgtgctgggatacaacccgagagaattttattcggggcgttctccgcttgaggcactctctatcggtgttccaatgaaagacacggatgtggctctgcgctgcaacatcgtcacgctttccgaggaggaggacaattacgaggaccgcacgatcatcgaccacagttcgggtgagatcagcaccgaggaatgtgcagtgctcttggaggcggtgaagaaggagctggagacagacatttttcacttttatgtgggcacaagctaccgccactgtctgatctgggagaacggcgaggtggtggatctggtgcagccgcacgatgtgctgggacagaagatcggagacaagcttccggagaacgaagcgcttcgcaccatgatgaagaaaagttatgacattctggtgaatcatccgatcaacatcgagcgtaagaaaaagggattaaatcctgcgaactcctgctggttctggggcgcaggcacaaagccggcactctatccgtttacggagcgcacccacaaaaagggcgcgatgatttccgcagtcgatcttctgaagggaattgcggtcggcacttccatgaaagtcatcacagtggacggagcgaacggcggtctggatacgaattatgagggaaaggcaaaagcagcgctggacgttctgaccagggatggatatgactttgtctacgtgcatctgaaaggaccggatgagatgggacaccagggcagcgttgagaagaaggtaaaggcgatcgagcgcctggatgagcgcattatccggccgatcgccgagggacttgcggcggcaggagaggatttccgcatggtggtgcttccggatcatccgacaccgattttcctgcgcacacacacggcggacaatgtgccgtatctgctctatgacagcacggcagagcgcagtgagagctggcattacaatgagcgcgaggctgcacagacaacgaactttataccggagggacataagctgatcgaatatctgctgcagatgtaagaaaaatccatcttcctattcagggtaggaaggtggatttttttgtgtcatagcaaacttcgttcctatgacacaaaaacgtgccgggcggctatgatccggattcccgcagatcatgctgctcgccacaggaatcctgtcaaaccgggatgcttccttatatgaagcggcgcgcattgacggggcgggacgcatgcagcagttccggaaactgacgctgccgttcgtacttttttcgacaatgccggtgctgatcggacagtttatcggaaatttcaataatttcgggatcttttacttcctgcggggcgggctgtatatggacggctatttccttgcgagcgatacggatcttctgattaactggctctataacctgtccatcgacaacaattattactgcatcggcgcggcgatcagtctgattattttctttatcacatcggcaatatcacttgcggtttacataaaatcgccgtcttacagggaggaggatacgtttcaatgagcagaaaaacagagaaaaagcggagaatgtccgcaggaagagtcctcgataccggaatgacctatctcatattgcttgcagtggcgtttatattcttctttccgtgcctgtggctgatccttgcatcgttttccaaatcgggaacgatctattcgtttgacggttttttcccggccggatacagtctggcgagctttaaacggctgtttacggatacggcactgtacaactatccgcgctggtttgccaatacactttttgtggcggcaggcagctgcaccctcggcacgtttctggtgatcctgactgcctataccatgtcgcgttttacgttcgcggcgcgcaaaccgatgatgaagattacgatggtgcttggaatgtttccttcctttatgggaatgattgcggtgtaccttctgatgacgcagtttaatctgatcaatcatctctggggactgatcttaatttacagtgcgggagcgccgatgggctatctgacgcagaaaggctttttcgatacgattcccaaggcgatcgacgaggcggcgagaattgacggagccacgaattttcaggtttttatgaaaatcaatctgccgctctcccggccgatcatcgtctatactgcgctctcttcttttacctggccgtggagcgactttatcctgccgaagcttttgctgaaggaaaagaacctgtatacggtggcggtcggtctgatgagcctcgatgagacggaatttgcaagatttgcgacgggaagcgtgttcatcgcggtgccgattgtcctgctttattttttcctggtcaaggacatggtgaacggcatggcggcgggcgcggtaaaagggtgatccggaatacaaagtggcagccgccgcggatttgaataagatagaatgagaaagccgtttcgaggaaaaatgtgcagacagttttattgatcgtagcgctctctatggacgtctttctggcatccgtggcgtgcggggcggaacagatccggatcgaaaagaagacagcactctgcatcggcgcggtatgcagcggagtgctgtttttttcattagtgtgcggaaaactgatcgatggagtggtcagggaaaaatatgcggcgtatctgtgttttgcgggattgtttctggtcggcgcttataagctgacggagtacggaatccgggcgtatatcaggagacaccatttcctgtgcaagcaggtaaaaatgaaattttcacagctgaattttatcatcagcatttacaataatccggcggcggcagatagggattgctctgcgaccatgtcagtgacggaaggaatatgtttcgcgctcgccatgtcggtggacggatttttcggcggtctgggggcggcgtttctggatatttcgattgccggcacggtatgcctgaatctggtattcagtgcacttgcggtgcttggcggaagcgctgtcgggaaatatgcggcggaccggtgcaaaagagattactcctggatcggcggcgccctgtttgtggtgctggcattcagcaagattttgtagatttatagtaaatgtgtcaaaaaaagcttgcgttttcattgcggtatggtataatatgcctatacatgaagcagtggaaacgcacagctcttgtaaaatataattagatattgtgggatctgagagtggagatgattttaattcctgtacacatgaggggtgcttacaggttttataacgatgtctcctttttttatgcgctgcgcatggggagcacggggcaggaacggatttcacaatagagggaagcataaataagcaataaggggcaaacaaggaggaacatggtatggcaaagtatgtgatggcactggatgcaggaacgacgagcaaccgttgtattttatttaacgagcagggagagatctgttcgatggcacagaaagagtttcggcagttttttccgaatccgggctgggtggagcacgatgccaatgagatctggtctacaatgcttggcgtggcggttgaggcgatgaacatgatccgcgcgacggcggcggatattgcggcgatcggtatcaccaatcagcgtgagacggcgattgtctggaacaaggagacgggcgaaccggtctataatgcgatcgtgtggcagtgccgcagaacatcggacattgcggatgcattgaaggcgaagggactcgaggagacataccgtcagaagacaggactgatcattgacgcgtatttttctgcgacgaagatcaagtggattctcgataatgttgagggggcgagagagcttgcagagcagggcaagctgctgttcggaacggtggagacctggctgatctggaagttcaccaagggtgcggtgcatgtgaccgattattccaacgcatcccgtacgatgctgtttaacatcaacgatctgtgctgggacaaggagatcctggaggagctggagattccggagtgcatgctgccgacaccgcgtccgtccagcgaagtctacggctacacagatccttcgtttttaggagatgcgatcccgattgcgggagctgcaggcgaccagcaggcggcgcttttcggacagacctgtttccacgagggcgaggcgaagaatacctacggtaccggatgtttcctcttaatgaataccggagaaaagccggtattttccaagaacggcctggtcactacgattgcgtggggactcgacggaaaggtgaattacgcattggaaggttccatctttgtggcgggcgctgcgattcagtggctgcgcgacaacatgaagatgattgattcttccatggattcggaatatatggcgaagaaggttcacggaacacacggctgctatgtggttccggcgtttacgggactcggtgcgccgcactgggatcagtatgcgagaggcacgatcgtgggattgacgagaggaacgaacaagaaccacattatccgcgcgacgctcgaatcgattgcactgcaggtgtgcgacgtcatcgatgcgatgcgtgcagatgccggcattgatttaaagtccctgaaagtcgacggcggtgcaagtgcgaataatttcctgatgcagtttcaggcggatatgatcaatgcgccggtgaagcgtccgcagtgcgtcgagacgactgcaatgggagccgcttatctggcaggtctggcagtcggatactggaaggataaggaggatgtggtcaacaaccagaagatcgaccgcatctttaccccggagatggaggaggaagagcgcaaggcaaaacgcaagggctggaataaggcagtcaagtatgcgtacggatgggcaaaagacgagccggaggaagaagaggaatagaaggcgcgccagaggcagagcttatcacataaacaggataaataggatgaaacagaaccgcgcagagccgcaaagaggcccgcgcggttttttctctatagagataccgtgttttcggtgcagctgccggtatcccggatattgttgaattcccagattcatggtagaatgtgttaaaatgtaatgaaagagttacaatggatcgggcattgtaaaagaggagcagatacagatggagattcgattattatacggaaatgagatacagtgggcggtgcagacggcgcatgcggtctatgagcagtgtgtgcgtccgtatacaagaaatgcggcggaggtgcagcagtattatgactatatgaatctgcccaatctttcacaggagatgctggcgggaaggctgtttttatggggcgcatttgaaaacgggcagatgtgcggcgtcagtgccatgcagaatgtcggacatatcacggcgctgtatgtaagaccgcagtattttagaagacggatcggcagcaatctggtggatcggatgtgcaactttgcggcatcccgattgcagtgcgggcgagtgacggtgcaggctgcgccggcagcagcgaattatttttatcacacgggatttacgctgattcagggggcaccggcgggaatgtacgtgccgttggagagaagaatctggtcggtcccgatgacccagggatacatgggaaatatcgggggaagcggcagtacatccgcgcagggcggtggtgtgccggtggcgcagccgcggcgcacaaagccggagatcatttatccgaaaaagaaggtaagcgcccgggtggtgctttggcttactgcggtaaccatcgccttcgcagtggcggtggtgacgggaattaccgtatatcatatcacacaggagggaatcacgggcggatatgagacgcctgatccggtgtgggacgagaatacggaagcagacgatggacaggaactgtagaaaaagagcaggcatttaaccggacaaagaagcgcaggacgcgaagcggaaggagacggaaggtggatacgacgacaaaaggaacccgcacaaaataccgtctggcggaggcgatgaaggaatgcatgaagacgacgccggtcgataacattaccgtgacacagctgacggaattgtgcggtgttacaaggcagacattttatcgcaattttattgacaagtacgatctgatcaactggtattttgatattttgcttcacaagtcttttgagcatatggggagcgggaaaaatatttatgagagtctcgtgaaaaaatttatctacattcgggaagagcgggtctttttttccgccggttttaagtctgcggaccagaataatctcaaagatcatgatttcaggctgattctggcgttttacgaggatctgatccgacagaaaacagggaaaatgcccgatgaggagattggatttttactcgagatgtactgccagagttccgtgtatatgacagtgaaatgggtgacggaggggacgaagatgccgccggagcgcttagcagagcttatggtgaaggcgatgcccgagaaaataagcgagttgtttgaacaattagaaatattgtattgataatagaggattttgaaatagaaattgtgagaaatagttacacttcccggattctgtcacttcccttttgtacattgtgttgttaaaatacgatcaaagatcattatgtatgggaaaggggaacaaaaaatggcaaacagaattatgttgaatcagacatcctatcatggggcgggagcgattgcggagatcgtgaatgaggcgaaagcgcacgactacaaaaaagcatttgtctgctcagacccggatctgattaagtttcaggtatccacaaaggtaacggatctgctggatcaggcagggctttcctacgagatttattccaacatcaaggcaaatcctacgattgagaacgtgcagaccggtgtggctgcgttcaaaaaatccggagcggactatattattgcaatcggcggcggatcttctatggatacggcaaaagcgatcggcattatcatcgcaaatccggaatttgaggacgtcagaagcctggagggcgttgcgccgaccaggaagccgtgtgtgccgatcattgctgtgccgacgaccgcaggtaccgctgcagaggttacgatcaactatgttatcacggatgttgagagaaagagaaagtttgtatgcgtagatccgcatgatatgccgatcattgctgtggtagatccggaaatgatgtcctccatgccgaagggactgacggcatcgaccggaatggatgcgctgacacatgccatcgagggttacacgacgaaggcggcatgggagatgacagatatgttccatttaaaggccatcgagattatttcaagatctctgcgcggcgcggtggcaaacacgccggaagggcgcgagggtatggcactcggacagtatatcgcaggtatgggattttccaatgtcggtcttggaattgcccactccatggcacatacattaggtgcggtttatgatacgccgcacggtgtggcatgtgcgatgatgctcccgattgtgatggagtacaatgcagactgcacaggcgagaagtaccgtgaaattgcacgggcgatgggcgtagaaggtgtggatgccatgtcgcaggaagagtaccggaaagccgctgttgcagcagtcagaaagctttccgaggatgtgggaattccgtcaaaactggaagctatcaaagagtcagatcttgatttccttgcagagtccgcacatgcggatgcctgcgcaccgggcaacccgaaggatgcatcggtggaggatttaaaagagctgttccgcaagattatgtaatccatcttacatgaacgcaattaagaagtcaggttaggacagatcccctctttgccggattgccggcggagaggggattttttgtttcataggaaataccgtgatatattaatatgtgaaagcagaaccttcctatgaaataaaaaacgctccgcgaggatgcgcagctcgcggtaaagaaaatatcgctttgcgaaccgctcgcgcgcggagaatctcgcaagcgagattctttttacataccgtttgagtgcgccggtgcgtgtcagaaacaggtgagaaaagtcgtggcgggaagctgccagatatgatagtataaaagagaaagaagaaaatgaggagtggcggtaaaaatgaaaatcagacagttgtatgcgtatgaactccgaccggcggcagcgctggtgatggagacatacagcaggatggagcagccgtatgtggcgaatccgaaagagatagaggatttcaaacgctatgcagatgaagaccatctatgggtggaatcatgtaaaaataagctctttttatttggagcgtttgatgacaatgaacagatgtgcgccgtcggtgcgatcgatgcggcgggtgcggtcacgcttctctacgcagggctgaatttccagcatcggggactggaagcggaagtgctgcgcgagatggaggagtttgcgactgtcgggcgcagtattacaagagaagagataaagattccaggaaagtggatgcagtatacagcgacagcgggtgcgccggagcagtcgtctgtgacagagcagcagcctacgccggagccgcaggcgtttgcggcagggcagcagcctacgccggagccgcaggcgtttgtgacaggacagcagaccgcgccggggcagcagccgtttgcggcggggcagcagcctacgccggagcagtcgtctgtgacaggacagcagcctacgccggagccgcaggcgtaccggaatcagaacacaggctacggacaggactatggtcagcagcaatatcagaacacagggtatggacagggctacggccagcagcagaatcagaatatgggctacggagagagttacggtcagcagtcctatcagaacacaggatatggacaggggtacggagagagttacggtcagcagacagcacctcaaaaaaagagccgtgctctgctgtggattgtgctggcggtcatagctggtgccgtgctgcttgtgaccgtgccggcgttcattctttttcacgcggtcaaccgtaccgtgcaggatacgttgacgtggaatgagccgtctgcagaggcggacagagacggggaagatggcagctatacggaggacgatacggcggtagaagacaccggggaggaacgtgaggtattagaactgccggattctctgggaaaggacttttttgtcacacaggatgacatttatgtggcagatcagctttcctatacggttaccgcacagcatatcgaggtcccgaatcagcggaaagacggatttgaggagtacgatgtttcgtatccggttattacctatgcggatggaagagatgcgaccggagtaaatgagattctgcggaatgccgcctgtgcgcagtttgataccatgtatccggagccgcaggaagaatatttgtatctggatgaagactacccgtatctggcatgctatgtggactatgagatcacgtatatgagcgatgagattctgtgcgtggcatttcaggatcactattttaatggaagcatgtggggagagttttgtgacctgcgcacaagagtcatcaatcttgccacggcagagcgatatgaggttgaggatgtgctgcgttcggatgatacgtttgcggaggcttattatgaaaaaatctgcgagaagtcggattctttcaacgatgcacccgcatttaccgcccggatggcgggacagacgatggacggggagattctggacgggagatattacagcaactatgtcctctgcaaaaatgatatttatgtgaatcttacctatcattattacgatgaaggactgattatgcacggctgggattccacgcagtggacgatggaggaactggaaccgtaccggacggatagcgatctgtgggagaaatatttgaagtgattttacgaaagtggaaacaaaattgtttccacttttgctatttttctgtgccctgctggttctcagaagagaatattgaaattttatagtaaagaaatattgtaattttttttcagatcatttttcagaccggatgcattgtagatgtcctccataaggagggcattgtaataggcatagtgtgcaaattcctttgcggaatttgtgagaccaagtgatcctaatgcctgacagtagtgtgaaaaaatgttccctgtaaaatacattgaacttatagcatcggaaaaaagcgggactaacgcaacgatttccgaaagacgattttctgtataaagaaatcttataagcattcccaaggttacggggaaggaacgctttttctcgagaacatccaacggaacatggctggtatattccagaagcttataaaaacagtaaatgccatgtgtaggatttatagttgcataagtgcggcagatattgtttaaaatggt

SEQ ID NO: 11642 - DNA, 1058 bp, Unknown
  gut microbiota DNA sequence
aagcaccgctgccgaagaagccgctgccgagagcttctggaaccgcgagaacgaagcaaaccacacacgccgcaaggacatcagcgggcttccctatattaccatacctcttgccgattttccaatgggtatctatgacaatcccgaattaaaaaaatatgaggagactctccaatcgcttgccggacagaaaatcttaaacctcggcggcaagaccaacaccgatctcaagctggagtacggcgttgccaatctggaaacgctctgcgcctgtgacgagaactacaccaccctctgccgcaccatctatgagtacgccgaatgtttgaaaaagctcggtcatgacgcggaggcagtccgggttctcgagtacggcatcagctgcgggtccgatcacagtgggaactaccggatgctcgcagactattatctaaacgccagggattccgacgcacttgaccgtcttctcatcgccgcgagagcactggaatcccccagacagaacgccatcgtcgccatgcttgaggaaaaagtaaatgcttaatcccggggcatccgcccgtgcacggcgatccagcggtcaagcagtctcgacgcctcactccgcgtcatctgctccgggatctccgtctccgggatgccgtaatgcgcagcatatttcttgaggccatccatctgacgccccgttgcgggcgtctgtttttttgtgcggtaacagagcgcatacggcagaaacgcctccggctgtgccgtaccgtactcctgttttaatctctccagcacgattccggtcgccatcgcatcatcgagcgcacggtgcgcccgctcacgcccgattccgaaataggtacacagactttccaggtcctttttctgctccgccggaaggaagcgccttgccagctttaaggtatccacagcatttcgctcaaacgcctgaccgtggttgaccgaccactgtttcagaaagctgtaatcaaaaatcacattctggccgaccagcacatcgtcccccaggaatgtaaaaaattcccgcatcgcctcttccggctccctgc

SEQ ID NO: 11643 - DNA, 145 bp, Unknown
  gut microbiota DNA sequence
ccgacacaccggagacaatgggcggactttctggtgtccctaatggcacctcttcacagacaatataaaaccacgcgaaccgaactcgccggcatctgctattgaaaatagggcagatgccgactcagacagcggcttcgcgcgg

SEQ ID NO: 11644 - DNA, 1562 bp, Unknown
  gut microbiota DNA sequence
gtgtgccgatggctggcggattttcttacaactatgcagccaagcaggtggatgataaggtgcttgcagcacttgtaaagctggctgaggaagcacagcttgcggagaagtttgaggcactttacaatggtgaggtgatcaacaccggtgagaagcgtctggtgcttcatcacatgacacgcggacagctcggtgatgctgtgacggcagacggtgtggataagcgcagcttctatgtagagcagcaggagagaatcgctgattttgccaacaaggtacattccggcgagatcaccaatgcggcaggagaaaagttcacaacagttgttcagatcggtatcggtggtagtgacctcggtccgcgtgcgatgtatctggcacttgagaactgggcgaagaaaaacggcaagttcaagatggaagcaaagttcatcagcaacgtagacccggatgatgctgcagcagtgctgaattccaccgatgtggcacattccattttcgtactggtgtccaagtccggtacaacactggagactctgacgaacgagtctttcgtaaaagatgcattaaagaaagcgggactggatccgtccaagcatatgatcgctgtaacgagcgagacatccccgctggcaaagagtgatgattaccttgcggcattctttatggatgactatatcggaggacgtttctcctctacttccgcagtcggcggtgccgtattatccctggcgttcggaccggatgtgttcgcacagttcctcgagggagctgctgcagaggatcagctttccgcaaacaaagacgtattgaagaacccggagatgctcgatgcactgattggcgtttatgagcgcaacgtactgggctatccggcaacggcagtgcttccgtactcacaggcactcagccgcttcccggcacatttacagcagcttgacatggagtccaacggcaagtcggtgaaccgtttcggggagccggtagactacccgacaggaccggtgatcttcggcgagcctggcacgaacggacagcattcgttctaccagctgctgcatcagggcacagacatcgtaccgcttcagtttgtcggctttaagaacagccagatcggcacagatgttgtgatccaggacagcacaagccagcagaagctctgcgcaaatgtcgcagctcagatcgtggcattcgcatgcggcaaatccgatgagaaccgcaacaagaatttcgagggcggacgtccatccagcatcatcatcggtgagcaggtgaacccacagtctctcggagcacttctggcacactttgagaacaagatcatgttccagggcttcctgtggaatgtgaacagcttcgaccaggaaggcgtacagcttggaaaggttctggcaaagcgcgtgcttgcacatgagaccgacggcgccctgaaggtattcagcgatctgttaaacatttaatataacgaaaaagaactgtgtcacgtcccgcggcagatgtgcggcgtacacagttctttttatgtgcgttgggaaggtttggcatattgggtgcagttcctg

SEQ ID NO: 11645 - DNA, 2655 bp, Unknown
  gut microbiota DNA sequence
acttgaaacggtctctttttaaatgattcaatcgcttcactatattgctctaaatttgcacaagtattccctaaatgaatatatgcttccaatgttctaggtgcatcaataattatttcttcaaatactttctttgcggcatcatatttttcagcggaaataagcataattccctgactcactttgtcatttatcatttcagtatccataaaaacacccctcctagttaatctttgattttaacacctcgtacaacgaaggtgtaaaataatcatttatctttattttactttccgccatcttagatatttttattttgtgaacatcggtagatgtattaactattttctcaaccatcattccatcgatgcttatttcgaacagcttatcgtcatagcttattttttttattctgttcaaatcaatcacaacaatatttcttttatctgcaggtgtttgatattttattctaaatatgtaaaataatttatcatcaacaatttctatcatctcatcaatacgaccacctataaacgtgtgttcaagtcgcattctaagtacatagataaataatacagccgccaatcccattgatgtgtaaatagatgtttcacttgccactaaaaaataactaagctttccagttctcatatttgttgaaactaaatatcctgttactatacagtaaattggaaataatattgcataagcaataaccaaagcaaaagaaatcttttcaaaaagccacaaataataaatacctcttctatgcttacgattctctatttgaattttcttttttagtccactgtcaaccaaaatattcatatttaacctccaatcaaaccaacaacgtcttcaatagtttttacagtttttgttccatatttatcaaaaattgaaaagactttcgaattttttccaattccagtagcatttttcagagcatttattgaaccatcaaggaaagctgattatatgctcctgcactctgcacgtctgcaagcgtattttcaatcgtcgaaaacagattttcataattgtctctggaagcttcctcaactgttgcaccattcaaaatataattcttataaaaagaacagatctggtaataacattccgctaaattcagatcctcaaaatcttgcagaatttctgcattattgtgattctctgcaaaaaaggaatatgctttctgtactctggttgaaaaactgtaactaccgtcttcttccgtataatagttaaaatacatcatcccgatcttataattcagttccgcaacctcactggtcgtacgagcaaatctatccttattggcattgtacagtgccaaaaattcgtcgttttcctcttttccgaaccttccttcatcctcatatgcttccagcatacacatatacgcatctgtgcgttccggatagattgcgatgtcagattcataacctacgttcttagtcttagaaccgtatgcttcttctttctccggtcttagaaccgcaccagctcggacggctcgtctctctttgccacatacatcggaaaatcatcccccttataaggattatctcccatcgccacttccagccgtaccgtctcgtatgcaagttccgcatagttattttccttggacagatgtcctaaaaagaccgtgccgaaatgatcgtgcagcacctccccgagcagccgcccggaaagctcgttggacaggtgtcccttctctccgagaatacgctgttttaacggatacggataacttccgacctgcagcatatgtacatcatgattcgcctcgagaagaagcacgtccagccccttcaacttctccacaatatggtcgtcataaattcccagatccgtcatgaccgccatggattttccgggctgcttcatcttatacgccaccggctctgccgcgtcatgtgagatggcaatcggctcaatcgtcatatctccgatcgtaaaatcctcctccgcatgaatctcatgaaacagggcgggatcgatcgttccgacggatttggtgtgcagtatcgcatcgatcgtccccggagtcgcatacatcggcagaccgtaacgtctcgcaaggacgccaagtcccgcgatatgatccacatgttcatgtgtgatcagaattccctgcatctcttccgttttcagatcaatcgaattcagaccggattcaatccgctttccgctgattccggcatccactaaaacatggcattcgtctgttcccacacagatacagttgccactgctgccgcttgctatactgcataattccattttatttcttccactctctatctgttaatttcctgccagcgaagctcgatctggtctccctcggagagcactgccgaatactgtgcctgctgtccgttcagttttgtgatgatcgttcttcccgcagatgccgttaaatcaaaatcgtaaaaatcaaaaatatctacaaagatgtagctcttctttccggtcaggcgtaccggctgctgattgataaatacaaccagtcccagatctgtcttctgcgaagcctgctgcgcttccccatcggacggctgctctgcgtcgctctctgctcctgcggcatctgcctctgatgacggtgcctgtggcattccatgctccgctttctctgcctctgtaccg

SEQ ID NO: 11646 - DNA, 8362 bp, Unknown
  gut microbiota DNA sequence
ctccgctgtctcagccgggatctcatccgctgtctgctccgtcccgccagccgcagccgtcacaggctgctccgcaatcggaagttctgccggatccaccgccgctgctccgaaagaaagcaccacccagtccacggaaaagttctcgtacacaagactctccatggttgccacgcggttattcacaagaatctcatgatccatgtccacttccacatccatgaatgccgccagctgctccacggtataaaagcttctcgtctcaaccgcatcgccctctttgatctcataggacggcagttccagacttccgttgacttccaggcacttcggacagcgcacgatcctgccgttgacgattaccttcatctccgaagaggaatactcatccagctgctctaagatacataccgccgcttcgccctgtgtcgacgcttcaatcacgatgtcgctgttcggttccagcggggtgttgatgttgaccagacggtcattcatatagatctctgcggactctcccaactcacctctgacaatccgcggagtgccgttcacggtgaaattgagttccttaccgcgcttcgggaacagttcctcattcgggaaaccggcctgcagagccgcatccacgatcgtaagcttattgttgtcatacagcttgatccgctccccgttaaagcgcaccatgataaagctgtttctctgatcgtaataatttaagcagataccgatcggcgtgacgagcagcggatccttctggatctctgtctgaaggaacgtcacttcctgcagcacttcttcaccgcgcaacgccacacgctctgccggcagatccagcttcttggcaagcatctccgtgtagccgtggatcttaccaccgccgccgacgataaacgccgcactgacgctcttgtctccgttcagctccttgatcttcgccgccacctcggtcgtcattttatccaccaccggctccgtcagcttccacacatccttcgacggaatcgtgtgctcaatcatcataatgtccttataagtcacctgatcttccatgccgctcgagagcttaatctgctccgccgtgttgaaatccaccagataactctgcacgatcagctcggtgatctcatcccccgcaagtggaatcataccgtatgcgatgatgcttccgtctctcgtcacggaaatatcggatgttcccgcaccgatatccacgagcgcaatatttaacagtctgtaattctccggaatcgccacattgatcgccgcaataggctccaacgtcatgtttgccacggtcagtcccgccatgccgactgccgcatacagaccgtccacaacatcctccggcaggaacgtcacgatgatatcctcgctgatccgctctgccttatgggattccagactggagaacggttcatcatttaagaaatacttcatgacggaataacccacacagtaaaacttgtagcgggtatcgttcatttcctttaaaatggactgtgccttttcaattccaagcagatccagtgtatgaatatcctcgccggtaacgaccgtctcctccggaaaatcatagctgatgttggtcgtcaccgtctttaacacacggcctgcggctgcaatacacacttcggtcagttcctgcccgatctgtgactccagctcctccttcaccttggcaatggtatgccccacgcgtccgatatcgtgaatctgaccgtccagcatggcacgcgtctcatgctctaacatatactgtgccaccacgacaaattcattctccgtcttatagcctacggttcccaccacatttctcgttccaatatcaagaccaaacaccagcggctggtcgaatacactcgtatcgctcatctgcagtatctcctaatctctatttcttctccgaaagcgccctgtcaatctgcgcaaaagcctccgccacactgccgttgttgtcaatcacaaccctgcagtgctcccggtagacttcctccgtcaactggcttgcaaaaatccggtctaccttttccgtggaatatcctctgcttgccatcaggcgttctctgcgaatatcctctctggtataaatataccagagttcgtcacaaatttcatcataatgttcttcaatcagaagcgctgcctccagcaccagaagttttcgttttccaccctgcttttctctcgccgcctctttttccacatagacgcgcaccgccgggtgtacaatggcattcatctgcctgcgcttcgcctcatcggaaaaaatgactgccgccagttttccccggtccagtccgccctgcggcaggaaaatatcctccgcgccaaacgtctcacagatcctgtcataacactccgccccgggagacatcagctcatgggcgatctcatccgcaagcatcacgcgggtatccggcttcttcgccagatatcccagtatttccgacttgccggctcctacaccgccggtaattcctataaatctcatcgttccactgcacctctattttgcatgataccaatcgcttcccgcatgcacatcaatctcaagcatcaccgacaactgtgccgctccgtgcatctcttcggcaagaatcttccgcacttcctgttcttcctctgccgctgtctccaccaacagttcatcgtgcaccgtcagaatcagccgggattttaatttctccgccagcaggcggtcatgcacccggttcatggcgatcttaataatgtccgccgccgttccctgtatcggggaattcatcgcaatgcgctccccgaacgaacgctgcataaaattgctcgaagaaagctccggaatcggacgtcttcttccgaacattgtcgtgacatagcctttttccttcgcctccgccaccagtccatccagataccccttgatcttcggataggtctcaaaatagcgctcaatgtactccgccgcctctttcttcgtgatggagagatcctgactgagtccgaaggagctgattccgtagacgataccgaaattgaccgctttggcattgcggcgctgcagatcggtcacctcgtcaaacgggatatggaatacctgcgacgccgtcgtccggtgaatatcctgtgcattccggtatgcctcgatgagcttctcatccccggacagatgcgccagcacgcgcagctcgatctgggaataatccgcgtccacaaacacaaaaccgctctttggcaaaaatgccttgcggatcagtcttcccagttcaatccgcatcgggatgttctggaggttcggctccgtgctgctaaggcgtcccgtcgccgtgatggtctgattgaaggacgtgtggattcttccgtcctctgcgatatagttcaccaggccgtctgcataagtagactttagcttggtcagctgtctgtactccaggatatccgccacaatcgggtaatccggcgccagacggtccaaaacatccgccgccgtcgaataaccggtcttcgtcttcttgccgttcggaagggaaagcttttcaaataaaatcacaccgagctgcttgggagaattgatattgaattcctccccggcttcctcatagatcttacgctcgagttcgtcaatgcgcacggcaagcttgtctccgtactcctttagcgcctccccggacgcaatgattccctctttttccatatctgccagcgtgaagacaagcggcatctcgatctcgcgaaacagcgcttccattccggtgtccgcaagctctttttcaagcggctccctagtcttgtatgccacgtatgccatatagcagacgcactttaaaaattcctccggctttttctcagccgccttctcatatgtgagcttctctatgagatcctttctcgacggaatcatcagtcccgcataatccttggcaatgtcctcatacggatattcattcttaatcgggtttaaaaggtaggccgcgatcgtgttgtcgaacaggttctcctccgagatcgttccaagacattttttctcaagcatccccagttcctttaactgcggctttaagtcaagtgtcgcataggaagcggctgcgctccccgcaaacagttcacggatcttatggcagggaagcgcttctgatgcccccacgtaacagatttcctcctcaccgcatgcaactgcaagtccgagaaaatccgggatatgacagcttcctgccgtctcctgctctcccgcttcttcgccggagttttgcatagcaaagctgccaaacagattcatctgaccgtcagcctccatgtgggcgtcatgcttttcctcctgtggtaccacatagaacccgcatgcttttccacgcagggatgcaaaaaatgcttctgcctcctgcgccttttctatcttcttaaaatgctcctccgccgtattcttcggtgcttccacggagaatctgccgagaagattcttaaattccagtctcttacacaacaaataggcttcctctgtatacagatcggaaacctgttctaaatgcgcgtccgcaagcttgtaggcaatgtccgcatcgatatcgatcgtcgccagcgtcttgctcatctgcgccatatcataatgctcttttaaattcgtgctcgctctcggcggctttagttcatccacatgcgcgtaggcattctcaatgctgccgtattttgcgatgatcgccgtcgctgtcttctcgccgatgccgggaactcccggaatgttatcggaagtatcccccatcagtgccttcacatcgataaactctgtcggcgtcacctgatatttttcgaggacttccttcgcgttgtagtcctcaatctcggttcccgtcctcttcgtcttcgggatccggatcttgatatgatctgtggcaagctgcaggagatcccggtcaccggatacgaccgcaacctccacacctgccgcctcactgcgctttgcgatggttccaagcagatcatccgcctcgtaaccgcctttttcaatgatggtcacccccatcgcacgcagcatctctttcatcagggacacctgctgctttaactctgccgccatcggcttgcgggtgcccttgtattccgcaaacatcttgtggcgaaacgtcggttcagacacatcaaacgcaaccgtcaggtaatcgggctgctcctcctccagtatcttgaacatgatatttaaaaatccatataccgcgttcgtgtgaagtccctcggaattggtcagatccgggattccgaaaaatgcccggttcaaaatactgtgtccgtcaatcaataccagcttttcgctcatttctgtctccgtttctagattgctcttgtatacttcttcagccactcattctcttccggtgtcatgtacggagagagggtcttgtataccattgcatgataatcatttaacaccttcttctcacgtcccgtcatctcgtccggatcaatggcatccagatcaatcggtgcgtaagtaatattttcaaaattcatgaactggccgtactcgtttttctccgccttgtggcataccagttcattctcggtacggataccgtacttaccttccaggtatacacccggctcatccgtcgtaaccataccctcttccagcgtaccgttatcatggcgctccgggaccactctccagcggaagccgttcggtccctcgtgcacattcaaaatgtagcccacaccgtgtccggtaccgcacttgtaatcaatgcccatctgccagagcggcccgcgggataaaatatccagattcagtccggtgcagccgtaaaggaacttggcatttgcaaggttcatgttggagcggcataccgttgtaaaatgcagccgcatctcgtctgtgatcggcccgagcgccatcgttcttgtgatgtcggtcgttccctcgaaataatgtccgccggaatccaccagcaggaagccttccggctttaactcggcgtccgattccggagtcgccgcatagtgcatcatggcagcgttcggtccgtatgcgcagatcgtgtcaaagcttaactcgataaagttatcctgctctcttctgcgcgcctccaggtaatccgatgcggagatctccgtcatcgggatcttgccgatgttggtcttcagccagtacatgaatttggtaaatgccacaccgtccttcacatgtgccttgcggatattctccacctcgaccggattcttgaccgctttcatgatctcggtcgggttcggctgatccacaatgcggatctcttttcgcaggctgctggtaatgcggtagttgaccgtattgccattcatcagcacacatgcgtccgccggaatctccgtcacataatcatagattgcatcgtaaggtctggttgtgatgtgattctctttcagatatgctgcaatcttctcatccacaacttcctcctgtaaaaaccagatgcactccttgtcggtaagcaccagataggacaggatgaccggcacgtaatcaatgtctccgccgcggatgtttaacagccatgcaatatcgtataaggaagtcaggatatgcacattggctccctctttttccattaccttgcgcagatctgcgatcttgtctgctgtgctcttaccggaatacttctcctcaagcaaaaacagcggttccttagaaagcgccgggcgatccttccagatcagatcgatcagatcctccgtcacgtacaaagaacccttctttttctctgcgatagcgagaagctttctgccccagcttccgtttaccactctgccgtcaaatccgatgcagccgctctccggcagctctttttcaacgaactcatccaccgtcggcacaccctcttcacccatgcggtaaagcgtcacggtacttccagcaagctgtttttccgcctgcacaaaatagcgtccgtctgtccacagtcctgcctctgtcagggtaatgaccgctgtgcctgccgatccggtaaaaccggtgataaactttctggctttaaaatgctctcctacatattcggactcatgaaaatcagcggtcggtacaatataaatatcgatcttccgctttttcatctcctcgcgcaatgcgcttaatctttcctgaatcatagtattctccattccggagcatctatccgctccattttgttctaaatatctgtgtactcaaagaactttgtatcaatctccggataagaccgtttcagcgaaatcggtctcccggaacggttcaaaaagcagtgggaactcgttcccgtggtgcgaagttctcccgtcaccttatccgtcatccggtactccacttccatcttgattccattatacttggtaatccgcggctcaatgacaaccacatcatcaaaatgaaccatgctgtgatactcgcaggacaccgacagcaccgggctgatgatctccattgcctccatctccttataggagagtccgatctgatccatcagatccatccgcgcctcttccatccatttgatatagttggaatgatgaatgatgcccatctgatccgtctcgtaatacttggcatgatgctcataaggacgaatcttgatctcatccacctgttttccatagacttcgatttccttctctgacatctgaattccttctttccttacaatacatagacaatggcttcgcccggctcattgcctacgcgtacattatcccacatcccatttaaaatttcaatatccgcagaaagcgttctaagcttccttccgttcactgtgaccggcttttggacatgtggcaatttcttcttttttcttattttatctctaatcttcaaaatattctctgtagtcatcctcattcgagaagagcatgtattctccgtttacatatcccatatagcctgccgctacaacatatcctttcataaaaaatacactcctttcgtcatctgataaaaggagtgtatcgcatcatgtgtccaattctttggacacatcatcctgtttattatctttaacagctttaataagtaatattatcagaatacacttcgggatttcatgtggaaatgcagatggaatattcgttggagaaaaatgtgagcatttcttccggctgaatgtttgcatcggattccgtgtctcttccacgtttggacaatccgacgggtgcatgtccgacacaccggagacaatgggcggactttctggtgtccctaatggcacctcttcacagacaatataaaaccgcgcgaaccgaaactcgccgtcatctgctattgaaaataaggcagatgacgactcagacatcggcttcgcgcggttatgttctgttcagaggtgccaataagggacacacacaaaagtcctacaaattgtcttccgggatgcggacatgacccgcg

SEQ ID NO: 11647 - DNA, 2852 bp, Unknown
  gut microbiota DNA sequence
taagggacacacacaaaagtcctacaaattgtcttccgggatacggacatgacccgcggagtgctccaaacttggaaagacacggatcatcgaagatgcaaacatccggctggttagaaatgccacattttttgaaccgaatttccagctgcattttcatctgaaatcccacggtgtgatcttctgataatattacttatccccaaaagagttctatgcttattgcggcaatcctcttctgtcatcagtcctttgattccaccacgagaagaatcccgccttcaaacgagatctctgccgtatctgccacgatctcgttgctcacgccaagcgaacagaatccacgcaggcaggcgtccgtgaggggatatttaaatcccttcagcgtcagatgctccacacattccgtatagggaatgagcgacacatacgttccgaactgttccttcctcgcaagggtcattccccggtcaatcatacggatgcggttatgggcatcgcagatctggatgggaatccccgcctttagaccgattccgagcagttcgatgttccccagcacatgatccagccgcgttcccgtcgctcccaaaagcgtgatgcgctctgctccgcgccggatcgcaagccggattgcagactcggtatccgtgtcgtccttctccggaatcagcttctggatcgccacaccgggcaatgtcttaaaataagcaagagcctccgttcccacggaatcaaaatccccgacaatcacatccggcacccggtggctgcggtacagatattccattccggcatccgcagcgataacggcatccggcttctcttcctcaaaccatctgtccgcaaaaaaatcgtcgatcgttccgcctgaaattattacaaaatgtctcatacactctcccgctttcctcctgccattccttaagaatttaaaatatccaggaacatctgggtgttttcagcgacatctccgttaaaaacagcacttcccgccacgatgatgttggctccggcgctcaagatctcctccacgttggagagattgaccccgccgtccacctcaatgtccgttttcagtccgcgtgcgtcaatcattttcttaagatcacgaaccttctgtaaggtatacgggataaacttctgtccgccaaatcccgggttcaccgtcataatcagcaccatatctaccttttcaagcacatactccaccgtctgcagcggcgtggcaggatttaatgcaacccccgcaagaatcccccgctctttgatggaagcaatcgtgcggtccagatgcttgcagctctctgcatgcacggtaatcagatccgccccggctcctacaaaatcctcaatatagcgccccggctcctcgatcatcagatgcacgtcaaagatccggtccgtacagggacggatggaacggattaccggaagtccgaaggaaatactcggcacaaacattccgtccatgacatcaatatgtacatactgtgcccctgcctcgtccagttcacggatctgctctcccagtcttgaaaaatctgcggataatatggatggcgacaaacaattcatctctcttacacccttctttttaatatttcttctgttcttttaattcctgatacagctgcatgtaattttcatagcggagccggctgattttcccggcttccaccgcctcttttaccccgcaggacggctccccgatatgactgcagcccttaaaacggcagtttggctcatactcctcaaattccggataataccaccacagatcttccttttccagccctggaatatccagcgtggaaaatcccggcgtatccatgatgtaagtctgctctttgattggaataatctccgagtggcgggtcgtgtgacggccacgctcaatctttctgctgattgcccctgtctccatctggcgctccggctgcagacagttgatgatcgatgatttacccacacccgaggggcctgccaccgatgtcacctttccgtccagccgctcaagcagcgcatcgattccccgctgctctctcgccgaggtgtacaccaccggatagccgcactgttcgtagacatccgaaaacgcatgcagctcctccccggtcagaaggtcgcacttgttaaagcagatcgtaaccggcactttctgatattccatcataatcagaaaacggtccagcagattaaaattcggctttggctttgccgccgcaaaaatcacaagcgcctgatcgatgttggcaaccgccggacggatcagggcattttctctcggaagaatctcctcaatatttccaagcatctgctcctcatccaggacggcaatcgtcacattatcgcccaccagcggcttgatcttctggttgcggaaaattccttttgccttacattcataaattccggatcccgctacgtgaacgtagtagaatccggaaattccttttacaatctttccctgcatattcttatccattatgattccggtgtaaactggtaggtgctcgtggtctgatcgttgatcttgttgccgtttaaatccagccatgagatcaccagatagccctcttttgcaagcagtcccgtcttgctgatggaaaaatcatctgtgatcgccttatcccactgtcccagcacattgccggaagtatcatacagcgtgattgttgcgcctgatacgttggacgtatcgcccggcagattgatcgtcgccttgaagctgtaggtcgtcgctgtcacactctgggacggtgacggtcccatgcttaccgtgatcgtgatgtcgctgcctttttccacctgcttgcccggatcaatactctgatccatgacaatgcctt

SEQ ID NO: 11648 - DNA, 693 bp, Unknown
  gut microbiota DNA sequence
gaagaaaaagaaaaaaggagaattacaatgagtaaaattggaatttttatggcagacggatgtgaggagattgagggactgaccgtggtggatattgtgcgccgcgcgaagatggacattacgatgatctccgtgaacggaaaaagagaagtgaccagttcccacggcgtgacctttttggcggacgccgtagcggaagaagtggattatggcgcacttgacggaatcgtgctgccgggcggaatgccgggaacactgcatctgctcgaccatgcgacggtaaacgaagtgattaagaagtttgcgggcgagggaaaactggtggcagccatctgcgcggcgccgagtgttctcggagctgccggtattctggagggcagacgcgcaacctgccatccggggtttgaggaaaagctgacgggagcgtcaacgagtgaggacgccgtggttgtggacggaaacatcatcacaagccgcggaatgggaactgcaattccgtttgcgctcgagattgtccgctattttgcggatgatgcggcagtggagcacatcaaggacggactggtatatcacgtggtgcagtaataagtgtctgacagcgtcctccatgcggcgtgttttatggggctgccgctttccgtgtattgctccttttagcgataagtaatatatattatgagaagcacatgatac

SEQ ID NO: 11649 - DNA, 145 bp, Unknown
  gut microbiota DNA sequence
cggctacttagatgtttcagttcaccgggttcccctccatacgttatggattggcgtatggatacatgaggtgtgctcatgtgggtttccccattcagacatctacggatcaaaggatatttgctcctccccgtagcttttcgca

SEQ ID NO: 11650 - DNA, 410 bp, Unknown
  gut microbiota DNA sequence
attgagcgttttgatctgaccggcaagattctctttttctgccacggcggtatcatacttacctttgtcaacatactgaccagatccaagatctgcgattttcacctgcttctccttattctccggctttccgttataggcattgacggtatcagacacctgcttatagagatcctcgcctaaaatgtcttttaaaaattccatagtttcctttcctgcaccgtttttaagcgtggtgtctccacagcagtatgcagttttgatgccatgcataagggcaaattgccgcagtttaaacgtcataaggctttcggacaatataaaaacaggaccccggaggaacttacttagcgtcacctctgcgctgttctgttcataaatttccggttgccctgttattacctattttt

SEQ ID NO: 11651 - DNA, 925 bp, Unknown
  gut microbiota DNA sequence
gtatgaggtacatggtatggtacgccgttcttccacagagaagagagagcgtatcgaccatttggagagcaacccgaacttccatgtacactacggcgatctgtccgattccatgagcatcatgcgcttagtgggcatgattaagccggatgagatctacaacctggcagcacagagccatgtaggtgtcagctttgatgtgccggaatacacagcagatgtagttgcaactggtgtgctccgcgttttagaggcagtccgtctctgtggtctggagaagacctgccgtatctatcaggcatccacatccgagttatacggaaaggtagaggaagttccgcagcgcgagacgacaccgttccacccgtacagcccgtatgcagtggcaaagcagtatggctactggatcgtaaaggagtaccgcgaagcatacaacatgttctgctgcagcggtatcttgttcaatcatgagtccgagcgccgcggtgagacatttgttaccagaaagatttctctggctgcagcaagaatcgcgcagggcaagcaggacaagctgtatcttggcaatctgtcttccttacgtgactggggttatgcaaaggattatgtagagtgcatgtggctgatcttacagcatgagaagccggaggatttcgtgatcgcaaccggtgtacagcattccgtaagagaattctgtgagtatgcattccgtgaggctggcattgaactggagttccagggagagggcatggatgaggtcggtatcgacaaggcaaccggcaaggtagtcattgaggtatccaaggagttctaccgcccgacggacgttgtcaacctgtggggagatccaaccaaggcaaagaccgagcttggctggaatccgaccaagacaacattcgaggagctggtaaagatcatggtaaag

SEQ ID NO: 11652 - DNA, 882 bp, Unknown
  gut microbiota DNA sequence
caatataatcaatagtttcttctatgaaaagataagatgacagggtggaaggctatggagagctgaccgccctgtttttatccagaaaagtgcagaaataatcaagagaaaatccaaatctttctgctattctgtttcatgggtcttatatgtacgaagataggcttctaccagtgcaagaatggtggttatctgatcgtttgtacattctgaaagataaaccaacagtctttggtaatccagattatcagttggagctgcctgataaaagaacggatcagcagagatgtgtatagctcgaatgagctgaccgagtttttcaaggcttggaacattaccatgattttcgatctctttgatatatcttgatgaaacaccggatttttcggataattcatcataagtcagcttttggtctaatctggctttcttcaggcgaaaacccatgtctttatcaattttcttagatttagccatgtcatgcacctccgtatatagtgtatagttcaccatttaaaaagaaaatgaactaataacgcactatatcagagggatataatgcacttgaataaaataagtaactttggatattgcatataaaaaaacgcaatattcaaaggttttttctcatgtttttatcctttgaatgtgtttgggagagttatggattctgaaccgttgaaaggatatttttgtatttgggaaatattatcctgcccattgcgtggaaggacagctaaataggtcgcattttaagtaatgcggcaaattctacaattgaaagtgcattatacgcactcgtagagtgtggagaaaatttaatatcagatatgaacagcgtcctgtgggtgtgtgcctgcgaggacgttttttgtatacaga

SEQ ID NO: 11653 - DNA, 1172 bp, Unknown
  gut microbiota DNA sequence
catctccccggtttcatttgggagatacaccggaagggaaaaaaggcaaatgccttgtcattcggaacgggaggaggtgaactcgtatggggcagccttcttctaaggatgaaatgactgtcaggcatcagtttgaccgtttgtgccagatggcattaaaaggcgaagctgtcaattattacaagcacatggactatcgtagaaaacacgaagtcacattctctgaactgtcagaaaaggagttgagcaaattatttactatggatgagtacggaacagaaaatcatcattttgaagtgcatggctatgatattgaagtaaaaaatactttgattgcggaagcattaaaagaacttacggaaagaaaaaggaatgttattttactttcctatttcatggagatgagcgatgcagatattgcaagagaaatgaatctggttcgcagtatcattcatgaacacagaacacgctcactggaaattttgagaaagattatggaaggaatagcagatgaaaaagatgtctaaaaccagaaacaaagaaaatttgttgcctttccatattataaaggcagcatcagagggcgatgtgagtgcaatcaatgccgtgttaaaacattatgaagggtacataatcaaattgtccacaagaaagctgtatgacgaaagtggacaggtacattactacattgatgaaactctgcgtcgcagattagaaacaaagctgatcacaaagatattggcttttgaagttgcataacaggcggttagcattgtccctttccattcgctgattgctgcgtatgcatcttgtaccttgacaactgaatattttttgcatacaggacgtgaggatatgtggagccactaggtagattcgccaagatgtacctgctctttgagcggagtgaacgtgagggaatgttgaaatattacattgaagcaaaggtatggagcgagaagatatgacaaaatgtgtggcagtaacacagggcgatgaagcatgtccgtgataatgatacttccggattgtaaggaaatttgcagtccggtcaatttgaatgacggtgcaagaccgatgtggacagagtaatgatctgtcacctgtattgcatttttatctgcctatgagagccggcaagtgaattgtgggttgtcattggcagataaaat

SEQ ID NO: 11654 - DNA, 1530 bp, Unknown
  gut microbiota DNA sequence
aattattaatgacttagcaaagcatgatgaattgatggaatgtgaaagtatatatgcttggatacagtatatgagatataggacattttctatgtacaaatttgtcccggaaaaactaaatattacactcagaagtcttttacttacaagtataaatgctgtaattgttgcaaactatgcacatgtaaatcgctatttttatggtgatgatattggggcatatttattagtaaagatacatgaattatctgataagactagaaagcagaaacaaataaaagaaattataaaaaatgcatttatcgcaagtagtatggatatagatgaatatataaatatgatagaggaagaatgctataaatgtaggcgtgaaataaattatgtccaaaaggagaagatgaaagagtatttgatgaagacattttagagaaaactgtgtacaaaaaggtagataatattgtgcacagtttagatgaaaacaagttaattaaatatattcatacacccacatattcttgcaaaacattggacttgcaagttaattcagcatatagcagcggattgacctatagtagacggtatagatacacaatatcgtcaggtgtattgtgaaagactactgaagtgcatttctcataactgatagtaacaggtgagccagtaaaatcatcattgatggcattaataataacggaatctgtagaggaatcatacatatcaaacaggtaatatggattattttgttttgtgatgttctcctttccacagatacttggcatcatccggcagatcaatgatggagtaagcatattgttgtggtcagtctgtaattctttgattttatcactggtaggaaggttgtttaaagtttggggtttacagcattcggtaaatgctttctacatttcgagtaattgcagatatagtgcatttaccgaatgtaccaacggatatgtgggttctttcttgccaacaacacagatgcgattatagatgcatgaacggataaagtaatctttcttcgtcatgccactggcaaggatgctaacttcgatttgtttatgtttagcatcgttgactcaaaaacttatggttggatatttatgttgattgcttatggtaaagctcttttcatggtgagtttggtagcaggcacgaataagcgcctgtaaactacattgattatttatttttagtactaaaagtagattatatctgttagagattttaaaaaagtaatatgatatcaaggcaactaatttgcaactatagtttttgaaaacgatatgaaaagagcaacattagatgaaataaaggtggtgcaataccacataaaatcagtatttttgatttgatgatatttcctttgggaagagtttgaacaagtaaagaaatccatacaaagtctgtgattctgagctttgtgtggatttttttgtggcaataagtacagaagggatctgcaattatcgaattggtgtcccattaaaaaataaagggtaatatttgaaaaatgtaataatattaatt

SEQ ID NO: 11655 - DNA, 3765 bp, Unknown
  gut microbiota DNA sequence
ggcttgcaggtgtctggttccaaaatgcaacaggcggcggtaaatctgaccgcaaaatccggcatttctaaccacgccgcgcttcgcatctgcgatgatctgtgtctttccaagctttgaacactccgcaggatgtgtccgcaacctgcagacaattttaggattctcgtgtgtcccttgcggcaccagacaacagatggcataaatgccatctttatgtcgaacaaaacataaccgcgcgaagccgatgtttgaattgccatctgccatattttcaatagcagatggcaatgagtttcggttcgcgcggttttatattgtctgtgaagcggtgctgctagggacactagagaatccgctcattgtctgcggtttgtcggacacatcctgcagattgtcaaagcgtggcaagagacacagaatctgatgcatagcgcggcatggaagaaatactcgaattttgcttcaaagatttaccgtcgcctgttacatttcggaacttcacacctacaggttccttataatcagatcccaacctctgtgtcagccctttctctgtcagttcttctttcccagtgtgacagagagcgtctgctcttcatactgtccgttggaagatctctggatggtgacatccacggtcgttcctgctttataatactgaagtttagaggacagatcctccatcgaggagacatccttgccgtcaaatgcggtaataatatcgcccttctgaattccagcctgctctgcggcggagttctcttttacctgtgctacatagacaccggtcggcatattgtaggtttttgccacatcgcttgtgacatcgacgccgccgataccaagatatgcactgtctgcctcatctaccttttccttcgtaatcaggtcctcaatgatcggcattgctgtgctgatcgggatcgcataaccgattccctcaacacttgtgtctgcatattttacagagttgataccgatgacctcgcctgctgcattgagcagtgcaccgccactgttaccagggttgatcgctgcactggtctggatcagttctgcggtgtaatttgtgttgctgttggaatcggatacggttacttcacggttcaatgcgctgatgacaccggttgtcacagactgaccatagccgagtgcattaccgatggcgatcgctgcctgtccggctttcagatcatccgaattgccaagtgttgcaactttgattgtatttaatgtgtcagaatcgatgctgcttaacgcaacgcggataactgcaagatctgtggaaggatcggtacccttgatctccgcgctgacggttgtgttgtcactgaatgcgactgtgaggctgtctgcaccctccaccacatgattgttggtcgcaatgtaaagattgtctgcatcctggctcacgataataccggaaccgcagcttgtgctctgctgtgtctgtgttccgccgaaaaagctctgatactgggattcgctcacattcgtgatcgatacgatagaaggcattaccgcttccacgatgtcagagacatcggatgccacatagctggatgatgcgccggtcgcctcaatcttggtgttggaatcggactgtgtcagcacgctgcctgtggctgccaccgtggaatccgagtctccgaaaatctgacccgatgcgagatgtacgccctcgaacaccgttccggataccagcccgaagacaagtgccagtgccgcacattttgcaagcttcataccaaagccgcccggctttctctctctcttttctcttctcttcttttccttcttgccggaaggattctgaccgtacgccgcattcccggctccctggctctggtagaactgttgctgataaccgccgttctggtaggttcctccgttctggccgtatgcactgttattctgtgtgcctctctggtaggttcctccgttctggtaagttcctccgttctggtaggttcctccgttctgaccgtatgcgctgccattctggtaagctccgtttgcgctgtatgctccgttgttctgcgatgtgccgttctgattcgttccgttattatatgaatagaaggaatcggaagactggttatgattacgttcattgttatccataataattgctcctttccctgacaactctttgttctgttccagtgagtatttctttttctctctcactttctatgatgcagtttacagggaaaatgtgatgtaattgtgaaaaaagtatcaaaaaagtatgtttctgttcttttctgtctaaaaaaggacctgccacaccagattccaaacgcccgccacgagcagtcccacatagaatccatttctccagcgcttctttttcagggaaaatgcaagtgtcaaaataataaacagatataaaagatccgtcagataataaacacgcgcaccggacgcatacatcgtcggagagcaatacataatcgcctcactcgcgattcccgcaagataggcgagcatcagcgtgatgtgcttttttgacacgcgccataaaaacggcagggtgaaaagcagcgccgcagcccaccagatcatcgcaaggatcacttcccgcgtcatcaccgccatggacggcacctggtacacgcacgcttcgatattgatatactgcatccccatatccgataacagatcaaagcctgcataaggaagcaatgcggccagggtaaagaccgccgcgatcccaagagcgatccagtctctctttttcttctgctcctgctgcagcagaagaaggattcccacaacccagatgccgcataaaaacagtttgttctcatttgcaaacgatgacagcagccagtgtatcgtgatgaacacatgctgtccgaaaggcatcgtctcgtattccggcatccagtttgcaatctcacttgccacacggatctcattgccgggagccgagaacagaatcacaaacgccaccgctgtcgtaagtgtctgaaccagaagaagcggatgcacttttttatggcgaaggaacagtgcgacaaccgccaacacctcaaacgtcagcaaaacagcgctcatctgctcgatggacatcgttcctgccaccgcgcacggtatgctgatcagaaaatatttcttattcagcgcaggctcttcccccggctttgcgaacaccgcgtccgcaaaaggcatcagcgcccagattccgcaggtaaaacaccaggtatagaagatggaaccgttcacccagaccgccgcatagccgacagtcataatgttcatgagaaaatagccgcccactgccgctgcgcagggtccgatcgcttcctcactgtgtacaccaatccctgccgccttttctgacaagcgcagcacccccatcggcagaagcaccagcatcacggcatttaccacacgccagaagccgagccctagccggaatgcaagatacacaaacgcctctcccgacattcttcccacccaggtctgatagcgccaggacagatactctccaaatcccatactgttcgtatactgataaaaaaaggcatcgtcgccatccgaatagctgctctgacttaccaccagaagtgccccgatcagcatcaatgcccaaaaaatccacactttatattttttactcataaaaccctctattccacagattccatgcccaaaagaaatcacaaccggttattccgaaatcaaaaccgttattccctgccaggagtgtcttcctgctccactgcatccaaaagcaccgattcaatcagatat

SEQ ID NO: 11656 - DNA, 1038 bp, Unknown
  gut microbiota DNA sequence
aaggtattacctttgtgactgaaataaaaacataggaacatgaagattaccatcatcacaaaggaatgcaagaccaaagacaaagacgctcctgcaaaagccaatctttgttttcgactccgagataaggatgttgacctcaaagtccgttccgacattgaggttatgcttgactattgggacaatgatacactttcctatcgaaggacaaagaaattaccatctgacgagcagaagaaagtcaaggttttggtgcagaccattacaacagctcttagcgagcagtataactctgcgactgctgatgttgcatggatgaagaatgtgattgacgaatgtgtcaatccaacttcaaagccaacagagacattgactacagttgtttcgagaatggaacaatacattgcggaacatcccatgagtccgaaatcagcactcgtttataaaccaacgatcaagaagcttcaacgctatgaagcctacaagagggaaatagagggaaaggaaggctttacgctctattgcgagacaatccgccccgaagagtatcttgattttcgtgagtatgtcataaacgaatatattcattacaatgactacccagagttttatgaacagttcaaccttggcatgcaccctcccaagcagatgtcaagcacacagattataggtatcatgcatcatctgcgtattgttgggcattggtgcatcaagatggggtttacaacaaaccgctcatgcgatgcattcactatccctgcagccgtgcaaggtacacctttttatctgacgatagaagaacgtgataaggtttacaatgcaaacctacacaacaagccagagttagaagtgtatcgtgacttgttcatcttccaatcaatggtgggttgtagagtcggagacctgttttcttttaccaaagacaatatagtcggtgacatattgcagtatcttccacacaagaccatgcgcaaacggtcgcagaccgtgagcgtcccgcttaccacaaaggctatggaaatattaaaacgttacgat

SEQ ID NO: 11657 - DNA, 653 bp, Unknown
  gut microbiota DNA sequence
cataggcacggtgcatggccaaaaatgtggcctgcaaaatattgatctcatcgatctcctgctggctggcaaacccgacaccgtaataaacctccgggcaggcggtcaacagggtataggtctcttcccggcgcttttcggtcatctttttggaatcattgagagcgggcaactccagcccgcggggcagcaccacacaggccgcgcataccggcccggccaaagggccacgccccacctcatcaatgccgcacaggccatcgaagtccagggtttcatcgtattcccacaaaaaacggttatcggtcattgcggtatcctctccagcgtgatgcggcccattgccgcactgcggaactcatccagcagcatgatggcggcacgctcggtgttggcttccccgccggaaatgagcatcccccgcttgcgggcgatgcgctccagcagctcgtagctttccatttcggcgatggcttcggcatccagcttatagcgttccgccagtgccgcagtgtaggtgggacgcagggtatccaaaaggcgcatggccaggtactcgatatccaggatctgatccttgaccgaaccgataaaggccagccgctcgcctgctaccttatcttcaaacttcggccacagtacgcccggcatat

SEQ ID NO: 11658 - DNA, 324 bp, Unknown
  gut microbiota DNA sequence
ttctgggaatactcgcagtctgctatatcggattcgcggtgtttttccagagccacttctgctttggcactacgatagatggcattaaagtgggaggatgcggcaccgtaaaggtggagcagctcatagaggaggagatcggaggatatgagctgactctggtggaacgcgaggatcagacggagaccatcacggcatcacagattggcgcggcgccggttttccacggggagatcgagcagctgctggcggaccagaatgccttcacatggcctgccattctgtttggaaagagcgcgctggaactggaaaaaacagtaacct

SEQ ID NO: 11659 - DNA, 1428 bp, Unknown
  gut microbiota DNA sequence
ttctgagacgattgaagcactttcctgcatgcagaaggagaatcagagaaagccggtggatgcgtcctgctccggctattccgcagcggacggctatacgcttgtcccggcggattacggaacgacgatcgatgagacagcgttaaaaaatgcggtggcagaagctgtggaagggctggaggacacactcgacctggagaagagtggttgctatgtggacccggcggtgggagacgacgacaaagatcttctcgccgtgatcgacgaattaaatcagtacgtcgcatcgacggttacctacgatttcggggatcagacagaagttgtggatggcagtacgatcagcgagtggctctcggttctggatggtgaactggaggtcgacgaggaggcggtgctcgactatgtcaagggacttgcaaagacctacaataccgcgtacaaaccgaagacgttaaagacgtcttatggaccggaagtaacgatctcaaacggcgcttacggctggaagattgacacagaaggagaggaggcgcagttgcttgaggacatcaagtccggcaagagcgtggagcgtgagccggtctattcccagacagcgaacagccatggcgagaatgactacggcaattcctacgtggagatcaacctgacatcgcagcatctgtttgtatacaagaacggaagtctggttgtggacagcgattttgtatcgggaaatctgtcaaagggacacggttctccgaccggagcgttcagcgtgacctatacgaccacggatgccgtgctgcgcggagaggactacgcgacgccggtaaaatactggatgccgtttgcgggagacgtcggcatgcatgacgcgagctggagaaaaagcttcggcgggaatatttataagacaaacggatcgcacggatgcatcaatctgccgacatccgtggcaaagacgatctacaatacgatcgagaagggctggccggtactggtgtacacgcttccgggaacagagagcgccgcacagctgcagcaggatgtgcagaccgtgattgatctgatcaattccatcggtgaggtaacggcggacagtgagacagtcatctcgtcagcacgcagccagtatgatgcgctgccggattccacaaaggcgaatgtgacaaattacgatgtgctcgtggcagccgaggcatcactggcacagatcaaagcggcgggagagcagacgggaatgtagtctgtctgccgcatggaattgtcgcaataagcatagacctcttttgggtgataagtaatattatcagaagatcacaccgcgggatttcagatggaaatgcaggtggaaattcggatcaaaaaatatggcatttctaaccagccggatgtttgcatcttcgatgatccgtgtctttccaagtttggagcactccgcgg

SEQ ID NO: 11660 - DNA, 461 bp, Unknown
  gut microbiota DNA sequence
ggaggaaaatagcatgataaaatgtctgtgtgtgggacttggaggagccgtcggagcgatgcttcggtacctgatcggactggtgcctgtgggcgcgtccaacggattcccggtcaaaacacttctcatcaatatactcggtgcgtttgttatcggcgtgctggcggttctgggagaaaaacattcgctttctccgcttctggtactgacgttaaagaccggcgtctgcggcggctttacaacattttctacctttgcactcgagaccagccagctgttccagaacggaagctatggactggggatcgggtatgtgtgtgccagtgttattttgagcattgcggcagtgcagctcgcgtgcctgtggctgtcctaaggctgggcagatgcaatgcagcggaaggggtgcgtatgaagtgtgttgtgtcctttttatgataagtaatattaaatattataag

SEQ ID NO: 11661 - DNA, 327 bp, Unknown
  gut microbiota DNA sequence
gatggattttgtaatgactagcttgtgtgcatagttttgctggaatgaccgtttctgctgttgcttgtttctttgttacgataatcatacttggaatatcctaattcttcatccagttcctcatccaaagcaccttccagaagaacagacatcatgtcacgcatgatactgtttacatcggtgccatctttgatgctgatatcattattcttcagataatcacgcatcatttctctcattgctgctttttgtggactgtcttttcttcttgccataaaaataacctccaaactgagtaattttatcttacatcagtttggaggttta

SEQ ID NO: 11662 - DNA, 93053 bp, Unknown
  gut microbiota DNA sequence
gtcatttctcgcattgctgctttttgtgggttgtcttttcttcttgccataaaaataacctccaaactgagtaattttatcttacatcagtttggaggtttacacaaactttgggatgctcccatatacacatgcatcctgtcattctataacacagcttgactccaggcacttcttccaaatcggcgctttgccgggataacatcggcggggtgacatgaagctgctccgccgcccgtgtaatattctcctcccgcgcgatcgcaaggaagtcattcagcgctcgaagttccatattgatcccttctgcccggtttttctccggtagacggcacagaccagatatgcgattaccgctccgatcagcgctcctcccagtacgtccgtcggaaaatgtacgccgacatacagtcttgagaatgcaatcacaaacgcaaacaccagcaccggcacgccgatcttcctcggacacatgagaaatacgacgactgccaccgcaaatgcacttcccgtatgcccagatgggaacgagtaatcactctgcgcctctatgatcctgtgcagcccatccacaatctcgtagggtctcgtcctcgccaccagattcttcagcagtacattgttcacaagcgtattgagcagcagtgaacaggtcatcaatccgccgaccttcctggtctttttcagcagaagaaacagaatcgtcagcgcaatccagaaataaccgtggtcgcccagatgtgtgagaaacgtgagtaccggcgtgaggaaatcattccgcatatgctcctgaatccacagaagcaccggtccttcccagtcaatcaaaaattgttccattgttatgtatcccctctttttctcttttgaggattcttattatagcacccgtctgcgccgcttacaagtgcgtttctttttgtgccttgcgccatcaccggacgtgctatctctgtgcggtcagcaccttattcaaaagatctgccaaaggcaccatcgcattcatcgcctcactcaccgtattggtctgcgctcccacctcaatcagcagtgttttcggacagtagtgcatattgtagcggtaccccttcaggtagatccttcgggtaaatcccggataatactccgccgcctttagctgcatctgaaacgagattgccagattatccgcaatataaggattgtagaggtaatcaatatcccccatcgccgtcgtcctgctcagcccgttaaaaaacatgacctgcgccatctgtattccgttgacctgcgtaaccagtcttgtactctccgccacgccgtcgcggtgcagatcaatgacaacctccaccccgggattttccgcaagcaccgcctcaagccccggtcctgccttggaataggcgtgatccctgtcccccacatcgtattctcccttgtggtgaatcacattgaatccatactgctctgtcaaaagctttgtcaggtaatccccgacaccgaccaccgacgtcgatgcatcccccggaacagaatctgtgtagccctcctgcgagtgcgtgtgatagatcaggatctgcggcgtcgatgcatcgtgtgacaggcgcagatcttttcccagcagtgcatcggcattcagctggctgctgttgattgtcgttgtgctgtccacctgataaaaattctgaatcagatagtcaaaatcattcagtttttcccgcggatataccaccaccttttctgtagccaatgccgtctgtatctgtgccgcctgtgctgtctgtgtctccgccgcctgtgccgcctgtgtctccgcctgctgttccatctgtgcttccgcctgtgccgtctgtgcttccgcctgctgtccctccgcagcttccggtacggttccctgcgtctgctccttcgtctctccctcccgcatgcttgtactgctttgctccgccgcctcctgcgtcatgatgacttcccccgtcgccgcatccacatagttctcgtccgccgcctcccgcgccagaatagcctcgtaggaccagtcactctccacctgcgtctgataatcggcagatacaccactctcttccgggagcaaaaaaaagtgcgcgagaagccggtctgcaatcgtaagctccgccgtcccctgcgcctgcccgcaagcctgcggcaggaaaaatcccacgatctcctcctgcagcagaaaacccagttctcccggatccagtcttacactaccggataatatcactgccgccgccacaatcagtatggttaccggaaggatttgtctccgcttttttctcttatcatgacttctattataatttttatactggtatcgataaacatgcataatttactttatgcaccggcaatttcttttatgccgcccatctgccctctttaaagcgcatgcaggcacccgcccgcaaaagcgagattcagcccttccgagatggtgtagcagagtctcttgaccgactcgtcaatatccttcggcgtcacaaacatggcatttaaattcggcgacagcagttcgcggatgagttcatatttttccgcatcatttaatttttctaatgaatttcccatcgctgcaaacgcctggctctgtgtgagcgcggtaaccagattgtacatcgtatcgttcacgattgtcgcggcgtcgaccacggtcggtacgccaatggaaatgaccggaacgccaagacttttttcatccagcgcatgtctgtgatttcccactccgcttcccggattgataccggtatccgtcacctggatcgtacggttcagccgtttcgtgctcctcgctgccagcgcatccaccgcgaccaccagatccggctttgtctcctttacaatgctgtgaatgatctcctgcgtctccatgccggtctgcgccatcacgcccggcacaatgctgctgatccggttcaccgtctgtttgccaaatgcatattttccatactctttcacaacatgccgcgtgataaacagattgtccaccactccaggtcccagtgcatccggcgtcacctcacgattcccaagtccggcaatcagcaccgagaggctctccttttttaaccgcacaagctgtctgatcacccgcgcaagctgttcggatacctctctgtggtagtcctcgtcctcctcatccatatctgccgcctcgatggtgatgtatgttcccttgggttttcccattgtctttgccccgttctccgtctcgatcacaaccgtgctgaccgtcaggttcgggctgagtttttcctccaggaaacggactcccttaagttccacatgatcttcctgcattttttcctgtgtctccaatgcaagatcggtgcgtatctgatacatagtctcctccattttttgtattcctgcagacaggacatttctttctgtctagtctgccacagaaaaaaaaagttatccgcaaatttttctgacaaatttcagcattttctcttgacaggtcatgaaaaagatcctatactatcatagtatgtttacattgaactgtccgtgtccggcttcgatgtacatttcattgtaacgatgcactgcatgtgccgttaccagttagaatcataatcataacaaattggaggtgtacagattggctaacattaaatctgctaagaagagaattttagtaacagagacaagagctgcaagaaacaaatctatcagaagtgaagtaaagacagcaatcaagaaagttgaggctgctgttgctgctaacgataaggaagctgctaaggctgcccttacagtagctatttccacaattgagagcgcttcttccaagggcgtatatcacaagaacaacgctggtagaaaagtttcccgtttaacaaagcttgttaacacgctggcttaattccagagaatagatcttaacatacggtcctaacccaaccgtatgaaaaacaccagtaccgtcatactggtgttttttttattttttctgctttgccgcactgtagcggatgataaacagctccactgccatctgatcgttcatccgtcccgtctttaccgcttcctccagcgccacaccgtcctccaacgcctgtctcaactgccctgcgccaaaaccgcgcgcctgggtgagattccgctttacggcaaacggcggaatccccgccttctgtgccatcgtctgattgtcaaatcccttgcccgccatatcccgcagatgaagcagaatctggaactgtctggtaatcagatacatgatacgcatcggcggttccttgagtgtcagaaggtcataatacagatcgagcgccctgcgctggttgtgttccgcgatcgcattgaccatctcaaaaatacggttcgtcgtctgctctgtcgcaatcgcttccacatccgcagcctcaatgacacttttgtccatggtataacagatcagcttttccagttcccggtcgatattgcccatatccgatcccgtcttgctcaaaaaaagctgcatcaccgatcccgtaatattctttccctcttttttcaggcgcgccagcacccagcgcgtaatcagttcttccgtctgggtggcgaattccactatttttccggcgttcttgactgccttgtacatcctggaacgcttgtccacttcctcctccacaaacacgaaataggtgcttgcagcgggctgtgccagatactccgccagttcatcgcaggcatttttgaaaaagccgctgttctcgataagaatgactctgcgctccgcaaaaaacggaagggtctccgcaagatcaataacctgcttcgggttgatgtcctttccctcgaagcggttaaaattcatatcgccgtctccgcccgacagcatgccgcccatcccggaatcctctcccgccgcagtgagcgcgttctttaacttatcccggtactggcgtttcaaataatcttccgttccatatagtaaatagatctgttttaaatttccggatctgatatcttcgtcaattgttttcataaaggtttctgtcctgttctgcctgtcttaaatagtttcagccgctccggcatcatatacatattacgctccggcaaaagtccgggcgtggcgcgttctgctgatctcgcagtgcacgtccaagaaatccctgatttcttggactgacgggcattcgccctatcattcgtcaaaaatatccgatgcattgtgcaagcactgcatcggatattttctccttatggcactgctcattgcttacgcacattatagcataccttcaccagtgccgcaaacttccctcactgccaccactgttctttttcttccagatacccccggcagacggcttgtccgtccgtctttttgacgcacagtctaccgctttccatcgtataatacacctggctccccgcctgctgcatatgcccgacagcctccttggaggggtgtccgtaccggtttgttctgctgcacgacaccagtgcgatctccggtgccagcgactccagaaacccggtggaattggaatagcgcgatccgtgatgcgccgccttataaaaatcgattttctgcacgtcagctcccgtttttgtcttctgcagccaggtcagaatctcctcttcctgcgccgctccaatatctccggtaaagacaccggtaaagtcatcctcctgataaaaaagcaccagcgactcctcgtttttgtccacagactgacccccaaacgcggcctccgtttcaccgggatgcagtgccgtaaacgttgcctttccgaaatgccagatgtcacctcgcctcagccacaccacttttgttcccgcatcctctgccaacgcttccagttcctcccagttttcatcccgcggcatctgttccgccactgccagatactccacaggatatcccgacgacagtatctcccgcagtccgctgatgtggtcttcatcggtatgagacaccacccagcagtcaatctttttgacccctttgtactttagaaacggcagaatccgataagtgcccacctttccgacattggaacttcctccgtccacaaacaggtggtacccctccttcgtctgcagatagcagccgtccccctgcccgacatccagcatatccagttccgcctccccgctccgcggaactcccaatacggcaagcagcaatagtccggcaaggaaaacgcccggatgtcctccattcttttgctctgccctcctgccgtgttccttttctctttccctttgttcgctctgccggtgcaataagcatgttccagctcccagaaacgcataatataccgcgatctgccagcactgcggtcttccgacaatccacatggcgcccggaagcataccggcaagcgcacatatatgcttccccataaagagcagaattctgcatggaaaaagcatcccttttgccaatggaagcgacaggagtcccaccattccgcctgccgctccgaatccgagcagcacccccatcatcggcagcatgagcaggttgacgaaaaccgcatagaccggaatctcataaaaataccatgccacaagcggcagtgtcgtaaaccagaccgctgatgccgcaaatatttttccgcgcagcgctcccatcccttttttctcataagaaatgctctgtccgacccacacgacgccaaggattgcaacaaaggaaaaacggaatccggcgtcccagaacaggcagggatttttccagagaagcgccactgcggcaaatgcgagcgcacaaaatgtatcatagctcctcccgatgacctgtgctcccagaaacagcaggaacatgagaaccgcgcgtctcacggaaacgccccatccagccatcccgccgtatccgtacatcactcctgccgctgcaagggcagccatgccaaacggcagtcccgctttctttaacatccggtagagcgccatcccgatcacagagatatgaagtccggaaatcgccagaatgtgcgacaatcccccgatctggtagagtcttttcgtctctgcatccaaaagctccctatcgccgacgaccatcgtcgccagtatccccgcatcgcgctcgcccatcgtcttaaggtagacctcttttatctgctgcccaagctgccagagggcttccgccgtctgcctctttgcacccacctttctatcaagtgccggaccttccatcgcaaaatcaaatccgcgcgcaaaataataagccttcgcatcaaacgcaccctcatttgatgcccgcttccataatgtaatctctccgtgatatatgagaatatctccgatggaacaatcatcggaatcagaatagatcagaaccccaccgcacgataccggttctgcctgtaagaaatttgacgaatccgtccgaaacatacaggacgttaattcatagacatatcgatttttctgtacctgttttcccgcaagctgtccctgtacggtcacatacatgccatcctgcagttctcccagatacgcctgcctgctctcctccgcctccaaatatcttccgcttccaagagcaaacatcagcaaaaaaactccggcgccaaaagccgttctctttctttccgccggggaaatcccgtcgcccggacggtacccgtcagcaaaaatgccgccaaggattccgcaggccaggacgccgcaggctagcaatgcccgcgcgaatacgctccagccgtatgccgccgcaagaatccccgacagaacgcccgctgcgccaagacacaaaggccgttttgtcacacacttccccctttaatccgtttcggtaggttcctccgtttccgaaaaggcgctctctgcccccgtgacataatccatattgcggtcatacatatccgcaagcgggaaattgtcgcggtagactccgctcgtatcgccgttgacggaaatctgaaccttgctgatcgtggaaagctccgacagggaatccacgatcgaatagataacgattgcctcgtttactttgtaatcctgattcttgaacgcttcatccaggctgacgtagcagacgccgtccaccaccgacacagagacaagcttggtcccctccggaatcgcagactttgcatccttggtcttcggaccgtctaaaagctgctccataatcagtttttccatggaaatattgctgctgtagtagacatcctcgcgcacttccttgaccagaccgtccccgtccagattggaaaaatacagcgtgagtgttgtattctgaatggaattgatctgctctcccggattttcgataaagctgtcctgattcatggtaccgacaagattccccttcgcatccgtaagcggtgcgtctccaatgtaaaatgccacgcagtccaccccgtcgatctgtgtcatcgtccggacaaccgccgcccggcacagcacctcatcgacagcactcattttgctgtaatcctcatcaaaatgcagggttaaaagcacaccgtccagtgaataattcgtgatttccacatcatttggaatcggcttccggtaatccacattgtccgaatccgaactcagtttcgcaaggaactccttgatcattccgtcggtatcggttgccgaaggctcataaggttcttccaccagacggttcttgtccttattcagatattcgatatgataggcactctgctccgtctgcctgccgcacgccgcgagcgagcctgacaggaacatcagacatgccagtcccagacatattaacttttttctccatcgataagcttctcggctcatagactctcccttatctaagaaatataattcagcggaattctgacgttgaaaatcgttccctctcccacggtactgaacaccttgatggctccgcggtgcatcagaaccgcgctcctcgtaatggcaagtccaagtcccgttccgccgatctccctggaatgagacttgtccacacggtaaaaacgctcataaatatgctctaacgactcctccggaataccgattccgcaatcctccactttcagataaaaatactggtgatcggcattcaaagagacatgtacccatccgtccggtcggttatatttgactgcattttcgatcaggttggtaaaggcaagcgtaatctttacctcatccacatccgcactgaccggccggaaactctccaacaccagctcgatattctgcttttccgcaatcggctttaagcgctttaaaatctgctctaacagttcgttgatgttgacattcgtgatgtttaaatctcccgcagacttatccatctttaccagagacagcagatcattgatgatcttcgtctcacggtccacctcgttgccgatatccgacatgaattcctgatacagctccactggtgcgtcctccatgctgttgatggaatccgccagcaccttcatggaagtcagcggcgttttcagctcatgcgagacattggacacaaattcctgtctcgaatcatccaacaccttcatgcgccccaacatcttattgaacttttcacagatctgcctggtctcggtgtaagcgttaatctttaatgcgtcatccccatatcccgtctgaatctcctcgatcgactttgccatggcatggaacggcgccacaagatgaatcgcgataaacgttcccgcaaagatgatcgccacgatcgcaatcagttccatgacaagcgtattgcgcgccagatattccagattcagattgatgctgtcggtcgaaacgctcaccataatcacaccgatcgtccgcttgttctccgtctccagatccacatgcaccaacggaatcgtcatttcaatgtaacggttctgggaatcatatttgctgatttcctccccctggatactcttgatcacttcctcggaaataatcgtctttccggtgtcaagattgtaggtatcctttatgatatggaactcctcatcgataatcatgacacgcccgtcatagatcgttgacagctgctctaactgcacgttgatcgcagactcactctccgcattattcagataatcattggaaacgatctgattggcgagaatcttcgcctggcttagaatctcactcgtgcggatcgacaccgcacggttttcataagagccgagcatcccggcacgcagcaggacgctcggtacaattccgatcagaatgcagagaagaatcagtctgcacttaagacttttgagaaaatcggttaattttttaaatttagacattgtgtacacccgttaattctgtgaataatagtacccgacgccccactttgtgtgaacgtatttcggttcgctcggattgctctcgatcttctcccgaagacgccgcacatgcacatccaccgttctgacatcccccggatactcatagccccatacaagattcaaaagattctctcttccatataccttgttgggattattcacgagcagttctaaaaggtcgaactcctttgcagtgagattgacctccctgccgagaataaacagccttctgctctcgcagtccagctttaagtctcccgcctcgatcaccttggattcttctttcctgggctgcgatgcggcagttcttctcatgatggctttgattctcgccttcacttccagaatattgaacggctttgtgatatagtcatctgcgccgtactccagtccgagaatcttatccatgtcatcgcccttggctgtaagcatgacaatcggcatattggaaaactcgcggatatgctggcacacttcaaagccatccatcttcggcagcataatatccagcagaatcatgtcgtatgcattctctgtcgccatcttaagcgcttcctcaccgtcgtaggcgcaatccacttccatgccgtcctgctccagactgaaacggattccctttacgattaacttttcatcatccaccacaagaacttttttcgccatttatttcacctttatctgatctctgatccgattatataatccctctttgattccatctacattcataatctcttcaacggaagaaaatcctccgtgcgcatcccggtagtttacaaccgcctgcgccttggtctgtccgatcccggaaagcgtcataagctctgccagcgacgccgtgttgagattcagacgtccgtcttccggagacgctgccgtccctcccgaagttccctcacctttcctgacactgctgtccgcagaagtcacacttcctcccgcagaaactgcactgccgcccgcagaagtcatactgcccgtcatcccggctgcttcttcgctgtcaggaatatacaccatgagtccgtcgtacacgctctccgcaagattgactgcgcacgtcccggcatccgccgtcatgccgcccgccatctcgaccgcctcatagatgcggtctccaggctctaacacgtacacgcccggctctgccacctctccgcagacatagacataacattttcccgacgcacggtctgccttatcagcatcttccgtcgtctccggtgcaagagctacctcagccgcccattcctcaccggaaacctccgacagatccacacttcccgtctgctccccgccggaaacgtccagtatatccagacgctccccagcctccgtttcttccgtctcctgcacattcccggtatcctgcgagacttccgtctccagataaacctcgttctgactgccacatcccgccataaaaatgcacagaatcatgccagcccctatcttcttccatgttcgtatcataagcattctccttcttctatataaaaggagtcctcaatgcccgatattcatattctaacgaaattttacagccgtgacaagagtgtttcagaaatatttcaaaattgtttcttccaatgttacccagaaatttttggcatccttggaatccggcattaaaactgccccctcatacgcgtccaacgccgtctgctccacggtatccggcgtctctgacggaatcacggagtaatgccccgacaatccatgcaattcgtccgccatgccgactgtcacaaactgtgcaaaatctgccgccgctgcactgtcttttgtataatcattgaccactatcatatcggtaaacgcacatgtcgccgccgagagcgtatcgcttaactccggcatctgcatcagcccatagtcatatccgtccagctgccagagtgtatcagtatccaggattgccgaaagagtccgcccttcccggaaattgttcacgatatgctgttcggacacctgatccgcatcaatggaaaaagatgccaatatcgtgtcaaaatactccagatcctgctgatagagcgtatcatcgtaggtgatatccaattcgtccgatcctctctttgcaaacgtgacgctgttgccgacaaacgggaaatcatagaacgcatccttgacatcccactccagcagatattccacattctctgccggctcgttctcattggaataatcgatgattgcctgcagcgatgccggcgcctcggtaaaataatccgtctggtaaataaacacgcacgcatcgtaggacagcggatacccgagcacgcgttcttcgtaggtcgccgcctcgactgccttttccagcacgccgttttccgacgggttcgtctgattcacggaaacaagaccatagaggtatgcttcctccagattgtcccccggtaagaggtaaacatccggaaatgcatcatcctgcatggtcttatcgtaaatagttccaagataatcaatggtatcctgatactgcacggctacttttttcccggtcttagcgtaataacgcacagccgcctcggtaaaaaagtctgcataactgtcatccgcataccacagcgtaaggtctgccggtgcgctccggtaagcttcatccgccgccgtttctcccgtctccgtggagggcacaccatccccgctgctgccgcatcccgctgtattcataacagccattcctgtcattccaagcacaacgacaagtcctgccgccgtcagtcttttgtataatcgtttcattttatttccctaatccgttttttgtattctcattatcagggaattacatctcttccagaaccgcatccagcttctctgccatctcatccacatgctctttcccgataatcagtggaggtacaaaacgaagcacatcggcgcctgccgtgatcacgacaagtccgtgttccaatgctgctgacgcaatttttccagccggtttctcacacacaacgccctgcatcagtcccagacctctgcgcgccgtaaggaaatcatacttttccacaagcgcatccagcttctgctccagatacggcgtgatctcttttacatgctctgtaatccgatcccgctccatcatcttaagcacggtgtcaactgctgctccgacaaacgggttgccgccgtaggtcgttccgtgatcgcccggtgccagcgacttttccgccacgcgctcggtcatcaggaatgctcccaccggaacaccgcatccaagcgccttcgcactggtcataatgtccggtttcacaccgtagtgctgccatgcgaacatctcgccggtgcgccccatgccgcactggatctcatctaagatcagcagaatgtcatgctcgtcgcagagtgcacgcacgccctgaaggaattcgtcggttgccgggtagattccaccctcgccctgtaccgtctccaaaataatagcacaggttttctcatttatcaaagcttttacgctatctaactgattaaattccgcgaaacggattcccgggatcagcggttcaaacggctcctggtaatgtttgttgccggttaccgagagtgctccgagacttctgccatggaacgagtgattcatggcaatgatctcatgccctgcatgaccgtccctggtgtacgcgtatttctttgcggcttttaaggctccctcgattgcctccgtgccactgttcgtaaaaaagacgcggtccatccggcttgcctttaaaacacgttttgccgcgcttgtgatcggctcgttgtaaaacaggttggacgtgtgcatcagcttatccacctgcgtctttagcgcctcgctgtactccctgttatgatacccaaatgcctgcacggcgattcccgccgcaaaatccagatattcttttccgtccgtgtcatacaggtatacgccctccccgtggtcaaacaccaccgggaaacggttataggtatggaggatgctctcctccgcctctttcatgcatgtctctttattcattgtaatacctcttctctttctcactaaggatcgccgtaccgatacctctgttggtaaagatctcaaggagcagacaatgtgcgatccgcccgtctaaaatatgtactctggacacgccgttttcaatggcgtcgatgcagttgttcagtttcggcagcataccgcccccgataaagccgtcgccgatcaatgctctcgcctcatcgatggtcagttccgagatgagcgtgctcttgtccgaaggatccttgtatacaccctcaatgtccgtcaaaaatgcaagcttctccgcgctgaccgcctttgcaatcgcacaagccgcatcatccgcgttgatattgtagctgttgtaggcatcatccattccgaccggacacacgatcggcagaaaatccttctccagaagatcgtagaggatcttcggattgacctccgtgatctcgccgacaaatccgatgtcctccccgttggaatattttttctccaccttgagcagtccgccgtccttgccgctgataccgattgcattgacacccagctcttccaccagcttgaccagagatttgttgaccttatttaagaccatctccgcaatctccatcgtcgcctcatccgtcttgcggagtccgttgacaaacaccggctccatgccgacttttccaacccagcggctgatctccttgcctccgccgtgcacgatgatcggcttgaatccaaccagttttaagagggtcacatcctggatcacatggcgctttaactcctcgtccaccatggcgcttccgccgtactttaccacaatgatcttgcggttaaaacgctgtatataagggagcgcctcgatcagcacttccgcctttgccagaatttcctgcatatttttctcgtccattttctctccactctccctgaatttttacgtctctgcttaggaacggtaatccgcgttgatcttgacataatcatatgtcagatcacagccccacgccgtcgcctccgccgtgcccatcttgatatccgcgatcgccgtcacctccggctccgagaggatcttcgtcgcctcctcctcgctgtagtcaagtgccacgccgtcctttatgatctgcatttttcctgccgcactctcaaagaacagatccaccttctccggatcaaactgtgcgcccgagtaacccatcgcacagagaattcttccccagtttgcatcgtgtccgtagattgccgccttggtcagattcgatgtgatgaccgacttgctgatgatcttcgcctgctctttcgtctctgctccgatgaccttcacctcaaacagcgccgtggctccctcgccgtcgcctgccatctgcttcgccagatattcattgactgtccgcaatgcctcgcagaacctgtcgtaatcctcatttttctctgaaatgaccggattctccgccatcccgttcgctaaaagcagacaggtatcattggtggaagtgtcgccgtccacggagatcatattataggtgtcgcagacatctgcctgcagcgcttctaaaagcaggggctgtgcgatcgccgcatccgttgtcacaaaactcaacatcgtgcacatgttcggatgaatcatgcccgagcctttgcacatgccgccgatcgtaacaggaacgccgccaagcatgacttccaccgcaatctccttctcgtgggtatccgtcgtcatgatcgcctgtgccgccgcatgaccgctctctgtctcacccgacaatgccggaaccatcgcctcaattcccgcacagatgcgctccatcggaagctgcatgccgatcactccggtcgatgccacgagcacctgatcttccggaaccggaagcagttcaccgactttttccgccgtctgtctgcagtagcgcattccctcctcgccggtacacgcattggcaatccccgcattgatcacaaccgcctgcgcctttttgctctcgtatacaatcttctgatcccactttaccggggcagccttcaccagattcgtggtaaaagttcccgccaccgcacagggaacctcgctgtagagcattgccatgtcctgtctgttctgatatttgataccggccgccgtgctggcagcacaaaatccttttgcggcggtcactccgccctttatcatctttatcattccgcactccttttcttcctatggattataggtcgtgatattgtcctcatttgtgacgtattcgtaatagttgacatcctcgcggaaagtccacccgagtccctgccagaaacggtttccgacttcatttttcttgaatgcaatcagattgatcttgttgatatgctctgccgcaagcgcatccacgcaggcacccacaagtttctgtccgatcccgtgcttgcggtacgcctcctgcacgcatacatgatacaggcagcctcttcttccgtcatgtccgcagagaatcgcgcccacaatctttccctccgccaccgctaccatgctggtggtcggattacgtcttataaaacgctccacgccctctctggaatcatcgatgctgcggattccaaacccgtgaatctccatccataacgcatgtaccgcttcaaaatcatccattgtcatctcgcggatgaccggttctgtctctttcatacttccatctcttctctttatcatttccggttcattttcccgctgcttccttccgtggaaaatccttcccgggttctgttttcgctctgtatctacgggaacatcggcaccagacaaagcccttccgcctcgtcaaatccaaacagcagattcatgttctgcaccgcctgtccggccgcacccttgaccagattgtcaagcgctcccatcatcacgattctgcccgtgcgctcatcgatcttaaaaccgatatccacataattgcttccctcgacccatttggtctccgggcactcatccttcggaagcacgcggacgaacttttctttcgcataatacttatcgtaagccgtcttgatctcctcgtaagaaggaagacttccgtccgcctttttcgtcagggtggcatattctgtcgccagaattccgcggttcatcggcaccagatgcggcgtaaaattcacaacaaccggtctgcctgccgcgtagccgagctgctcttcgatctccggtgtatgtctgtggctcgtgacaccgtacgcctttatattctcattgacctcacagaacagattcggcagcttcgcaccgcgccctgcgccggaggtaccggacttcgcatcaatgataagggtatccggatcgatcagcccttccttcaccagcggatatgccgtcagaatcgaacaggttgtgtagcagcccggattggcaaccagtctggcatttttcactttatcgcggttcacttcgcaaaggccgtacaccgcctccccgataaactgcgggctcttatgctcgatcttgtaccatttctcatacaccgcaacatccttgatacggaaatccgcggacagatcgatgatctttgtcttctcaagaagtccttcgtttaagacgcctgccagaaatccctgcggtgtcgccgtaaagatcacatccacctgctctgccagtgcttccatattgtcgtccatacacacgtcatccacgatctcaaacatgttctgatatacttctgcgtatttctgatctatataacttctggaaccgtaccatttgatttccacttctttatgtcccatcagaagacgcaccagctcatttcccgcataaccggtcgcacctatgattcctgcctttatcatgttcgtattccgcctttccttttcctgcaaaaaatcttttcacactatatcactatattagtctacctctttgccatagtaaagtattttttgtccgctttttagaaatattcttgcataattatacatccgttttttcttttatgcaagcactgttttactatttatgcaacgtttttcttgttttggatttctttattccttaatttatataggttttccctatttttattctgtatgctttgtacatgtatatgcatttttatttgaaatatatgtatattttttcacttgcttttccgttgcatatgttgtatattgattgcagttaatgatttacagaaaggaaaaaaagcccatgaaagaaaaagttatcttagcttactccggcggtctggacaccaccgccatcattccctggttgaaggagaattacgattacgaagtcatctgctgctgcatcgactgcggtcaggaggaagaactggacggtctggaagaaagagccatctcctgcggagcttccaagctttacatcgtcgacatcatcgacgaattctgcgatgactacatcatgccgtgcgtacaggcgaatgccatctacgagaacaaatatctgctcggcacttccatggcacgtccgttaatcggcaagaagctggttgagatcgcaagaaaagaaggcgctaccgccatctgccacggcgctaccggaaaaggaaacgaccagatccgttttgagcttgccatcaaggcactcgctccagatctcaagattatcgctgcatggagagacgacaaatggaccatgcagtcccgcgaggacgagatcgcatactgccaggcacacggcattcatcttccgttctccgcagacaccagctacagccgcgaccgcaacatctggcatatcagccacgagggtcttgaactcgaggatcctgcctgcgagccgaactacgatcaccttctggtactcggcgtctccccggaaaaagctcctgaggagggcgagtatgtgaccatgaccttcgagaaaggtgttccgacctccgtcaacggcaagaagatgaaggtttccgatattatccgtgagttgaaccgtctcggcggcaagcacggcgtcggcatcatcgacatcgtggagaaccgtgttgtcggcatgaaatcccgcggtgtctatgagactcctggcggaaccattctgatggaagcacatcagcagctcgaggagctggtacttgaccgtgctaccatggaagtgaagaaagatatgggcaacaagctcgctcagatcgtatacgagggcaaatggtacactcctctctgcgacgcagtgagagcatttgtcacctccacacaggaatatgtgaccggtgaagtcaagttcaagctttacaagggcaacatcatcaaagccggaacgacctccccgtattctctctacagcgaatccctggcaagcttcaccaccggcgatctctacgatcaccacgatgcttccggattcatcacactgttcggactgccgttaaaagtccgtgcaatgaagatgcaggaaatcggtgagaaaaacaaatacgaataaatcatacatccggattgcttacgcaagaacccccggaaagctgccgtttcggcagctttccgggggttccttttctgtccggttattcacgttccgatcattttctttctgatcatccgctttcctgcgcatccagtatcaaatccagcacggtaagacccatctgaatctcctgctcggtcaggctgccgtatccaagcagcagcaccggatggtttctgccaccgccgccatctttcgtcagtgcatattcgccaagacccgatactttcacgccctgcgccgccgcacgttcacagatctccctctcgctgcatccggtatccgcctccacgagcacatggagtcccgcatggtctccactgactgagagcacccagcttctttttttcagttcaccaatcaaaaaatcatgcctgccgcggtaaatgccgcgcatcttgttgagatgccgctcaaaatgcccatcccgcaagaactcccggagaatctcctgctgcatgcgcggcaccgtcgtcgaataaaatccgcagacggtgcggtaacgctccatcagctgttgtggaagcaccatataactgatacgcagcgacggcgcgatacttttggaaaatgttccaagataaattaccttcccgagtccatccacgctctgcagcgacggaatcggctttccacggtaacggtactcgctgtcgtgatcgtcctcgatcagatagcgctcctcctgctccgccgcccacgcaagaagttccagtcttctgcccaaaggcatgacgctgccggtcgggaactgatgggacggcatcatgtagacaagctccggtgccgccgcacgcaccgtaccgccgctaagtccctgctcgtccgccggcaccgtcaccacccggtatcccatattccggaaggtgtggtatgcctgcggatatcccgggttctccatgagcacggtcttatttcctccgagaagctgcgtgagcaaaatctccagatactcatttccggctccgagcacgatgttttccgggcggcagttcacccctctggcgtgatgcagataatccgcaatctcactgcgcagactgtactccccctgtccgtcccccgccattaacagttcctcactgtcgtccaacagcacattccggctgatcttccgccagacgttgtacggaaaactgcgggtatcgatcgcatacggggaaaaatcaaccaggcagaccggtttttccggcctgtgtacctgtcccgtatctccgacgctgtttccccgaagccggtacagctccgcgatatcgcatacaaaaaaaccccggcagggttccgcttgtatatatccctctgccaggagctgatcgtatgccatctctacggtgcttctgctcaccgcaagattcttcgccagaagacgcgtggacggcagccgttcccctcgcggaatcctgccatctgtaatctcactcttgatatattcgtatattttctcatagaggggagctttcgctcccccctgtaagttcatcataatctctatcatcgtaaagccttatccgtcgttatgccttgcttctcttgatctcctcgacaatgcgctccttgagttcgtacgcgcggtccttcatcttcttggatgccgccgcagactgcaggattcttgcaatgcacttcgatgcaacatcgtactttttgtagtggtatgccatcgtcgcgagcaggtaatccatcgtgcactcatccatgccgcacatcggataggtctctgtggataccgccttggtaaagccttcatacgcctgtgcatagaacgcctcttcctgctccctgcactccttgatctgctctgccatcttcggatctttcgcatctaaagactcgcgcttgccgcgcagcagccatgcaagattcaggcaggtatatgccttctcactgttcttaccttttttcacaatcgtgttgaacagtgccagcttgtagcgctcgatcgcagtatcataatcgatcagcgtcggctccacattgtccgccggcttgaaattcacacagatcttttccttgatcatcttgacctgcatggaggacaggtgttcaaaataacgcgtaatcgcggtatagccgcagtacgggcaggaaatcacactgtactttaaggtgtcgatgtgctcatagcgcggacgcagatccatgtcggactcaagacgctttaatcttccgctcttgatcatctttgtcttaaataccttgtcgcacactgcacagcgcacagccttgtccagaagaaagctgtcttctgttggcaccgcctcctgctttgtgccgtcctctcccacgacttctttcttctcttccgcaaaaagattcgtggtatcctctgcctttaaaccaaatttttccaaaccggataataaattcatgtctattcctcctaaatcccaaaccgcgtcctacgcagttggcagcttgaatgaactcttcagtgacacaatgcggttgaacaccagctgctccggtgtcgaatcctttgcatccacacagaagaatccctggcgcacaaactggaagctgtcgtaagccttcgcaccggcaagattctcctccaccatgcagttctttaacacggtcagtgaattcggattgaggttcagacttccgtcctcattgtatacccctttctcctcgtccacaatattctcatacagtctgactgtcgcaggaaccgcatgcgctgcggatacccagtgaatcgtaccttttacttttctgccgtccgggctgttgccgccgcgggacgccggatcgtaagtacaatggatcactgtcacattgccgttctcatccttctcaaagctgttgcaggtcacaaaatatgcattcatcaggcgcacttcattgcccgggaacatgcggaaatactttttcggcggctcctccatgaagtcttcgcgttcgatatagagttctcccgagaacggaatcttacgtacgccgagcgcctcattctccagattgttcacaacatccagatactcggtctgtccttccggatagttgtcaatcacaaccttcaccggatcaagaactgccatcatacgggacttcttcatcttgagatcctcgcggatgcagtactctaacattgcatagtcaacggaactgtttgcctttgaaataccgcacagttccacgaacatctttaacgattccggtgtgaatcctcttctgcgcagcgctgcgatggataccagacgcggatcatcccatccgtccacaatgccttcctccaccaggcgcttgatgtaacgcttgccggttaccacgttggtcagatatagctttgcaaactcaatctgtctcggcggcatctcatccttatccgggataatctgtgcgcccacctcgttgatgacccactcatagagcggtctgtgatcctcaaactccaacgtacagatggaatgtgtgattccctcgatcgcatcctcgagcggatgtgcaaaatcatacatcgggtagatgcaccatttatcgccggttctgtggtgtgtcatgtgtgccacacggtagataaccggatctctcatattgatgttggaagaactcatatcgatgcgcgcacggagcactttctcaccgtccgcatactttccttcccgcatctcctcaaacagctttaagttctcctcgacacttctgccgctgtacggatcttccttgcccggctccgtcagcgttccgcggtactcacggatctgctctgcagacagatcggagacataagcttttcctttttttatcagctctacggcacactcatacatctgatcgaaataatcggacgcgaagaaaagtctgccttcccagtccgcaccaagccacttgatgtcctccgtgatcgcctccacgaactcggtcttctccttggtaggatttgtatcgtcaaatctcagattaaactttccgccatacttctgtgccagaccataattcaaaagaatggacttcgcatgaccgatatgcagatagccattcggttccggtggaaatctggtatgaacaaccttgcagtgcccttcctcgatgtccttgtcaatcatctgctcaataaaattctttgagacattttcattttccataatgtcgcatcctcctcaattacaatccggacagcctgccgtccgatctgctttccctgtcaaaaaaagagaaaccaactcatgaaatatcatacatgatacaccgtcaaggtgcaagtataatataacatgaattgcctttatttgctaatactattttatttctatgtttttactgatcttccaaccagtctatcccacactgcataagcagcatttccacgatgatctgtcaaaccatacctttctttcagaaaagtccccagatattttgataccttcgtggcgccggcttcattcaggtgatctcccccgtcaagtgtgtcagacttccagtcaatcccgagttcttctgcatacaaattcagatccagatatagcacatcatgctcctttgcatattctgttaccgcatcatggcgtgatccgttccagctctgtggagacggaatacttaccagcatcatctgaatgtcatttttttcacaaagtctgtgtactgcgtcaagatagctttccggtacaaaagccagaggctcctttgccgattccgtctgcatatagtcaccacctgtgtaaggcactatcgctgtctttttctcatatcccatcgtaaaatcgggcttcggttcctccggctgcctgctccagtctgactcatccatattcttccagcggttgtgatatttataaaacggaatatcacttgcaagctgcagctcgagcgcatgattaagctgatctgccatactgccatccatatagatcagattcgtctctaatacaacaatatccggagactgcttctccagaatctgtttcagccagttatacgcttccggtataatctgaccggactgcccgcacacatacgacgcaatcccctgctcttcccatatctgcaccggctttatcgatgtaaacgtgatactgtctccaaagaaaataacgtccagcgaattgttctctgccccaaagattccgttgacctttacatcacgcggcggcattcccgcctctactgaattttcctttggatagaagacccgtgacaatcccagaaaaatcactgcaagtatcccaaaaaacaaaagataccttactattttcttcactctgttcatctgatcctcctaaaaattcgcatagatcaactccacttccagatatccgtctccgaaggccccaaagataagtggaagcaggatcattacataataacaacaccaacgtgccggtgtcggcagtgtggcaatcttccgccggatagagatcccccgctcatggagcagccccaccacagttaccagtataacaccacacaaaacaatcgcgatatctgccctatcaatcccgaaagacggcagatccatctgtcccaaagccgtcatgtgggaatgtccgaatacggtctttaacataacaatcgcagcttttgccccgtttgcccgaaagatcatctcaccgatcaccaccagcacactggtacgcacgatctgaaaaactgcataccccttacttttcaccagtctgccgcatttttcatagaataccgcaatcagcggttcacaaagaactcctgccataatcagaatgaagtaatacataccgaaaaaaatataattccagtgctgcccgtgccacagtccattgagcaaccataccggaaaaagagcagctgcggataccgctactttagcgccatgctttccaaaccgcgccttagctctggttccaagcttctgtacccatccggtaagggataccggataaaaaatatagtctttcagccacgcgccaagtgtgatatgccatctgcgccagaattctgatacattttttgacagaaatggctgcctgaaattttccggcagcacaacaccaaacatctctgccacgccaatcacaatatccatacatcctgaaaattcattgtaaagctgcacggtatataccactgcggcaagagccagaattgcaccatcatagctctggtaattcaaaaaggcaactcctactgcccgatccagccggtctgcaatcacaatctttttaaataatccccacagtacacgctgcgcacccatggtaagattttcgctgctaattgctgttcccttccacagctgatccgccgtctgatcaaaccggctgatcggtccctccatgatttgtgggaaaaatgccatgtacaacgcaacctttccaaactgccgttcagccctgttcttcccttcatagatatctaccacatagctgaccgcctgcagtgtgtaaaaggaaatacctatcggctgcaaaaaacgaatactctttaaacaaataggcaaggtcagaaggcgaaatactgctgaaagattctccgcgaaaaaattataatacttcacgataaacagtaccccgaccagaagcacaaggctgccgcaaagtactgcccgctttttcccggtaaacttttttttgagctgctttacctcactgcgtgcaagcccatttttcttttctttgaactcctgcccgatatgatcgatccagagtcctgccgcatacatgataaccgtcgccccaagcagatacagcagaagtatcccactgaaagaagcaaaaaaaatgtatcctgccgccagcaacacatacggccggtattttgttccggcaatctggtaacagatcagaacaagaggcagaaataccagcagaaacagcattgtatgatatgccatatcagccttcttcctccagtctctgtatcattgcccagatagcttctgcagaattaaaattctttgcgatcatatctcctggtgcgatctgcacatcaaatgtatccccgatctctgataccagcgagaggattgcaaacgaatccagcaaatgatcatcaatcagtgttgtacatgtactataatccacatccggattaatctcctctaaaatctccaataattcttccatttttcatttctccctctttataaaattctatctgccgctttattaagcggataaaccggcattttgctccgcagcacccgaaagcccttcgtcttgcagtagcttaccaccgccggaagatcccggcttaaaaaaagtgacattccctccgtcatggaatacgcacccgtgcgctcaaataccagaagatcccccgggcgaacaccttttaatggatactggcggatcagaatgtcatttgcggtgcagagtgcaccacagatgcagtaattctgctcttcttccccctcacgtgcaaaaagcggcgtgcagaacggtgttttcatcgccataacctgtccatcgtaattcaagtgatgcataccagcatccaccagacaatacctcgtcccctgattctcctttacttcccgcacttttgtgacaaagctgccacacattgctgcaaggaatcttcccatctcaaatgtgaccgttcccggaaaatgaagttctgtgacacagtccgccgcatcagaaagcatcgccagtgcctcttctcttccccatttttttgtccctttaaaatactccacgccaaatccaggcccatattcgagccgcggcactttaagaccgaatcgttcccagatcctgtcacatacctccgcgagctgtcccagttccttgcggatctgttcactttttctcttctgcgttcccgagaaaaaatggatccctgcgaactgcacatacttctgctgtagaatcttatcgaccgcctcaaacagaacgtcctcattcattccaaactgatttccactcgtaagacgcagcaacagctccacatttcgtccatattctctggataggcgcaaaaaaagatctacctgatccattgattctgccgtaaaatgcggcaactcctctttttccagaagttccctgatatcctgttcttcttttaatacgccagaaagaatcatcttctctgccggaactttctgctcgatacagatccgcagttcccccggagaacagacttcaatatagtccgtcatttctgccatctcctccgtcagaaatggatttgccttcatcgcaaaacaaagtcccacacggtctgcaagtaatgtcttcatttccgcgacatcctccctcagacgatcaaggtcaaacacatagcagggagtctgaaattctctggcagcttctgccagcacttcctgtctcatcttctcttctcctccctgtaatgattccagagagccgcacggtcaatttttccattctttgtcatcggcatctcatccatatgtaaaaacttatccggcagcataaacgccggcatctgttcctttacctttcgacgtaactcttttttatcgatctctccaacgtaaaatgccaccagtttctgctcctgctccccgtagatacagcaactgcgtgtcacaccttccgtctgatccaatgtcaactgaatctcctccaactcaatgcggtgtcccatacgcttaacctgaaaatccctgcgccctgcaaaacacagcagcccctcatcattataagtaccgatatctcctgtgcggtagattacctgcggataactctgattctctggattctgtacaaagctcttctccgtcgcctgtggattattgtaatacccacttgccagggacgtacccgccacgcagatctcgccctgtaccccggcatctctgatcacacagttctgatcatccaacagaaataccagtcgattaccaaacgcacttccgatcggaagtgccgcatcctccggctcatcgcctcttacccggtaataggtacagttacacacaatctccgtaggtccatacagattgacaaactctgccgctggcagtgcctcccgccaggctttcagatgcttatatggcatcacttccccgctgaaaagcacccggcgtacctccgacggcacacggtactcaaatccgcgcagtgtcgtcaccatgcaaagtgcggaaaccgcccaggtcagagatgtcacatgcttctcacacaggaaatccagaagcgatggcggcatggaaaacatctgttttgggatcagaacaagctttgctcccgtaaaaatggatgtatatatatccttcaccgacacatcaaaatcaaacggagcctgattgccgatcacatcacactccgagaaatcaaacgttttcgcaaactgctcgataaaatcaaccaccgcacgctgatttacaatcactccttttggcatccctgtggatcccgaggtaaaaatcccatataagagatcctgatccacactctgtaccctcacccgatccagcgacacaaaatcaatgtcagtctgctttgccgcttcaattggaatcatatttccctgatagccacatgcacgcatcttctcctcatactgcatatccagaatcatctgatccgtctgcagtgtggcaagaattttttcaatccgcacattaggatattccggattaatcagcacataaaatgcccctgcatatacaactcccagaaatgcagccagggtatctgccgatttgtccatcacgacagctacaggctttcgtatgacgtgttttctgcataaagctgacccgatgcgttgcgcaagctcctgcagctctccccacgtgtaagaaacgctcccgtcatcgaccgccgcacgctctttataccggcttaccgtcgcttccaaacgatccaacacacaattcaattttctgtcctctactttccctgttcctgctgcttcttatctgtcaagatacttcttcacctgttcctccaggaactccggtgtatcaaaataatcaatcttcatggcatgctttacctcggaaagtgtctttgcagcctcttcctttgccacttcgcttcccgcctttaaaatatcatacacatcgccgatgcgctgctcgtattcctttctgcgcgcacggatcggagacagttcctcctgcatgacattattcaggaacttcttcaccttgacatcacccagaccgccgcgtttgtaatgtgccttcagttcatccagattcgcatactccggcagatactccgcaaaatgcccgtccgtacagaatgcatccagataggtaaatacggtattgccttcgagctttccaggatcttcgatccggatatgatccgggtccgtgaacatggacatgatcttcttcttcacatccgcctcgctctccgagagatagatgcagttgccgagcgacttgctcattttggcctttccgtcggtacctggaagtcttaagcaggccttgttatccggaagtaaaatctgcggatctgtgagcgtctcgccatacaccgcattaaacttatgtacaatctccttggtctgctcaagcatcggcatctgatcctcgccgaccggaaccgtcgtcgcatgaaatgccgtgatgtccgccgcctggctgatcggataattgaagaatccgaccggaatgctcgcctcgaaattacgcatctgaatctccgccttaaccgtcgggttgcgctgcaatctggagaccgtaaccagattctggtaatagaatgtcagctccgtcagctccgtcacgtaggactggataaaaatatgagacttcgccggatcgattccaaccgaaaggtagtcgagtgccacctccataatattgtcacgcacctttgccggattgtcggcgttgtccgtcagcgcctgtgcgtccgcaatcataataaatatcttatcaaacgtccccgaattctgaagttccactctccgcttcagagaacccacataatgtcccacatgcagtttgccggtaggacggtcacctgtcaaaataatcttttctgccattgtcatttcccctgtcaaacatattcttgctttattatacatgttttgtgtgacaagttcaatttttcttttgacaatctccagaaagtttttcagaaaaatagccgtcactgtagagttttttcaaaaacgatgccagaagcggcacgccgaacagtcctaagattccaaagaaatgaagcccgacaatcatacacggcaacatcacaaccggagaaagccccatctgttttcccaccagcttcggctccacaatgttgcgcaccactgtgatgatcagatacagccctatcaccccgattcccattctggcattgccgccggcaaacgcaatcaccgcccacggaagcagcacggttcccgtgccgagcactggcagaatatctaacaccgcgatcaaaaacgctatcgcaaaagcgccctcgatccgcagaagaagcagacctgccgcaagttccgcaaacgtcatcaaaaaaatgaaaacgtatgccgccgcacattttcccatcgttccaaaggttccctttttgacggcgagcaccgtctccttccatttttccggtatgtttttttcaaggaagcgcatgatttgcggaaaatccagttccatgaacaccgtcgatatgaccgcaagcagcaatttaaagcacatccccggaatattcaccgcgatgccggagacctgctgcagcagggtgccggacattccggtcagaagctcccccgcccggctgaccgcctccgccgactccgtacccgccgtgcgcagcacctcccctcccaccgtctctccactcatgcctgccgtccacgcgcagaaatgcttcatcatcgggaaaatcgtctccgagacaaaccgcaccacttccccgagcagttcctgtcccaaaagcacgatgcggtttccgaggaatccgaacaacagccccgccagtccgtaaaacagcagaacgaccgccaccgctgcaatcccacgccttatatgcatgcgttccgtcgcaaacgccaccggaaacgagagaatccaagccacaaaaaatgccgcaataaacggcaggagcaccggtccgaccagttttaccgccgcgaggacaagtccgccccacaccgcccagtatgcaaacttaataaggaattctttctgatgtctgatccgctcttcccgctccatggcaatcctccgcgtcatgttttctcctaataactatatccaccgggaagcgattccatgcacgacgtccgcacattcctttccagaaaaggaactgccgcaataagcatatcgcactttgctttgataagtaatattataagcagactacaccgtggaatttcagatgaaaatgcggatggacattcggttcaaaaaatgtggcatttctaaccagccgaatgtttgcatcttcgatgatccgtgtctttccaagtttggagcactcctagggtcatgtccgcatcccggaagacaatttataggacttttgtgtgtgtcccttatggcacctctgaacaaaacataaccgcgcgaagccgctgtctgagtcggcatctgccctatttttaatagcagatgccggcgagttcggttcgcgcggttttatattgtctgtgaagaggtgccattagggacaccagaaagtccgcccattgtctccggtgtgtcggacatgcacccgtcggattgtccaaacgtggaagagacgcggaattcgatgcaaacattcagctggaagaaatgctcacatttttctccaacgaatattccatctgcatttccacatgaaatccccgagtgtttttcttgtaatattacttatcgcccaaagagctctatgcttattgcggcaattcctgattcgcactttattttgttattccgcctccagcttcagcatatagatgcagttcggtttgtctaccttcaccggggaaccggtctcaagcgaataaccatccttgtaatcgatcgtgtagctgaaaatgtcgttggaattgttgttcaatgtcagataatgcttctcgtccggatagatggcaagcatcttcggataatcactgttcaccttcgtcgtaaataccggggtaagcattcccgtcttctcctcgatctcataacacacgacagagttcacgcctgcgttgctgcagaacagatacttaccgctcttcgagatctccatacccgatgctgcacagatatcctcctccttcttcggggaagtgctgatggtctggatcttctcaaataccggctcattatcctgcacagaataatgatatacctcaacaatattgagcagttcatagagaatatatgcatattcgccgtctcttgagaaacggatcatacgcggggcagactcgagcggtccacggataatgtcaatcagctccagcttgccgttctcataatccacgcggtagacctttacctgatccagtccattgtcaaccgcacacagaaacttctgatccggcgtcagcttcacacagtccacgtgcggtacgaaattgcgctgtgcaatacttcttccgattcctttgtggaaaatgccgtccgcgattccaccgatgcttccgtccgcttccagatgcatcatgctcacacggccgtcatgatgtccacccacaaaaagatagcggttgccatcatccacttccacatagcagcctctcattccgccgatccactgcttgttgatcgaagtaagatcaccgtccttctcgatacggaaggattctacgccctcatccgcaatggaatacagaaatctgcggtccttggagacaaccagatccgacggattgttgatcggaaccaccttgcgctccgtcagttttcccgcctcaacgtctacatcatagatatggattcctacgctgttctcgtgtgtataagttcctacatatgcaacatacttctcctgcttcatcgtcttccaccatcctattcttttcttcgcaaaatgtcatacatggcaagcggctgtccaaggtcgatataaagcacctgcttcggatgcggcgcggactccatatcattcccctcttcatccacgattcgctgcacagtcaccgtgatattggcaccgtccggcttcatgacctcaatgctctccccgacagaaaacttattacgctgttcaatccggtagagtccctcttcgttccgctctccgacaatgcccagatacgtgtactccttcacataggtgttattgtcgtaaatctgcgcttcgtccgaaggtttgccaaagaaaaatccagtcgtaaactgccggtaggtgcagtttgaaatctgctcctgataccacgccatatgctccctgtaaagctccggcgactgcttgtagtcatcaatggctcttcgatatgttctcgccaccgtggcaacatacagtgctgtcttcattctaccctcaattttaaaactgtcaatacccgactccatcaattccggaatatgttcgatcatgcaaagatccttggaattgaaaatataagtaccgcgctcattctcatagaccggcaggtattctcccgggcgtttttcctccacaaccgcgtatttccagcggcacggatgtgtgcacgctccctggttggcatcccttccggtaaaatagttggacagtaagcaccttcccgagtaggagatgcacattgccccgtgaataaaggtctcgatctcaagatcgtccggaatattggcacggatttccttgatctcagccagcgaaagctctctcgccgacaccacgcgctttgccccctgctcataccagaaccggtaggtaccgtaattggtgttgtttgcctgcgtactgatatggcgctcgatctcgggacagacttccttagcaatcatatagacccccggatcggaaatgatcagcgcatccggctttatctcccgaagctcggcaaaatactctctcacaccgtcgagatctccgttgtgcgccaggatattggcggtaatgtatactttcacatcatgggcatgcgcaaaagcaatcccctccctgatctcttccatggaaaagttcttcgctttcgcgcggagtccgaacgcttcgcccccgatatatactgcatccgctccgtagatcacagcaatttttaatacttccagactgctcgccggtatcagtaactccggtcttctcatattctcgttcctctctattctcacacgcatgcatcgcatcttcatgcttcatgtaatcccgcacggattccgccatcttcccatcctgcgtaatccatgccgtccttaacgccttgtgctcaaggtgatgccatctcccaccgggagcaccgcggtcaccagttcttcactgtgcgtcagcgtgtacagatattcccgcatgcgcttatgaatcgtgcggttccgccttgtaaccgcgaaccttgattcgatcacatcgccgtcctgcagcacattgtccgacaccagcacgccgtccttcgccagaagacgcagaatctccggcaggaaatgaatgtactgcccttttgccgcgtccataaaaataaaatcatacggaccttccagcgtctttaacacttccgcggcatcgccctccagcagcgcaatctgcgcttccttcccggctctcttaaagttctccctggcaatcggaatccgcttttcataattctcgatcgttgtaatctgacacggcacaggatcgtactccgccataaggatggcggaaaatcccaccgcagtcccaacttctaaaatacgtgccggcttcttcatggcaagcagaaacttcaaaaagctctgcatctccttccgaataatcggcacgtaatcggctgtcgcttcccgctcaatctgatcgagcatcgcagtatttcccgcatccagagaattgatataggtcacaagtctctcatctactatcacggtgtctcctctgcatcccctgcatcttctgcggtctgtgtatcgtccgtctcatctgtcagatccgccgccccggtattcccggtgtctgcggtatcctcggtgtcctcggtactttccgtatcaccggcatccgctgccatgatcacgaacatctcccgcgcagtcatcgaggtatttaacgtgtaaacacccggtttgagttttccggagtaagcagatagtttcagctgggcatagaacagattcgcatcctccaccagcccctcttcttttaacatctttccgatatcatgctccgacatatccgccgtcacggatacggtcacatccctgcccggagtttcgtccaccgggctctcggtaaacacccggtatccgaagtcatagcagtaggagccaagttcaatcagtcccaccacaacaagcagtgcaaccaggatggaaaagctgatactgacaaatttgaaaacgactttgttccatttcataatcttctacacttccataattatcggcataatcatcgggcgtctcttcgtctctttccaaacaaaatcccccagagaatccttgatctccgtcttgatcttgccccagtctgtaatgcctttatccatacagtgctgcattgtatcatcaagcagatgcttggcatcgtccatcagtccctctgcgccgcggacatagacaaatccgcgcgatacgatatccggtccggcaagtacctgtccggaaccgccctccagtgtgagcacgacgataatgataccgtcctctgccagatgctggcggtcacgcagcacgatattgccgacgtcgccgacgccgagaccgtccaccataatggctccggtgtgtacgcgtcctgtcactgccgctgcctcatcgtttaactcaagcacatctccggaggagagcaggaaaatattctctttcggaattcccagctcctccgcaaccttcgcctgcgcgatcagatggcggtactcaccgtgcaccggaatcgcatacttcggctttaccagggaatagatcagcttgatctcctcctggcaggcatgtccggaaacatggacatcctggaagattacgttggcacccttcatcgacagctcgttgataatgcgcgatacagctttttcatttcccggaatcggattggaactaagaacgatcgtatcgttcggcttgatcgtcactttcttgtgcacgccgcttgccatgcgggacagtgctgccatcgcctcgccctggcttcccgtcgtgatgatgacggtctgctcatccgggtaacgcttcagctcctcaatgtcgattaacgtattgtccggaatactgatatatccaagttcggaagcaattccgatgatgttgaccatgcttcgtccctcgaccaccactttgcggccgttcttatacgccgtattgatgatctgctgcacacggtcgacattggatgcaaaagtcgcaataatgatccggtgattcttgttgtccgcgaaaatctcatcaaatgtcttgccgaccgtcttctccgacatggtaaatcccgggcgctcagcgtttgtactgtcgcacatcagcgccagcacaccttttcttccgatctcaccgaaacgctgcagatcgatggcatctccgaataccggtgtgtaatccaccttgaagtctccggtgtgcacaataatgcctgccggggagtagatggcaagcgccgccgcatcctgaatactgtggttcgtcttgatgaattccacacggaagcagccgagattgatatgctgtccgtattttacgaccttgcgctttaccttggtgagcatattgtgctctcttaacttgtgctcaatgataccgttcgtcagcttggtagaatagatcggcacattgatctctcttaacacataagggattgctccgatgtggtcctcatgaccgtgtgtgataaaaaatcccttaactttgtcaatgttgtccttcagataggtgatatccgggatgaccagatcgattccgtacatgtcatcctccggaaaagacagaccgcagtccacaacaataatactgtcctcatattcaaaggcagtaatgttcataccaatctgctccaatcctcctaacggaatgattttgagctttccactattctcttttttttcttttttcaaaatattacctccattattatttgtctcttaaaatgcaatgtccgcgtcgtcgagcagctctgcaaacacttttccgatggcagaaagctccgtgtcgtcttccacaagcacgtagacagattcctcgtctttcgtttccacctcttttaaaatatacgcatcacagtcgccgtcttcctcttccgtcgccagaaggtagtgcgtgccgccaacctttgtctcctcaaccacgaaaaacgcgagcgattctccggtgtccggatccacaaactttactttttccatatttactccattcaatgtttctgaaacgcgagtgaatccagatatccctgcagaataaacactgccgcgatctcatccacatactgtttgcgattctctctgcgtattccactctccatcatgtgccggtctgctgcaaccgtcgtaagtctctcgtcccacaggacgacagaaagctcggtgcggcgctccagcatctgtgcaaactctttcgtcttctcgcaacgctctccctcggtattgttcatattcttgggatagccgagcacaatgcgctccacctgatattctgttacaatctgttctattcttgccagcgtctgacgcagcttgttcggagactgtcttctcacgatctccagtccctgcgccgtcaacataagttcatcactgactgccacaccgacagtcttcgagccaaaatccaaacctaatatccgcatcttctattcccagttgttattcctgatgtaagccttcagcatctcctctaccagctcatcacgttctactttcatgatcaggcttcttgcattattatgactggtgatataagtaggatctcccgacataatatatccaacaatctgattcaccggattgtatcccttctccataagcgcacgataaacaatcgcgagcacgtcgctcacgcgaagttccggtcctttttccactttaaaatattgtgtgttattgatctcctgcatatttgtcacgcccttatatctgcccggactttaaagcggtgctgccagccaccgctctcttgtcgaaaaagcattgctgtttttattctaatatagtttgtcttaaaattcaactaaaagatagacgtcttctgttaattgtgtctttaaggtgcccgtcacaaacgtgttagaaaggtctttttttgtctctaccgccactttcacatactcttttgtgtacccgatgtagtaacgctttccatcatataaaaactcttcctccagaagcgccgtcacctgtctgccgagataataccggcggaactcctccgacatcctgtgaccgagtgcaagcagtttttcgctgcgctccttttttaccgcctccggcacctgatccggcattgccgccgccttcgttccctctcttctcgaatactggaaaatatgcatctcatagaaatgaatccgctccagataacgctccgtcgtctcaaattcctcgtccgtctcccccgggaatcctacaatgacatccgttgtgattgccggatgttcaaaatacctgcgcagcagcgcacagcccgcctcatattccgccgtatcgtaccgccggttcatgcggcttaacaccgtatcgcagccgctctgcaatgacaggtgaaaatgcgggcagatcttcggcagctccgagagtctttttgcaaacgcgtccgtcacgatacgcggttccaggctgcccaggcggatccgctcgatcccctccagctcatgtaccgcctcgatcagatgcagcagcgactccccgttgtccacaccgtaggaactcagatggattccagtgagcaccacctcgcggtagccgctttttgccagcgtccgtatctcctgtaagacgtccggaagctccctgcttctgacacgccctctcgcaaacggaataatacagtatgtgcagaactgattgcagccatcctgcaccttgataaacgcccgggtgtgctctgccgtgcgcgaaagcgacaattcctcgtatgcctgcttctcgtgattgatatccgccacacacgccatcttgcggtgggatgcttcgtattcccgaagcagcggcaccagctcatgctttttattattcccgatcacgatgtcaatcgactcatccacgagagcctgtgcctccttggtctgcacatagcatccggctcccacgacaatcgcatccggattctgctttttcgcccggtgcagcatctgtctggacttgcgatccgccatattggtcacggagcatgtattgatcacatagacatccgcatactccgaaaacggcacgatctcatatcccgcctcctccaaaatctgctgcatggcttccgtctcatatgcattcactttacaacccaaattatgcaatgctgctttcattcttgtttcctcatttctgtattgctttttgttcacgctttcttatggtttcatccgctttttgtgttgacttttccacgaaaaactattactataaaactatcttgaaacagataatcctaaggaggttttttatcatgaaaacagtacagatttcccttaactcgatcgacaaggtaaagtccttcgtcaatgcaattacgcagtatgaatatgattttgatctgatctctggcagatacgtcatcgatgcaaagtccatcatgggtatcttcagtttagatttatccaagcctatcgaccttgcaatccatgcagagaacaacatggacgagattatggagactttaaagccatacttaatctaattcatacataacaggggtacacgccgcgggatttcccgcggctgtttttttatgtaacaggagacttcgttcctattacataaacccgcaccgcgaggatgcacatctacgcctcgatgtgaattacctccaccgtatcgatggcttcctgcatcagcgcatcgatcttctcggaaagctttctctcatcattgtgaatcacgtttaagctcggctttgtcaccgggtgctttgccacgaaaatcgtacagcagtcctcgtaaggaaggatggaggtctcataagcgtcgatcttctccgagatctccacgatctcctgcttgtcaaatccgatcagcggacggtaaaccggcatcgtacatacctcattggttgccgcgagcgactgcatggtctggctcgccacctgtccgatactctcccccgtaatcagtccgagacacttgttctcttttgcaaaatgctccgccagcttcatcatgtagcgccgcatgataatcgtcagctcctcatgcgggcactgttcgtaaatatataactggatatccgtaaaattgaccacatgcagattgatcggtccggtatatttggaaatgatctttgccagatccacgaccttctgcttggcgcgctccgatgtataaggcggcgcatggaaataggttgcatcgatggtaacaccgcgctttgcaatcatgtaacctgccaccgggctgtcgattccgccggataagagcagcatggcttttccgtttgttccgaccggcataccgcccggtcccggaatgaccgtcgagtacacattgatctggttgcggatctcgatattaaacatcacctgcggcttgtggacatccacgcgcgtctccgggaacgcctctaagatccgctcgcccatctgggcattgatctccatcgactccagcgggtaattttttctcgcgcggcgcgcattgaccttgaacgtaaaatgcttgtccgggtatacctcgtcgatatagcggatgacttcccccgccagcgcatcaaagccctcgtcctccagcagcacgaccggacagattcccacgatgccaaacacatgctgcagtgcttccaccgctccatcgtaatcgtattcgccttccatctctacatagattctgccctgctccttgcggatatggaacgtgccgtccactttctttaaggcatgattcatctggcttaccagagcatcctcaaacaggtagcggttctttcccttgatggcaatctctgcatatttaatcaaaaatgctttatatgtcatggctctctcctttactttctggtgaactttctgcggaacggaatgatctctttcattttttccaccgcgtaatccacttcttcttccgttgtattgacacagaagctgatccggatcgtggactctaacttctgcttcggcagaccgatgccctgcaaggtgcggctgggcgccggcttattggacgagcatgcgcttcccgccgacacatagatgccgtattcttccagagaatggagcatcacttcactgcgcacatcctcgatcgtgacactcacaatctgcggcgcagagtcccttcccgttctgccgtttaccgtcactcccgggatctgtgtcacctcatcgataaacctctgcttgatctcatacatatgaccgatcttcgcgtcaaagttctcatagatctccgccgctgcctcgccgagtgcagccacgcccggaacattctccgtgccggagcgcattcccttctgctgaccgccgccgtagatgatcggttttacttttaccttgtcgcggatatataaaaatccggttcctttcggcgcgtggatcttgtgtccactcaccgagagtagatcaatccccatctttttcgggcagatgcggaatttgccgtacgcctgaatcgcatccacatgaaacagcgtgtccggattcttcgccttgatgaccttcgccgcttcctcgaccggttcaaccgcaccaatctcgttgttcaccatcatgatggacaccagcaccgtatcttcccgcactgcatcccgcagttcctccagcgaaataataccgtcatgatccacagacaattccgtgatctcatagccgagttcttttaagtaggcaagcggcgcctgtaccgacgcatgctcaatcgctgtcgtgatgatatgctttccctggcgcttgtttgccagcgctccgccgatcagcgccatattgttcgactccgtgccgcccgacgtaaagacgatctccttctcatcgcagcggagcgtcttcgcgatctgctcttttgcttctttaatataatcctccgccgtctttcccatgttgtgcagggaggacggattgccgtaatcttccgttaagatctgcaccatcttgtttttggcgcgctcactgcaccgggtggtggcagaattatccaaatatgcttccatctgttttaaaaccatgcctttctaacaaacgccgacgcagaatcacggctgatcccgctcttcttccgcttccgacacactctcgatatgatacatcagaatagaaagggttgcaagtcccgccgtctccgtgcgcaaaattctttttccgagggacaccagatacatcccctcctcttttgccagcgcaatctccgacggatcgaatccgccctccggtccgataaaaatgccgacgctctgccccggtgcaatccgctccatcacttcccttgtggccgccatgccgcgctcattctcatacggcagcagcaccacgtcgagttctcccgccaatgcgactgcctcccggtaattcaccggttctctcaccaccggaattctgctgcgctttgactgttttgccgcactctttgcaatctcctgccagcgcgccgtctttgccgccgctttttttgcatccagttttacgacgcagttcttcatcgccaccgggatcacctccgcagcgccaagctccactgccttctggatgatgagctccatcttgtcgctctttggaagtccctgaaacaggcagatccggcagggcagttccgtatctaaagccgtctcctccgtgatgcacacctccaccacgttctctgcgatccggtcaatcgtgccgaagaaattcctgccggatgtgctgctgatgcgcactttttccccgcatttcatgcgcaggacattgcggatgtgatttacatcgcttccctcaattatcaccagatcatttgcaatctgctcgtcttccacaaaaaactgatacataaactcctcatttccgggctgcctgccattccttcggatcatcttccttttttcggatcgtcttccttattccggctttctcgccgtaatgttcacccactcgccctgatgattgatctccaccaccgtaagtccggccgcttcaatcgcttcttttaccgcgttctccttgaaatcgatgatgcccgaggtaataaaataaccgccgcgtttcaagcgtgccggaatcaccggtgccatcggaataatgacatctgccagaatgttggcaaccacaatgtcgtattcctccgtgccgactttctcctgcagtgctgcatcatcgatcagattgccgacataaaatgtgccaagcgaaggatcgagatggttcacttccatattctcatgtgtggaggtcatgcagtccggatcgagatccgttccgactaccgcggacgcgccaagcttcaacgccacaatcgataaaatgccgcttccgcagccgacgtcgagtaccttcggcgtgcggttttccgatgtgtacgcatcgttcccgcggatatactttaacagctggcgaatgcacagctgcgtcgtttcatgcttgccggttccaaacgacacacccggatcaatctcgattaaaaatttgtcggcatcctccggctttaattcctcccaggtcggtttgatcaggatgtcatcaatatagaaggaactgaagaatttcttccagttgttgatccagtccagatcctccgtctggtcggaggtgatcacgccgcttccgacatccacgacttttcttaagtcctccaacgcctcttttacctgctttaacagttcggtgcggtcctcgccgtcatcctcaagataaaagctgacgtggctcacaccgtcatccggcggaagctccggcagaaaatcgatgaacatatccgcctgatcttccttggacagcggaatgttatcctcaatctccactccctcaatgccaaggtcggctaacatcgcactcatgtagtcctccgccgccgtcgttgtctctatcgtgtatttattccatttcatatgcgttcttccttcccttacgattccgttcctaaaaatcgttatttatcttatcatacaatcgcacatcttgcaaacaatgttccgccccgctctccgcctgcgggaggtattcctgatgcagtatacaaaacacattctttgcctgttgcacaaaaaacgggccgcggcacctcttttgcgccggacagcccgtccttatttcttcttacaatacctttgataaaaactcctgcagtctctggctctttggattgccaaaaatctcctgcggggttccctcctcctggatcacgccgtcgttgatgaacatcacacggttcgcaacttctctggcaaatcccatctcatgtgtcacgaccaccatcgtcatgccatcctccgccagttcctgcatcacggcgagcacctcgccgaccatctccggatcaagcgccgaggtcggctcgtcaaacaggatgatgtccgggtccatcgccagcgaccgcacgatggcaatgcgctgcttctgtccgccggaaagctgcgcgggatacgcgcccgccttatccgccagaccgatgcgctttaacagctccatcgcgcgcgtattcgcttcctcttttgtcatcttgccgagttttaccggggcaagcatgatattttccagaatcgtcatgttcggaaacagattgaactgctgaaacaccatgccgatcttctcccggacatgattgatgtccaccgacggatccgtcagatcggttccctcaaacagcacatgtcccgccgtcggaatctccagcagatttaaggagcgcaaaaacgtggatttaccacagccggacggtccgatcagcgccagcacatcgccctttttgatcgtcgtcgagattccttttaacacttcatgaccgtcaaaagacttgtgaagctcttttacttccagaattaccgtattatcgctcattgcttctcaatctcctttccaacagtccaactgccttgctcagtcccatgacaatcaggaaataaatggccgcgaccgcaattaacggcatgaacgcctcgtacgtcacgcttcggatgatgtctccgcccttggtcagatccatcagcccgatgtaaccgctgatcgaagtctccttcaacagactgataaactcattgcagagtgccggcagaatatttttgactgcctgcggcaggatgatgcttaacatcgtctgcttataatttaatccaaggcttcttcccgcctcaaactgtccgatgtccaccgccataataccggaccggacgatttccgccacgtaggccgccgagttcagtccgaacgcaatgactgccacgaacagttttcccgtattgacgctctggaaaatgacataataaataatcagaagctgaatcatgaccggcgtaccgcgcacaacggcaaggtatgccttgcagagtgcatttaagatcgtaaacccgccgtttctgtcgtggttggttcttacaatcgcgatcaaaaatccaaacacaataccgatcattaccgcaaacacggtgatgatgagtgtatttaaaagtccctttaacaaataggtatatcggctgtccttgataaagttatcataaaacttctctgctatccctgtcttctctgctgtgacagatgtatctctcacgatgatgacctgcttggattttgcataggtatccgtgaaattcacattctttttgcgttcctccgtcaccgtaaaacccgatgcaccgatgtcgacttttccggtggacaccgcaggaatcacggaatcaaacgccatgtcctcgatctttaactccatgccgagtttgtcgcagaccgcctgcataatatccatgtcgattccggtgatctttccctcttcatagtattcatacggcggaaactccgcattcgtaccaacggtaagcgtgccgttcgtgcgttccacatccagaatttcatacggatactttccaatctcctcgtccgttccggtataattcttcgcaatgttatcgagaacaccctcgtccttcagttcgcgcagcgtctcattgacctgatccacaagtgcctcgttgccctttgcgattacgaacgcatagtcctcctcaacaaagttctcctcgagaatcttaagcccttcgttctgctccacaaatgccagcgccggcaattcgtcaataatcacgcagtctaactttccctgctttaatgcctgcacggcatccgcgcccttattgtaacgctctactaccgtgcccgagccgtccgtctcatagtcgctgaccatgatatctccggtcgtgccgagctgtacaccgatatgctttcccggaagatccgcaaccgacgcaacagaaccgtcgccggatgcctgtcccgcctccgtgtcgctacctatcgccgtcgccgcggcaacctgtgtgccgtaacctaacagcgtcgaaaaaaagaccgctccggcaagcagtatgccggataatttgattgctgtgtttttcatcgtactatctacctcatgcttccttatctctcacatagatactgcataaatatacatccggcagtcagtataacacagaacgccccgcttgggaagagattcattcaatctcgcagatccggtagagataacttcttccctgctttccaatccgctccacaatcaatagatccgtcagaatcaagagcaccgtctgtgccagccgcaccggaatcttcgcgcatgccgcaaaatcctttgcagtaaactcctccggaatctcataggggatgaactgcatgtagtcctccctccggtccacacgcacttcctccacgaaggtaagcggtatccggtcgaagcggtcgcttcccttctttttgtcccggctccagccgtttaaccgacggtattcctccatgtcaatgagatccagccgtagtctcagattcggatctttcagaaacggccggatcttatacaattcgatgaatgcctggtatgcatttcccttcttgggcgatttgcgcccgggagagatctcccccgtctcctcatccatccagtgaagccacttcacatgcggaatcggatagacgatggtcaccgggtataacggcagaaatgcggcaagtttccgccgcatattctggaacgaccgcgtctgaatctcgatcactgcctccccgtcaaaaatatccgcaacaaaattctcaatcgggatctcatgcatatcctcatccggtgcataataattcttgagcactgcatgtaccgtcttctccgagagtgtgccgattccaagcctctgccgctcgattccaatgactctgcccctggcacgctcaaaacgttctgtatcaatgcacatatctcatcctcgctgctgtgctttttccggaatgatctgccgcttatttcgggtgcttcatatcctttaagatatcaaagcagtcaaacgtgcggaaatagtcctccggcgtctcggcacggcggatcagctgtgtcgatccgtcttccttcagcagcacctccgctgattttaattttccgttatagttgtatcccatggaaaaaccatgcgcaccggtatcatgaatcaccagaagatctcctatgtcgatcttcggcagcatccggtcaatcgcaaacttatcgcaattctcgcaaagggagcctgtcacatcatacttgtggtcgcacggcgcatcctccttgcccatcaccgtaatatggtgatatgccccgtaaattgccgggcgcatcaggttcacggcacacgcgtccacaccgatgtactccttgtgggtatgcttctcatggatggccgttgtcaccaggcagccgtacggtcccagcataaaacgtcccatctccgtatagattgcgacatcgccaagtcccgccggaactaagatctcctcatatgccacccggacgccctctccgataacacggatgtcgttcggcgtctgatccggtgtgtacggaataccgacaccgccggagagattgataaaacggatatcgcatcccgtcttatcgcgcagttccacaaccagttcaaacagctctctcgcaagctttggataatattcgtttgtcacggtattgctggcaagaaatgcgtgtacaccaaaatgcttggcgcctttttcctttaagatcttgaatccctcaatgatctgctcatgggtaaaaccgtactttgcatcacccggattgtccatgatgccgttgctcatcttaaagacaccgcccggattgtaccggcagctgatcgtctccggaatcttgccgatcgttttctccagaaaatcaatgtgtgtaaaatcgtcgagattgatgatcgcaccgagctcattggcaaatgcaaattcctccgccggcgtatcattggaggaaaacatgatgtgttttccatcgaagccctgggaatccgcaagcatcagctctgtcagcgacgcacagtcgcatccacagtcatattcttttaaaatgtcaagaataaacgggttcggggttgcctttaccgcaaaatactcccggaatcccggattccacgcaaacgcttccttcactgccttcgcattttcgcggattcctttttcatcgtagagatgaaaaggcgttgggtatttttttacgatttcctctaactgttctttggttacaaatggtttcttcttcatacggttcttcctttcttcctagaatacgacttgtatcaaaaacatataaagtgccgttccggcaccaatgctgagcagattgttgcgcttccatacatgaagcacgatgaccgccgccacggcaataaattccggcaggccgaaaggcgccgcaagcaccgacacgtttttcaggcagtagatcaccagcattccgatgaccgccgggggtagcactctccccagataccggatgatcggcggaatctcttttcctttcgggaaaaacagaaacggaatcagcctggtaaaaaatatcgttcccgccacggtaaatatgatcgcaagcgatcttccaacacttactggcactccggctcgcctccttcctttccgtcctccggaatcattttatcgaatatttttttgcaagaaagcaggatgaccatgacgcatatcatcgtcggaaggataaaattgtccgctccgaacaccagtctgcacaccagtccacataccagcccgatcaccacgctcggacggttctgcttctccatccactgttccaccataattaccacaaacaatgccgtcatcgcaaagtcaatgccctccgtggagaacgggagcacatttccaagcagggcgccgatgccggagccgatgatccagtaactctggtcgagcacggcaatcgcaaacaagaactgctcctccttcacatctttcggcacttttgtgacgaagaaaagcgagtaggtctcatccgtcagggaaaagatcatgtagagccgctttttccccatcttagaaaatcgttccagcagtgacagtccataaaaaatatggcggatattcaccataaattccatgaaaatcacattgaggaggctgacgcccggcgcgaaaaagttgactgcaagatactgtccgctgcccgcatagatcaccaggctcatgagcatcgcccacaagaagttgtaacctttttcctgtatcatcactccgaacgccatcccgataaacagatagccggtgagcaccggtaccgtgtaaggaaacgctgcccgaaatgcacgtaaatatgttcctttccgctcgacttgtttggttttcatttttttctttcctaatcccgcaaattatgctatactttttctagttatacattcagtgaagttgttttcaagggagttaccaatgagtattacgatcttaaattatcacgatcaggcatttgtggatcagatcaacgccgaggctgctgcccgcgctgaagcggagagagctgccgccgaagctgcaaaagcgcaggctgcaagttctgacttttcttccgttttaacgaatgccaccgacgcctactccggcagcacgacctgctccgaagacctttccgccatctttgatgaagcggcgaacacctacggcgtctcctccactcttttaaaatcaatcgcaagagcagagtccaattttaatacaagcgctgtcagcagcgccggtgctgtcggtatcatgcagctgatgcctgccaccgcagcatctctcggtgtcacagattcctacgatgcctaccagaatatcatgggcggtgcgaatctgatctcccagctgcttgccaggtacaacggcgatacctctcttgcgcttgcggcatacaacgccggcagtgcaaatgtcgataaatacggcggtattccaccgtttagcgagacacagaattatgtccagaaggttctctcctatatgggaagcgatacgaacaccgtcgcatccgcatccacttcagagacttccgaagatattgcaacgacggtaagcaattttatcgccgcaaacaacatcagccaggacacggtagagaagctgcttacgcttcttgaggtgttaaacgcttaacaattacatttcatgcaaccgtaacacatgagaatcctgcctgcaggattcttttttctgtaactggaaacttccgttcctattacagaatatcatccctctgcctgcgtccctgtaatcgtctcgatctgctcttccagatagccgttgaactccgtcataaaacggcttaccgtcctcacatcctcgacggaatagcgcgccagaaattccatatcgcgcttctcccatcgctgatgccgcttcgcatgctcatcaaacaaaagtctgccctgatccgtcagcttgaaatatacttcttttctgttcgtctccagcgtatatttttcgatcagccctttggcaagaagcttcttggtcatcttgctgatcgcgccgcgcgtcatccccatgtgctccgccaccttcgtgacgttcggtagttccagccttccgatatagtcaatacagtgcgtctccgaataaccgtattcatccaggcactggttttccgtcagtttggaaagcatatcctgccgctccagcatgagcgcgatttcttttaacagctcttcccgatctttcatgcagactcttcctttttctaacatggtattttgttcccagttcctactgtatctcattattgtttccgtgtcaacaatatatttcttttacctgccgttaatgatgccgtagcactccgggcgtctgtcgcggaacagcccccattccagccgtctggcatccagttcgtccaggtcatattcctgcaccagtatctcttcctcgtcgcgccctgcgcccgttagaatttctccggtctcatcggtcaggaaagacgatccgtaaaaaacaagcgcagaacgctgaccaccgttttcctcacagggttctaccgtctcctccccgatccggtttgccgcaataaccggcatcagattggctgctgcatgtccctgcatgcagcgtctccagtgcggcatactgtcgcactctaagatcggctccgatccgatcgccgtcggatagaaaagcagctccgcccccgcaagtgccatgcagcgcgcgctctccgggaaccactgatcccagcagatccccacaccgattctgccgtagcgcgtagaaaatacctggaatccggtatcccccggcgtaaaatagaacttttcctgataatagtgatcgtccggaatatgtgtcttgcggtaaacgccgagcaccgttccgtccgcgtcgatgcaggcgatggaattgtacaagttattcacatcccgctcataaaaactgatcggaagcaccacgccaagctccgcggcaagccgcatgcccatgcgcaccgcatcgttctccatcacaggcttcgcataatgataaaagtcataccggcgctgctggcaaaaatattccctctcaaaaagttccggcagaaggatcacatttgctccctctgccgccgcctttcgcaccatggctttcgccttttttaaattctcctccaaagatgccgcacagcgcatctgaattgccgccactttcactttgttcatgcttttttcctcattttgtctctgtcctctttgtcactgctgcgtttttgttgctgcatttttgcagctgccccacttttaccgcagttcctcttttaacacgctcacttttttgccgccgggatctgctgtgtaatacagtggatattcccgccgccgactaaaattgcacgcgcctgcaccgaaataatcttccgccccggattccactgcgcaagcagtgcggccgcgcgcctgtcgctctcctcattctccccgccaaacgccggaaggatgactgcctcgttggaaaaataaaagttcacgtaggatgccgcaagacgctctcccgcctctcgctcctcctccccctcggcaaacgaataacctgccagttcctcctctgtaatgcagaccggatgatcgggaatcggaagcttgtgaatgacaagctttctcccgcgcgcatccgtctcgccctccaggtacgcaagcgtctgctgtgaaagcggatactgcggatctgtttcatcgtccgtccaggcaagcaccacctcgcccgggcgcaggaacgcgcagacgttatccacatgttcattcgtctcatcctgatagattccacgcggcagccacagcactttttctatgccaagataagttctaagcttctcctcgatctcctcgcgcgtaagccccggattgcgccccgcgctcaaaaggcacgcctccgtcaccagaagcgtcccctcaccgtcgctgtgaatcgatccgccctccagtacaaacggcgcggcatcgtaacacgcatagccatactttgcggcaaacgcctttgcaaacgcatcgtccaacgcccaggatgcatacagtccgtccaccgatcctccccaagcgttaaatgaccaattcactgcccgcatcctgccggcgccgtctttcacaaaggtcggcgccacatctcttgcccaggcatcgtctgtctccagttcaaagaccgtcacccgctttttccacggcgcgtcctcaccggtcagcatctctcgcgcggagtcaatggcatcccgcccggctgccacatatacgttttcactctgcgcaatcgctgcaatcacatcccggaatgcaatccgcgcatcgcgtgcgccgtaaatccaggaacccgggcgcgacggccagatcagaatgcagccgtcatgcggttcgtactcccccggcataaaaaatccgtccgcctgcggcgttgtcattctctcttttggatcttctgcacacttttgcatctttttctccatttcctctaccctcatccaagtcatcttcccttgtcccggatgtctttcaaaaccggttatgacaaccgccctttgaaatcttcatagccgaactgctttaacatctcaacctccccgtcttcccgaagcattgcgatcgacggaagcggaattccattaaaggtattattcttcaccatcgagtagattgccatgtcctcaaacaccagacggtcgccgatctgaatctcatgtgtgaaactgtagtccccgatgacgtcccccgccagacaggtgagcgaggacagccgataggtgtatttctgctcccccgccgcaaatccgtcccgaagcggtggacgatacggcatctcaagaacgtccggcatatgacacgccgcagacgcatccagaatcagaatatccatcccgttgtgtacaatatcgcacacttccgttaccagatatcccgcatttaaggcaaccgcctcgccgggctccagatacactgcaagtccgtaggtctccctgatatagccgataagcttctttaaacgctctatctggtaacccggtctggtaatatgatgtcctccgcccaggttcagccaccggacctgttttaaataagaagcaaactgctcctcaaacgcataaaacgtgcattccagatcatccgcgtcctgctcgcagagcgtgtgaaaatgaagtccctccacatcctccggcagttcatagcttccatcctcctgccgtctcatgccaagtccggcaagtcctttctcaaacgcctctcttgtcatgccgagtctggaaccgggcgcgcagggatcatagatcgcatgtccctcctgcgtggaatactccggattgatccgaagtccgatgctgacacggtgctccgtaccactggcggcattccgcgccgccaccttctccctgtgtctgccatactgcgcaaaggaattaaaaatcacatggtcgcagagcgtgaccagttcctccatatcgctgtccttgtacgccggcgcaaacacatggttctcacgccccatctcctctgcgccgagacgcgcctcgtagagtccgctcgctgtcgtgccgctgatgtattgtccgatcaacggatagagcgcatatgtggaaaacgctttctgcgccagcaggacatggcatcccgtgtcctgctccagattatgtaatatcgttaaattctcttttaattttttctgatccaccacatagcatggggttggaagttcactccacttcattgctctcgtctctccctgtccgtgtcctactctttttgcaaacggctacgctaccgtcttggggttctcatcgacaacccacggcagtccgtactggttcagcatatccataaacgggtctggatcaaactcttcgatattaaagacaccgtccttatcccacaccttatctacgacaagtgccgcgccgatcattgccggaactcccgtcgtgtaggagatcgcctgtgagccgacctccctgtagcactcctgatgatcgcagacattgtagatatagatcgtcttttccttgccgtccttcttgccggtaaaaatacagccgatgttcgtcttgccaacggttctaggacccagtgacgccgggtccggaagcaatgcctttaagaactggatcggcacgatctctcttccctcatactggatcggggaagtggagagcattccgacatcctccagacactgcatatgtgtcagatagctctgaccgaaggtcatgaagaaacggatgcgcttgactcccggcacattctttgccagagactcgatctcctcatgatgaagcagatacatgtctttctcgccaacctgtgggaaattatattctcttttaatttccatcggttttgtctctacccagtgtccgtcctcccagtaggagccgtttgcggatacctcgcggaggttgatctccgggttgaaattggtggcgaacggataaccgtggtctccaccgttgcagtctaagatatcgatgtactcgatctcatcgaaataatgcttcagcgcataggcggtaaacacgctcgtcacgcccgggtcaaagccgctgccaagaagcgccgtgatgccggcatctgtaaagcgtttctgatatgcccactgccaggaataatcgaagtacgcggtaaagcccgcctccttgcagcgcttctcataaattgcacgccacgccgggtcgtcggtatcttccggttcgtagttcgcggtatcgatgtagtccaccttgcatgccaggcaggcatccataatcgtcagatcctggtaaggcagcgccacatttaacacggcatccggcttgtagtcacggatcagtgcgatcagttcatccacattatccgcatccaccttcgctgtcgtgatcactgtatccgtcgttccctgcagcttttcttttaacgcgtcacatttttcttttgtgcggcttgcaatgcagatctccgaaaaagtcttgctgttctggcagcatttgtgaattgccacccctgctactccgccacatccgataatcaataatcttcccatctacttatcctctcattctgccgtcctgcggctgtattttctatttttatattatttatatcattctgccaacggatgacagaacgctccgctgactgtcccgtcagagtccgttctgtcccgcatctgccatttaccttctgccttcctcttcctcaagcatatcctcgacatattttggcagcataaacgctcccttatgaagattggtcgtataataccaggtcttgatcccgcgcgctttccagcgctccacattcagatccgtcagcgggtgatatttttttgacgcaaatccgaacagccagtacccggaggaacaggtcggaatgtgcgcctgatacacacggctgatcgggaaactgtgactcgccttgcggtgcatcacgcggcaggactcctcatcctcgtcataaaaaggactgccgtgctggtagaccataatgccgtcttcttttaatgcgcggtaacagttcccataaaattccttggtgaacaatcccgccgtatgcccgagcggatcgatcgcatcattgatgatcagatcgtaggcatcatgctttgtgcgcagaaagcgcagtccatcctcgtaatagatattgacgcgcggatcttccagtccgcaggcgttgtccgggaaaaacttcctgcacacatccacgaatgtccggtcggattccacgacgtcgatctgctcgatctcttcataataggaaagttctctcgccacaccgccgtctcctccaccgatgaccagcacttttttcacatgcggatgcaccgccatcggcacatgcacaatcatctcatcgtagatgaactcatccttttctgagaagacgatgctgccatcggagcttaaaaatctgccgaattccctggattcaaacacgtcgatcctctgaaaatccgtctgctccccgaacaactgcttctccactttgaccgacaccttcacatgatcggtctgattatccgaaaaccataactccacgctctcttccaccttccccagaccgtatcgcacggtctgctgcttccttacgcctgttcttcctgactgtatgctcttccttaagagctattcttccggcggtcttatttccacacctgccggtcatccactaagacatttaagtgctccaccgccggatcttccgttccctgcatggagcagcccttctccttggcatagatgatatattcgatgatctccggcgtaatcatctcacccggcgcgagaatcggaattcccggcggatagcacatcacaaactctccgcagatctttcctgccgtctcccggatcggcatgcattttttctctgcgtaaaaagccgcctgcggtgaaacaagaacggtcggatttatatattctgtatttaacatctgtgcaggatccttggaatacaagcgtttgacgtctgccaacgctcccaccagccgctcgatatcctggatgcggtcgccgattgaaatgtaggctaagatgttggcaatgtcccccagctcaatctggatatcatactcatcccgcaacagatcatagacctcgattcctgccagaccgattccccgcgtgtagaccgagagcttcgtcacatcaaagtcatagacgcttccgccgttcaccatatccttgccgtaagcataatatccgccgatgtcgttgatctccgccctggcgtattccgccatctccgccactttgcggaacgattcccttccgcgcagcgccagatttctccgcgagatatcgagacttgacatcagaagataagacgcgcttgtcgtctgtgtgaggttgataatctggctgacatactcccagttgacatttttgccggttaaaagcagggaactctgtgttaagcttcctccggatttgtgcatggagacggacgccatatctgcaccggcatccatcgcgcagaccggaaggtcctccccgaaatacagatgggtgccgtgcgcttcatccacaagcacaagcatctcgtgttcatgtgccagcttcacgatggagcgcaaatcggaacagattccgtaataagtcggattgttcacaagaaccgccaccgcgcccggattctccagaatcgcccgctccacctccgagatctccataccgagtgaaatgccaagctttttgtccacctccggattcacatagaccggaatagcgccgcagagtaccagcgcattgatcacactcttatgtacattgcgcggcaggatgatcttatccccggcacgacagaccgacaacaccatgctctgcacggaggacgttgttcctcccaccataaaaaacgcgtgatctgcccggaaagcctccgccgccagttcctccgcctctttgataaccgacaccggatggcacaggttgtcaagcggcttcatggaattcacatccagactcacacatttctcccccagaagttccacgagctccgggttgccacgccctctcttgtgccccggcacatcgaaaggaacgactcttctcttttttaattgttccagcgcttcgtagaccggagcgcgcttctgggatcctgcttccatgattctcctcacattctgttttgatgctccctgccgcagtgcgcatgccgtccggcagagcttttggctctacaggaagcatgactttcatgctttcgcataacacggcatcttctgtagcacaagaaagaatcctgcccggagcgtttttatgtaatagggacgaagtttcctattacacaaaaaaagacagatgcctgtatgctgcgcacacatcacctgccttgtcacattctcatagtcatactttatgtaatctgtcctacatgctgcaaaaactattatcagagtctacgttggcatcttcgccagcaaatatttgctattactactcttattgaccgtttcacaagtgatatctctatcgcatacgattcagggtcctgcagtccttcgtctgcagtcgtcatcaacttataaaatttgagcttctaactcaatcaataacgtggatctctccaccatcggcagctgccccgcctgtccgtatgggcttaaccaatctcttggtgggcaaatatttgcatgaaaaagctttcgcattcatgtgatttgaagtataacacacacacttctaaaaagcaatgtatttctctggattcttatctactccctccactcccggaaaagtgcaatctctctgcggtatccctcatcgtcattcggagtctccagaataaacggcttgtccgaaagcagcggatgcgtcgccacacgccgcatcgcatccagcccgatctttcccttgccgatgcaggcatggcggtctttgtgcgaaccgcggtcgttcatgctgtcgttaaaatgtaccgcgcacaggcggttcagaccgatcacatggtcaaattcctccaggacaccatccagatctcccgcaatatcatatccagcatcccagacatgacaggtatccagacagatgccaagcttatcggacagctctacacggtcaataatcgcgcgcagttcctcaaagcttctgcccacctcactgccttttcccgccatcgtctcgagcagaaccgtcgtcgtctgctccggcgtgagcacctcgttaagtgcctccgcaatccattcgattccggcatccgccccctgtccgacatgggaacccgggtgaaaattgtagtaattccccggcgtgtactccatccggcgcagatcgtccgcgatcatctccttagaaaacttgcggatatcctccttcgctgcgcacagattcatcgtgtaaggtgcatgcgccaccagttttccaaattgctgctcccgcatcagttccagcagcttttccacatccgccggatcaatcgcttttgccgcaccgcctctcggatttcttgtaaaaaatgcaaatgtatttgctcccagcttcactgccatccgccccatcgccgcatagccctttgacgccgagagatgatttccgatatacatattcttttcctgcttccttctatctttctatttaaatcttctccaccaggatgccgtcccggtatgcctgcagcagcgcctccagatcacggatcgaagcgcgcagctcccttccaatgtccgtatccgccaccagcttgcgtcgcacgacatgctgcaccagaatcgtatgcgacgcgatatcgcttccgtcctgcaccgccttttcgaccgactcaaacggttcatgcgccgcaagcaccagaccgtaggaattatagatcagcgtatatcccgcaatccccgtcttcggctggtaggccttggagaatccgccgtcaataatgagcagcttcccgccgcattttaccggggactctccccgcttcgcctccaccggaatatggccgttgatgatatgtgcctccgcgccctcaagcccgaattccgagaggatgcggttgaccacctcttcctcctccagcaggcggtagtacgggttcttcggctcctggtgcgtcgctgtgtccgcgataaaatagcgctcaaacgtcgtcatttttgcttttccgaacaccggggaattctggttttcccagataaaccacaagatatccagcccctttttcttctccccgggatcaatcgcgtagtacccttttctcgcgtaattctccagcacatcgtagagcgccttgccggaatattcttttccgtacacatttactctggtaaaggttccgtcctcgttcatcggcacacagccgtggtagagcaggttcccgttgtagaccttgtacaggctgccctgtgtgaacaggaaacggacgtgacgctgtaatttttcacagttcaagaacgcctgcgtgatccgctccatgacgtcctcctcctccgatgacagttcatacggatgctcccagtcgatcgtcgggaagttcagatccttcatcgggtattccttcccctccacgcacaccgttcctttttcgatattgatcttgtccagcaaaagccgctcatccatcccgaactccgggtgacgcatgatcatctgtccctccagcttgaactggatcaccgtaatcgccttgtgcattttctcatccagcatggcgtcacgcacatcgtactcatcctcccggtaatccagcttaaagcaggtgcagggatccttgtcgtatctgctcatggcaagtctggcgagcggcaccagattgatgccgtatccgtcctctaaaaggttcagattgccatacttggcagagatgcggatcgcgttgcagatgcagggtctgcttcccgccgccgctcccatccagtaaatatcgtggttcccccactgaatatccacggaatggtgctgcatcaaggtatccataatcagattcgggtaaggtcccctgtcgaaaatatctcccaccacatgcagatgatccaccacaagcctgcggatcagattgcagaacgcaatcacaagctccggcgccctgcctgtgcggatcacagaccggatgatctcattataataagcttcctgatcggagacatccggtctgccggtcagcagttcctcgatcacatacgcaaaatctttcggcagcgcttttcgcaccttggatctggtgtattttgacgaggcgctcttgcagatgcggatcagccggtacagggagaccttataccagtcctccatattttcttctgtctttaacacctgctctagcttctgctccggataatagatcagtgtcgcaatcgctttcttctctcccgcactgatcgcattcccgaattcttcctcgatcttgcgcttaatcgctccggaaccgttccggatcacgtgctggaactgatcgtactcgccgtgaatatctgtaatgaaatgttctgttccctttggcaggcttaaaatcgcctgcaggttaatgatctccgtcgctgccgcagccacggtcggatactgatttgccagactttttaaataccgcagatctgtttccctatatttttccatatgttccccctcagaatatcaaaatcgaagatacctctcaaatagtaacatatccgcgcactgctgaccagattttgttcgttttctgccctgtataaaaatggaaacagaaaacgtttccacgctcctgttcccattcgatccatctgtatccgctttcaatctgccttatccgtctgcctgtccaatcagtctgcctgttccatcgttgcccggatcacatcctgcatatcataaaatcctgcctttttcccggcgaggaactttgccgcctccacagccccttttccaaagacgctgcgggaatatgcggtatgcttgaactcaatgacctcgtcgagtcccgcgaagatgacctcatgctccccgacgatgctgcctccgcgcactgccgagattccgatctcgtgcggatctctctttttgcgctcgctgcttctgtcatatttgtactcatagacatgtcccagcgcatcattcatggaatccgccagcgccagtgccgtgccgctcggtgcatccagcttctggttgtggtgcttttccacgatctccatgtcaaatcctgccggcgcaagaatcgttgccgcctgcgctaaaagctgcatcagcagattgattcccagcgacatattcgcggactttaatactgccacctgctccgatgccgcctttacctgctccatctgttcctccgacaatcccgtcgtgcacagaaccaccggaatctttttatccacactatagaccagaagatcgtccacggccttcgcattggaaaaatcgatgatgacatccgccttcacatcgcagacggaaatattcgggaataccggatagtcatttttgatcccgtcatagagatccactcccgccacgatctcaatctgcggatcctccttgcagattgcggagatgacctgtcccattttaccattgcatccattcatgattgccttaatcatcgtacgttatcctctcttctctgtactgcccgctccgcgtgccgcatgcagccggcggtgcagacacatactccggcggatggccttacggctcacttccgccggagtcatctgttcttttatgctaactttattccgtaatttttcatcgcttctgcaagcttcgcggcattctccggtgtcatctccgtgagcggggaacgaagcggtcccacttccagtcccatcagattcaatgctttcttcaccggaattgggtttacctcggaaaacagcgcatccacaagcggctgtgcctttaactgcagttctctcgcgcgcaaaagatcccccgcggagaaagccgcgcacatatcgtgcacatccgccggcgccacattcgaccacacggaaatcacaccaattgcaccgattgccatcagaggcaccacgatgccgtcctcgccggaatacaaatcaatcttgccgtccgttaagtacatcagcttggatgcctgagccagactgccggtcgcctccttgatacccacaatgttctccacgttcttaaagagtgtggctgcggtctccggcataatattgcagccggtacgtccaggaacgttgtacatgataatcggaagctttaccgcctcggcaatctctgtatagtaacggattaatccgccctgtgtcgctttgttgtagtacggggtcacagccaaaagtccgtctgctcctgccttttccgcctcttcggaaaggtgaatcgcctctctggtgcagttggaaccggtgccggcaatgaccggaacacgatgctttgcaaaacgcactgctgcccggatcacatcggaatgctcctccgtagtgagcgtcgaactctctccggtcgttcccacaatcacaatcgcatccgttccctgctcaatctgccattcgaccagttcctccaacttgtcgtaatttacctcttcattttccttcatgggtgtaacaatcgctacaccagcgcccttgaatatcgccatgccaatcctccgtttctcctatgttaatatatgcccatggtacaattttgcccctgtcagatcagagtcagaataaaaaagtaaaaaaaagccggctcgatgagccggtctgattcttctgccgcatatctgcatgccattatacagaaccgatagcgccccatctgcaaagatgacagtcataaagttcttagctttatgcccaagaaccagggcagcaggtgccttgctctttcggcatgctttccttttgctttccttcccctgtgcctgtcacatccggaaaactactcttaaagcacgcaacctctatcaaaatatgtatcatatagttaaaattaacatagcactatcaacaacggttgtcaataacggaactttcgattattcctccaaaaaatccaccttgctcaccgatacctcatatgccacccgcttttctgtctctaactccgagatctttttgacatattccctgctctggattctgccccacacctgcacatgacctcccacttcaaagccggaagcaaatctcgcatttctcccccagcagatacacggtatatagtctgactttccgtaggaacggtttaccgcaatcagaagatccgcaatctcccgtcccagcggcgtcttgcggtaaatcggttccttacagatatatccgtccagaaaaatctggttgctcttcatatcctcctgcagttcttccaaaaactccagttcccgcacaaacaccgataagacaaggcggttctttttctcctcatgccggttaaacgaccggaactgcccagtcacataaatgatctgtcctatgtaatcagcatttacgtcaatcagccgctcggatatcatcaatggaatgtagtccagataattgctcaggcggttcactgccacatccaccatataaaatccctctccgtacacttcgtgactgaaccggaaatcggatacaatctctcccataattgacacctggttgttttcaaaaattttatctgccatgaatctttctcccttcttacgaccatactcttttttgcgttgttcttctttttcgttccgttctgctggtatgatctgcctgacacattatttttatcacgtccggtgccagaattttcatgcaacatgtcgataacaaagggaatgaaatggcggattttgtcgcatgtaccacttgcgcatctccgaaaatatgataaaatagattggttacttttttagactaggtttcacacaggaaagagagattttgtatatgaaaatgaaacgtgaagatgtccgtaacattgcaattatcgcccatgtcgatcacggcaagaccactctggtcgatgaattgttaaaacagagcggcgtgttccgtgagaaccaggaggttcaggagcgtgtcatggactctaatgatattgagagagagcgtggtatcacgattctttccaaaaatacagcgattacttataaaggaactaagattaacgtcatcgacacccctggccacgctgatttcggcggcgaggttgagcgtgtccttaagatggtaaacggcgttgtgctggtcgttgacgctttcgagggcgttatgccgcagaccaaattcgttctgatgaaagcgctcgagctttctcttccggttatcgtgtgtctcaacaaagtcgaccgcccggaggcacgtccgaacgaggttgtggacgaagtgcttgagcttttcatggatctggacgcttccgaggagcagcttgactgcccgttcctttttgcttctgcaagagacggctacgctgtccgcgagcttgacgatctggtgaacaacaaaaaggatatgactccgctgttcgacacgatccttgactatatccctgcaccggagggcgatccggacgccaacacccaggtattgatcagcaccatcgattacaacgaatatgtcggacgtatcggtatcggaaaagtcgataacggctgcttaaaggtcaatcaggaggcggttgttgtcaaccaccacgagccggacaagcagaaacgtgtccgcatcagcaagctttacgaatttgacggtctgaacaaggtggacgtcacagaggcaaagatcggttccatcgtagccatttccggtattgcagatatccatatcggtgataccatctgcgcacctgagaatccggttgccattccgttccagaagatttccgagccgacactgtccatgaatttcatcgtaaacgacagcccgctcgccggacaggaaggtaagttcgttacctcccgtcatttaagagaccgtctgttccgcgaattaaacaccgatgtttctctgcgtgtcgaggagacggacagcccggattcctacaaagtatccggccgtggtgagcttcatctgtccgtactgattgagaacatgcgccgcgagggttatgagtttgccgtcagcaaagctgaagttctctaccacacggatgagaacggcaagaagttagagccgatggagcttgcttatgtcgatgtaccggatgagttcaccggtgccgtcatcgaaaagttaagccagcgcaagggtgaaatgctgaacatgaaaccgattaccggcggttacacacgtctggagttcaatatcccgtcccgcggtctgatcggttaccgcggtgaatttatgacggataccaagggtaacggtatcatcaacaccatttttaacggctatgcaccgtacaagggcgagatcgcttaccgcaaactcggttccctgatcgcatttgagaccggcgagtccgtaacctacggtctgttttccgcacaggatcgcggtacgctctttatcggacctggcgaaaaagtatacgccggcatggtcatcggttcttcttccagagccgaggatatcgaattgaatgtctgcaagaaaaagcacctgaccaacacgcgttcctcttccgcagacgaggcgctgactctggttccgcctaagattttaagtctggaacaggcgctcgatttcatcgatgtcgacgaactcctggaggttacaccggagagtcttcgtatccgcaagcgtattcttgatcctaccttaagaaaacgcgccggcatgaaaaaataagtcgtatttctactcttaaaaaggagccatgtgcaccgtttcctatggtgcacatggctccttataaaatgcatatccattttttccgtttttcttcaccgtatacatcgcagcatccgccgctgccagaagttccgttgcatccgctccgtgctccggccacaccgcgattccgagactgactcccagtgcctcgtccgccgctcccattctgcacggcttttgcagacgttccatcaaaccggatgcatatcgctctatgaccctgtaatcgccgcagtcgatcagtgctacaaactcatctcctgccaggcggtacggtgtgaaatggccatcctccaccgccagcgaccggagtgccacttcgcgcagcacctcatcccctgcattgtgtccgtaggtgtcgttcacccgtttaaaattatccagatcatacataaaaaccgtaaattcttcccccgaggcaatccgatgcctgatatcttccataaagacaccgcggttcttaaggtgtgtcagtacatcgtaatgtgcactgtaggacagtttttcgtttgctctggtaatcacttcgttcattttgcgtcggcgcatattatccaccgccagccatgccaccattgccaacgccacggcagcaatcaccagcgttgccctgatcgtatcccggttcttttcccagaaggtctccctgtgattgatgatgactgcatcccctggaagctttgatgcactgattccaaacctgcgcatcacattttcatcaaagcaatataccttcggcggctccatcacaatggagatccctgcacaatccgtgccctccagtatctgcaccgccatttctcctgccctttttcccatctgttcctgcgagacaatctcgccgcctaaaaatccttttcccataccgtgcgagacaatcgaaaacatcggaatctgcgccacatcactcagcatctggatcgcttccgccgccgcgtatacattcccgtcgccatccctgctgcacataatatagaccaaaatgctctcctcccccagcgcagcaacctgtctttttaattcttcctgggagagctttgaagcgtcgatctctacaaagtccaactctggaaaaacagtatcgtaatactggaattccttgcgttcgccctctccggtcaccgtatcatccagtattcctaccacctgtcttgcatccggatacagcttctttgccagcgtgatcgtattctcataagagagcgtctcaaccacgcccgtcacaagcggatctgctgccgctttcttcgccagttccctatcattaactccctcaaaaacaaccggcgtctgcgcaaacaactcatcccgatacgtcattgcaaactgaaacgccgcatcatctcctacaatcacaacatcatacgccggaaccatcttcagatagtatgttagcgtctggtaaaatagctgttcactctccgccgtctcgacatttttggtatccataaactgataatccagctgtacaccagcgcccaatgcttcttttataccgcgaatctgttccggaaccgtctcccatgcataggaataggaactgataaataataccctgccggtgatttccccagcgtccggcaccagttcttctgcatatgccggaatgcctcccacacagataagaagtgcaatagcaaaaaaaatccggtaccctttttgaatccatcgacgttctatcacagacactcctcctccctatccgtatatcaaaattttccaccctcccgcttctattgtcaatattttttcactgtttttttacggttttctgatattttacaaccgccggatccgtcatctgcagcgtcctcttccactccctgctttcccccactttctgcacagcggaacggttcttatataaaaagcgcgtcagagtatagcagtccacccagatctcgttgtttccctctttctgcgcctcgtcaaagatcagctgcagcccgaaatgcagatgaaccgtatctatgttgttgacattttccttcgtgctgtacccggtatgccccatatagccgatcacatcccctgccgtcacgacatcgccctccttcaactgttcccggtacggatagttctggcgcaggtgcgcataataatagtagcgcttcccgtcaaagctgcggatgccgatgcgccatccgccgtactggttccagccgatcgcttctacgtagccggattctacggcgatgattggggttccgacctgccccatcatatcatgtcccagatgttgtctttgatatccatagcttcttgacaccccgaaatcatcataatcactgtactcaaacccttttgcgatcggtgaaaatgctttcagaccatacttttttacatatgacccatcctccttttcctggatctcatattcaccgaccataccgccaagaaccgctccgtatgcctccctgtaataggaaaacatcttcatatctgcggtcatatgctccatcgtatcctccccgcagagaattttttcagcagcggtacgcatgtcctccgttgctccggctccaaaatctccgccgttctttgccccgacgtacgccagaagatcaatccagtcaagatgctgcttttctccgtaactgcttatgtcatactcgtatgccctagacaatgcctcatacgacacattaaaatctacccatttgatatagccgtccgccgttgtttccacggctgatttttgcggcaactttccattctcccagaggattactcccatcaaaaaaagcaatgccgcctcaaggatcacggccgagcggatccgcctgcttctctccattcctttctgttccgttttccattcctcactgtcatggtcgttttgttcattatataaaaaaagactgcagactattcccgtctgcaatctttacagataccgtataatatagaatttttgcactgtaactgaaatccgtggtccttttggatgtgctctgcaatctcatccataaatccgcagtcgagatgaatgatgcatccacatttgacacatttcagatgaagatgctcctcgcagtgctgtcccagttccacgtactgatacactgcctttcctcccgcctccgccacatatttcatgacggtgccgtctgtggcaagcttatccagataacggtaaatcgtcgtgatattgacggcatcgccgtttcgcttcagatattgatcgatatccgccgccgtcacggtccggtcactgttgctttttaaaaaatcaagaatctttctgcggctgtttgtcgcatatccactccctgccatctcatccctccgcaactgcatctatttccattatatcaactacgcttcggcaaaagtcaaggctcgcagccatgaattttccacttcctgtatcgcagtgcacgtccggcactgctcattgtttatgcacattatatcatatatcaactacgcttcggcaaaagtctgtgaaaccatatccctgtctcctaaaatacaattccacatgcttcaatcatgacaccccagagcacaccgagcacatacatggtagcgatgatggccgcattctgcttatagtcgcggttcagccggaacagcaccagaaatcccacaccggcattcaccaaaagtcctgccatcatggcgcccgaccggataattccatccaggtacaactgtgtgattacaacggacgacgcacagttcgggatcagccccacgagggcagcaatcagctctcccacaaccggaagtccggaaaacagtcccgccagcgcttcctctccgatcaacccgatcacaccgtttaataccagtgaaatcaggaaaataaaacagaagatctttaccgtatgcttaagcgcggaaaccacaatcccatcctcgcaatggcagtgctcctcctcacacacgacatgaatgtccatctccttctcctgtttcttcaagagtctcacatataccagttccacaatcagaccggacagcacagcaatgattaccttactgccaagaattttcgcaatcgtcactaccggcaccgactccgaaatcagaatcggaagcatctcatccgaagtggacaaatagatagcgaccagagttccgaccgtaatgactcttccggcaaaaaggctcgatgccgctgccgaaaacccgcactgcggaatcacaccgagcagaccgccccacacaggtccccattttccggcggactgtatcttccggctcagcttgcttcccgtatgatgttccaatgcctccataaaaagataagtcaaaaataaaaacggcaaaagcctgacactgtcaagcactgtatccaataatacatccagcataaaatcattcctcccgggcgctgtcatagcgcttcccaacgcgtcatcccacctgcatgccgcacacatttgcaactcattcgtttttgcaatttatatgcatttgcaactcatttgcattttgtattatacattgatatcgtgttttgtcaagctttttatcgtatttctttcgagtgccacatttggcaccacactgctgcccggctataattccatccattctttgtgctgcattctacacaaaacaggaagcagactccgtccaggctcatatttgaaatccatccagataccctctgtccagatacagttctcttaatttttcgcggtacacttcctttgtattgtacggtctgccaaaatgaattccatccgaaaactggtccgccggataataggtaatttcagaaaaataatccgggaaaagccgatccaatccccgtgtttcaaaatcctgccggatctgctctacctgcttgcggcgcgccggtgtatctgccagcggatcggggatcagatagcatgccaccccctgcgtgtcgcacaattcgtaaattttccgcagatagcgctctgccagatcagacatgccgtctgtccggtcatctccgcttttccccttcttcgccgcttcctcccgctccttcacataattcaaatacagcttgcggtttaccgccgaaccggcgatcagttctgccaccggctttttcaggaaaaagcttccgaacgtctcctccatttcctctgcggtctcctcgtcaagttcgcccagcagatccgcctgcaaaaacggaagaaccacataagaatagctgtatgtggcatcgatcgacgtctgaagcagatccggtcccgccatcagccagacttccgagacattctcatgcgtctccagaaattcttttaccagaagatattcccctgccatggtcagcgcgcggttatttccgaccagacagtattgttgattacaatcaaaaaacgcttccgtcatctgtgcgcagacactgtcaccgaccagcagcttcgtgtaactgcccggcattctgctctttgcaagatacgcagacacttcccgctcggcttcctcctcgtaaccgctgctgtctgtcaacacggcaaacgcaccgcgaaatctctccgtcgctgataacaaatcaagagccagaagcactgccgcaaatattcccaaaaaggcgatcaacttttttgtaaaacgcttcatgccttcctcctaaaattgaaaataaagaaactccaccgacgctcttccataattctgcagcaacagcacgacaaatcccagaagaaccagcatgtaaatactccaacgaatcacaagcacctgctttgcaagccaggcacgtatggaaatcccggattcatgcaggatatccactacaagcagaactccgatggcaagtgccagctgacacacctccagtctgcaaagccccatgccaaataatgtgccatcggaaaactgtcccagccagttgccattttgcacaatccgccgaagcatcgccacagctcgtcccagatgatctgccctgaaaaaaagccacgcaaaatccgtgagaataaatgtcacacaaatccgggcagcgcgtgtcagtccccgcgttttctccgaaaaaaagcgtatctttttctccggtagtctcttttgtacggcctcacttacatatctgatgcctctgcccgccacctgatagcttccatggattgctccccacaccacatagtgccagcctgcgccatgccagagcccgctgacaagaaatgttatcatcaggtttacagcggttctcccactgctgccgcggcttcctcccagcgggaaatacagatagtcgcggaaccagctcgagagactgatatgccatcgtctccagaattcccggcaattcactgcaaaatagggctgtcggaaattatccatcaggcggatgccaagcacctgcgccgccccgatggcaatatggctgtaaccgccgaaatcacagtagatctgtaccgcaaacagcaccgtggcaaacacaagcatgccggaggaataattccggtaatcctgatagacctgatcgaccagaatcgcagcacggtccgcaatccacattttttcaaaatacccccacagcatcagaagcagtccgtcctttaccctgtcatagtcgaactctgccggctcccgcagctgtgcaagcagactgctgctccgctcgatcggtcctgcaacaagctgcgggaaaaatgacacaaacagcgcaaaacgcaggaaacttttttccgcttctgtcttccctttccagacatcgatcaggtacccgatggtctggaacgtgtaaaaagatattccgaccggaagaatgagatcgggcacccttaacgctcgcacgcttcccaccgcacggagcaattcgttgatattctgcactgcaaaagcaaaatatttgaaaaaaaagaggattccgacacacagaagaacactgccggtcagcaccgccagacgtctcttcccttgtcgtactttattttgtgccagcaaaagtccgccaccataaccgattgcggtcacaagcagaatcagacagccatactgcacattccagctcatataaaaataatagctcgccacaagcagccataactgttttgccctctttggtatcagaaaatacattcccgtcaccagagggaaaaacaaaaggaatgaaaacgaatgaaacagcacttaattctcctctcatgaaatcaacagacacctttcctaaaatcctttgacacaatacccgtcagcaaattttctcaatccggcgttctttgtatttgcaaaaaggagacacggtcttcactcgccatgtctcctctgtctaatgctttttgttgtaatgttcctacagcatcttaatgcgctctaacgctgccagtgtattctcatagcttccgaatgccgtcaaccggaaatatccctcaccgctcggtccgaatccggaaccaggtgttccaaccacgttggcacgtgcgagcagatcgtcaaagaattcccaggaagtcatctctcccggtgtcttcagccagatatacggcgcattcacaccaccgaacaccgtgtaaccggcatcctttaatccctgcttgatcgctttcgcattcttcatatagtaagcaacctgctcttttaactgtgcctttcctgcctcggaataaacagcctctcctgcccgctgcacaatgtacggcgcaccgttgaacttggttccgtgacgtcttgcccacatggcattcagcgatacctcaccacactttaattccttcggaacaaccgtataacccagacgcaccccggtaaaaccggcattcttagagaaactcttcagttcaatcgcacaggtcttggcaccctcacactcatagatggagtgcgccacattttcctctgaaatataagcctcatacgctgcatcgtaaataatgaccgctttgttcttatttgcataatctacccagccctgcagctgatcttttgtgatggtggtaccggtcggattgttcggcagacacagatagatgatatccggtgtctctttcggaaactccggcacaaaattattctccatcgtacacggcatgtagatcacatcgctccacatctccgtctccggatcataagtaccggtacgtcccgccataacattggaatccacatataccgggtagaccggatcacacactgcaatgcggttattctgtgcaaaaatctcctgaatattaccggaatcgctctttgctccgtccgatacaaaaatttcatcaaccgtaatatcgcatcctctcgcctgataatcgttcttcacgattgcgctgcgcagaaattcatatcccagatccggtgcatatccgtgaaaagtctccgcatgccccatctcatcgacggctttatgcatagcttcaataattgccggtgcaatcggctgtgtcacgtcaccgatgccaaggcggataatctttttgtccggatttgcttcgctgtaggcatttaccttctttgcaatcgtactgaaaaggtagcttcccggaagtttctgataattatcattgatcttgtacatgtctctctccttattccttccatacagaattcgttctctttcaaaatgtcgccaacgacacaacgcattgccactctctgtcacccattatctcatacttaaatccaatccgcaagcactttttgattcctggtaaacaaaatcctcctgtctgcgacgtttcctattcgcacgggtatgcatccccgcggagcgtttttgtataacaggaacgaaatttcctattacaaaaaaaaggaccgccgcatctgcggcaatcctctctctcactcatcaggcaagcaaacttaaaatcatctgggctgtttctgtcagaccggttccattatccatgctgcgtttctgtatgtaccgatgcgcctcctcctccgacagattgttacgttccatcagaagtgcttttgcctcatttatcagctcctgttcctccttcgtgcgctccttcggaatctgcttcaacttttttctgcgcctggtgatggtatattccatcatctccaccgtatctaacagctcgtttaccttaagcggcgtggcaaggcagaccagattctccacatcccggtttccacagtttgcaggagaagcaaccaacagcatttcaaattgtaccggcagatattcgtgcagttctgtgtacatcatatccacaaaacgatacccgcacacgacaatcccgccgccaagttcaccggcgctctgtaacacctgcgctccggtgctgcagactgcatcgacatgatgaccgttctgcatcagtatttttttgatattgcgggcattatcctgtttgggaaatgcaacaataatatttgtcaattctatcccctttgcatccaggctctatattttataaaggtaattgtcaatttcccagcctgtcacctgcgcacgataatctgcccactctgccatctttgcctcgctgtatttctcgctgatgtgttcgccaagcacttcccgaatgtaaggatccgccttaaatgcttcgaccgcttctcccagatccgccggaagtgattcgattccctgcttcttaatctgcgacagccgcatctcgaatatattctcagtcacggcagccggcggatcgatctgccggcggattccatccagtccggcttccagacacaccgcgagcgtaagatacgggtttgccgccgaatccgggcagcgcagttccactctggttctgctgccgcgcgataccggaatccggatcagcggactgcggtttgtcatggaccatgcgatataaatcggcgcctcatatcccgggacaagacgcttataggaattgacaagcggattggtaattgcagtcatggctctcatatggttcataatgccaccgataaaccagaaagcttccctgctcagtccgttctccccgtccggatcgtcaaaaatgttccgaccatccttggaaagcgacatattcacatgcattccagaaccattcaccccgtacttcggctttggcataaagcttgcaaacatgccgtgccgctttgcaatggtctttaccgcaagcttgaatgtcatgatattgtccgctgtttttaacgcctcgtcatatttaaagtcaatctcatgctgcgccggtgccacctcgtgatgggacgcctctatttcatagcccatatcctctaatgtcagcaccatatctcttcttgcattctccccgagatcaaccggtcccagatcaaaatatccggcacgctccgtgctcatcgttgtcggctgtccatcctcatcctgattaaacaggaaaaattcacattccggcccgacatcaaaacggtatcccatagattccgcatctgccaccgccttctttaaagcataccgcggatctccctcaaacggtttgcggtctgcggtataaatatcacagatgattctggcaacttttccctgctgtggccgccacggaaagattacaaacgtatccagatccggatacagatacatgtccgactcttcaattctcacaaatccctcaatggaggacccgtcaaacatacattcattgttcaatgctttctcaagctggctggacgtgattgccacattcttgagtgtcccgaacatatcggtaaactggagcctgatgaactccacatcctcttcctccacgattcggataatatcctgctttgtgtacttgctcattttcttctcctccatcttccactgccatgatcttccctcactgccgtgatcttttctcactgtcgcggtctttcctcactgtcgtgatcttttctcactgtcacgttccctcctcactgccgtgatcttttctcactgtcacgttccttcctcactgccgtgatcttttctcactgtcgcgattcttctcctgctatctgcaatattctgtaactttttcaaaaggcatcgatcctccgaacaaatccagtgcacttccgatcgtcacattcagcctgtcacatccaagctctctcaaaagtgcaaggtcatcaaagtcccgcactccgccggcataggtaaccggtatcctgccccaggagccaagcagacttgcaagttctctctcaataccgtttgccttgccctccacatcgaccgcatgtactaaaaactcgtcacactcactgccgaggcgttccaaaagttctgttgtcacacgttccctcgtatctttctgccagcgatcggtcacaatataataaccatccgcccgctttgcacagcttagatccagaaccagatgttcttttccgacatttttcctcaatgttgcaagccgttcatagtcaatttttccgtcacgaaacacataggaggtgacaatcacatgacttgcgcccgcatccagaaactgctttgcgttcgcagcatcaatgcctcctccgatctgaagtccgcccggatactccgcaagcgcctgcagggcctgtgcctttgtcgcctcatagtacgcactgtctcgcgaattcaacagaatgatatgtccgccgcgaagtcccgcttccttatatagatgtgcataatacgtagcatccgctccggcgacaaaattctccactgcccggtctccctcatccgcaagactgctgccgacaatctgcttgaccttgccgttatgtatatcaatacagggacgaaactccatactgcctccttatacactgctctcgtaatataaatttaggcaacgtaccccctgtaacagtggccccgtcgcccactgccatcatagcacacatctgtccgtttgtgaatatttttatatattagtctaacttatcaatatatttttttatcaactgacgcttatactacgttgacacacacatttttttttgctattatagagaaactaatatacttttttaacaaacatttatacaaggaaagcgaggaaaataaaaatgggaacaattatcggtgaaggaattacttttgatgatgtgcttttggttccacagtattcagaagtaactccgaacatgattaatttaacgacacaccttaccaaaaaggtcgtgctcaatatccctatgatgagtgctgcaatggatactgtcacagagcacagaatggccattgccatggcaagacagggtggtatcggtattatccacaaaaatatgtccattcaggctcaggcagatgaagtcgacaaggtaaaacgttcagaaaacggcgttatcacagacccatttttcctttctccaagccatacactgcaggatgctgaagacttgatgcgcaaattccgcatttccggtgttccgatctgcgagaataacaagctcgtcggcatcatcacgaaccgtgacttaaagttcgagacagatttttccaagaagatcagtgaaagtatgacttccgaaggtcttatcactgctcctgaaggcattaccttagaagaggcaaaaaagattcttgccaaggcgagaaaagaaaagctgccgatcgtcgacaaagatttccatctgaagggacttatcactatcaaggatatcgaaaaacagatcaagtatcctctctccgcaaaggatgagcagggtcgtctgctttgcggtgcaggtgtcggtattaccgccaacatgatggagcgtgtggaagctctcgtaaaggcccacgtagacgtcattgttgtggattccgctcacggacattccagaaatatccttgaggctgtcaagaagatcaagactgcttatccggatctgcaggtcattgcaggtaacgtggctaccggagaggcaacacgcgacttaatcgcagccggcgctgatgcagtaaaagtcggcatcggtcctggttccatctgcaccacccgtatcgttgcaggtatcggtgttccgcagatcactgctatcatggactgctataaggttgcaaaagaagccggtattccgatcatcgccgacggcggtatcaaatactccggcgatatgacaaaagctctcgcagcaggcgcaaatgtctgcatgatgggaagtatctttgccggatgtgatgaggctcctggaactttcgagctgtatcagggaagaaaatacaaggtttaccgcggcatgggttctcttgcagctatggagaacggcagcaaagaccgctacttccaggaaggtgccaagaagctggtaccggaaggcgtcgaaggccgtgtggcttacaagggcaatgtggaggacactgttttccagctggtcggcggtatccgttccggtatgggttactgtggctgcccgacgatcgaggatctcaaggaaaagagcaagttcgtaaaaatctccgctgctgctcttcgtgagagtcatccgcatgacatccacatcacaaaggaagctccaaactacagtattgacgaatagacattttctttatataatgtcatttatattacacttttgtattccggcgccctgtgtgccggaatactattaaccaaaggcatggcacatacatctgtgcgcatcctgctatttaatgaggtgaacatacttggattcaagtgacatatttcaaataattttcttagtgctcttacttatgctctctgcattcttttcatccgcagagacggctttaattaccgtcaatcgcatccggatgcgtaccctggcagaagacgggaacaaacgcgctgccacagttcttcgcatcacagataattccggaaaaatgctttctgcaatcttaatcggtaataacatcgtgaatctgtcggcatcctcgctcgcgacttctctggcaatcaagatctggggcagtgtaggtgcaggtattgcaaccggcatccttaccgtactcattttgatttttggcgaaatctcgccgaagacactggcgacggtcaattccgaaaaactggctctcacctatgcaaatgtgattgaggtactgatgaaaattctgactccggtcatttttatcatcaataagcttgccaaccgcatctgcaaattattcggcgttgatccgaatgccgatacccagaagatgaccgaggaagaactgcgcacaatcgtggatgtcagcaaggaatccggcgtcatcgagtctgaagaacacaccatgattaacaatgtgtttgattttggcgatgcacaggccaaagaagtcatgattccgagaatcgatatgacctttgcgcaagtagacagttcctacgatgagctgattcagatttttcaggaggataagtttacccggctgccagtctatgaagatacgaccgacaacgtgattggtatcctcaatatgaaagatctgcttctctgtcacgacaaggatcatttttctgttcgtgatattatgcgtgaaccgtattttacatacgagcacaagaacactgcagaattgtttatggaaatgcgtaagtcctctatctcacttgccattgttctggatgagtatggtgctactgcgggtctgatcacgctggaagatcttctggaagagattgttggtgaaatccgtgatgagtacgatactgacgaagaagatccgattgtccagcttagcgaccgtgaatacatggttctcggctccaccaacctggaagatctctgtgatgagatcggcttgaattttacatccgaggattatgatacgattggcggctacctcatcggtctgctggatcaccttccggaaaagaacgaagtgattattaccgatgatgatgtgttgcttcgtgtggaacagatggataaaaaccggattgaaaagatctatatcaagaagccggaagctccggtctcagatgtagaagaacacacataagggctgtccgtaatcaacaagaatatattaggaaatatcctctccgctcttcctcacagaagaatgaaagagttgcagccggcaggcaggaaacgcctgccggctgttttttattttcatcttacacgatttggcacaagataccgatcatacatttcctgtaatgctccgacctctctgctgtctccgaatccgtgcgcatccacatattcgcggatcttccggcgcgcctcaccgttaatcgtataggtttcaaccggtgcatcattttccagatttccaaacgccgtccgaagtgcagacacgtacgcagtatccgtcttccagatcgaatcatccaaaagccctccccgttcataagaacttccgtaatatttttcatcaataaagcgtgttgttctctccgttcgtgcatctgcaggcgttgtatccaccacataaaccgttatctgcttacaatagatactcccagcgctgtcaactaccgtgagattttccgtacagcttcctccacgcaaaaactgcgtaaaatccgatgcctgataatccggaatcgaaaaagatgttccattttcatgaaatcctgcctcgatcggacttccatcttcacgatccgatgcagtcgcatggcttaaaatctcactgtctgtgataaccccctgctgtgcctgctccagtgtatagtagagatttgtggcaacaatccacggacagtcatcccacgacacatacagcgtgatcatcgcaccattctgatctgccacgccggcagcttctatcagatccgccacactgacctgcattcctgctgtccattgcggtataaagctatcgcgcccatcctcgagcgaccaccccataaaaacagccgcatatgcctttttatccgacaccggatcagcagccggagtttccgattcttccagaacttccagttcctccacatccgcttctgcttctgttgcatcttcctccggtgcttctgtcgattcactggaagcatccgcttctactgcttccggatctgctacgcttccatctgaattcgtgatgcttccatccagctgcgtaatacttccatcctcatttataatgccacctgccggtgtcatcatcagacccgtatccgcatccatcaccataaccactacgccagaatcatccaaaacaatcgtgccgtctaatacctgctgcgtgatatcctctccgtccaacgtatagcggatataacgtcccgtaacatccggcaacgtcacattctgatcgtatatgatcgttatatcatcaatcggcacttgttctttgccatcgtttgggtcaaaatgcagcgtatagctgtttgctgtccaagacgccgtcagaacatctgtcgcatcatcttctgcgccaaacgtatacaccgcattgttcagactaccgttaaatggatccgatttcacccagcctgaaaaagtatatccggttcttaccggatacggaatggatttaaccgttccatagtgctccgtaaaactctgcacagcggtacttccctgccatgttcccccattgggatcaacttttaaaatggagtggttaatctgcgcgtttgcagtcattcgcacattttgtgcaggcatggcaaacgcatactgctttctatccgtctcatacgtgccagtccatcccgtccaatggtaaccattttttaccaccgcatcaattgtaaccgctgccccagacatataattgcgtacaccactgacactctgaattccatttcctgcaatcagatcaacccggaataaagcattgcaccagctggatgcaatgcatgctttgtcgatccagtgtcccgtgtcaactcctgcagattttaaatacccatcaagttgatccctgttatcaaaccgactcataccggatccgctgatccggcaatagatcgtatactcaatcttatctcccttaaaccaacttgatatgccaccaccagaaaagataaccgtattatgtactgtcccgtccgcatccgtcaccgtaccctgcctcacagtagcactggacacaatattgctatttaccgcaatgctgtaattcgtcagatccggagtcagattcggatccagtgtcaccgtcagttcgccgtcataaagaccagtatcatcctgtgcagatgtattttcaatcttcccttttacgataacctttccatccgatatacttgttgtctgctgcgactcaaactccggaaaagcaatgtctaccgccgctccgatgtaaagctgggtatcccaacggacattggcaacatccaccccaaacactgtcgcaccatatgataatcccgaaacgttatacaaaacagagcacatatccgtttgttggcaaaatagtgatccatcacggtaaagcccctctattacagtcccgccgttccttacatttttttcactatcccgagcctgttgtgtaaacatggatatcagtttgggattttccgtaaccctcgccgcatcgatacatccaaaaagtatctgtcctgtcacgtctccgtattctttggtttttaaaccatcaaacaactctgcctgcatcgtaacagttgctctggagacaggatcgaaaccataatcatcgccctcccaatcaacatctccgaaccggaatctcgatcccacacttaaagtcaccgcacgtaccggataagaagcattttcctccacgacaatcagctgccagccggtcggcgttccaccgcctcccgtatcctgctcccagagatcggatgcacggcataccggtatattggctacatagtaatcaccatacccgtatgttttaacgatagttgttacatccgcaacgttgcagtaaattcgggggcgggactgctcccatccagaaacataccgcgaactgcgatcgtccgcaaaaacccaatcaggataaatattccaacgagttctagcatctcgcataagaaaacttacatgattagcattattatcatctttgttatacctttttcgagtttcccatatcaaatacgcccttacaatatgagttgtgctattgtccccatgcaatgttgcccttgaactattagaccatcccgacaatgtctgactgcaataggatatatcatcgtttcctgatgacggcgaagaatatacattgatatttccagtataatttagcgcataacgacctaccgttgtattttctccactctgcccaactggcaactctttaaatacatttttctgtacctcattcgtagcatgttccgccaatgtttctgccataactttatcagaaaataataatgcacttactaccaataatacacacaaataaaatttatatattatactcctatcgtatctgagctttcgctcactatacatataattatcctccgttacatttaattaaatgtgatcgtggaatttccgccgccatttccacctgttcctgtattgtcgccaagtgacggatctccctcaatgacatcatctggttctgacattgtatgatcaccgcttccgttgttgctacttccactatcaccgcttggtgttgtactttcgctgttgctgtttccgaaattactgctttcgttgttgctacttccactgttgctgtttccgctattgccgcctccactgttgctacttccgctattgtctccggaattgctgcttccgctgttgctgtttccgctattgtctccggaattgctgcttccactgttgctgtttccactattgtctccagaattgctgcttccactgttgctgtttccagaattgctgcttccactgttgctatttccagtattactgcttccagtatttgtagcactgctgttggttgatccggtttcagcctttgttgtctccgactttgttgcagcagatttggtatcctttttagaggtctttccacctgcaactgtcaccttggcggtctgctttgcagtaaacccgttctcatctgttaccgtgtaagtaatctcgtactctcctgccaaagacaggtctactttgctgtcatcacatgcgatcttatctgtcagatcattcccattgctgtccgttgccgttacacccgaaagatagtccacatcctctgctccggttgttacggtaagatcctcaattcccaaaaatgtcggttctgtaccaaccagtaccggcacttctacctgcttgctatttccactctcatctgcaagtgttaagcttacactgtgctcgcccactgtatgaaagactatcgcgtcatttgttaccgttacatcgtctaacacaaatgtttccatatcttctgacgctccggtggcctctacttcctcggtgacctccatgtcctcagtcgtctccacatccttggcagcctctacaccctcggtagcctctacaccctcagtggcctctacttcctcggtggcttcggtagactcatctgccagatcgtcaaatgttgccattacattcccggtcagctcggttacactcgttaaaacatcctccacgtacaatggctcgtccacaccgactgtaacctgattcaccacctccgcctccggcgctgtggtatctactacgtccacttcaagggacgctgtctgatccttataagtaaccactgccgtataagttccaagcttacttacatcaaccgccccaaaatcaattgttgtctccactgcgatatccgcatccgacacataagccgctacatccgtattaagctcataccccagttcgacacttaccctatctgttgcaagcgcaagctgcttatctccgcaacctgctgctgtcatttctgtcaccattgttactgttaataatactactacgcttttctttttcataaactaatctccctgattcttataattttcttttctgtctttgccgcttccctttaaaaaacttcattcataaatgcttccaccagtttctcatagctcctttcacttgaatccaattctttgaacacttgccatacaaatcaacactttcgttcgcttttaaagaggcatatctactactaaattagtatacactacgcagtacgttttttctatatttttataatctcagctacgcttttaatgcttccctctatcacttccagttaaccctctttttaccgattctctctgtagatcgtatcatcgcattgataatatagtctacaactgcctgtcatgatccggtgccacgatctgcaccatacacatttgccgtattccctgcaattcccatatctattcccaggcggcataataatcacgattttcttctatcggctgtgaaaagtccgctgcgtaatcattccagtcatgccagccggcaaataccacaccattgcctcccggttctgccggtggctgcagatattgtccttcctccacggtatataccttataacagcttccctcaccgagcattccctcccggttctggtaaaaccgcacccggtactgctcttttgatacattctccctctcttcccggataattgttctgaccgcttctgccgtaccttccattccattgggatgttgaaacttttcctgtaatttcattgacaatacccccttttgcacatcattctgatagaccttcaaaaccacatcggagtctgtatcgatttccgccgccagaagttccacacactccgcaatcaccaattctccggaagaacaccccgcctccgtaaacggcatcccctcgaccgtcttttccattgtggaaggaagaatcgtctccacctcacatctgcggttcatgcttccgccaatcgtcagcacaatcccgagtatcagaaatcccatgattgcactgacaatgatcatcgctgcatttttcacatatatctcctttcccggccttctgtcttctcatcgattcacaggtatctgaaactcacagacgcttctgcggtttgcttcgtctgtcgcgcagacccgcaccgtatagatcccctccacatcaaacacaacctcaccttgctgtgattctattgtgcagctgtttccatgcggatctgtcatctcacaccacaaaacacttcgttcttctcccattccgtctaccgcagaaaataagtctcccggcagatatgctcccctgtgcagcataccattgtacgcataccggatcgtgggatacgctacctcccccgcctccgcaaaagcgtcgatggcagcgttttctgtgattgtctcttcctccggtatccatgtctttacgatgttaataattccccggttgccctgctcgtcacgaattcctgcaaacagcagtaccatgactgctatcagcacaattcctgccgcaattccctttccatagcattgaagtacctgctccatctgatcacctctgttcttttcctgttggacacttaactcccacagattcccgtcatataataccgcaggaccataccgatcatcccctgcccatccacggcatggaagaataggagcaatgcccctattccgcctgcaatctgcaaaaatccattgccataaacctctgcgatctctttcatctgtacgctccttttctctgacacgtccgggcacgaaatccccctatagcatgccagccacctgcatccatatctcctgaattgccgtgcatccaaaccagcccaccagcaatactagcattgtcattccaagttcttccagactccattgcatcctgctcctccttttaccgtgcgattcctctcgtcacccgctgctgcgagacccctaacagtggtatccggtatctataatagagattgatccccgcaatcctgcggtcgctttgtccaccgtaggtgtaggactgcacttccagttcgtacccttctgttcttgcctgcgccttgcagccatcaatcacgtacggattaaagtcactgttctcaatttctgcaatcattgcagctttaaattccttcgccgctgccacatcggcactcaccccgagcatactgatgcacagcagcagattaaaaaccagcaccagcatcacactgaacacttctatgatatatttcactcacgcacctcccatgcctccaagaacctgcatcatcaacgccattccgaccgtaagatctgccagcagttttccagtggctgccagcaccggatatgcaaaaatcaacttcatccggaatgcacgctcttcactgcgcaaaacatcggcgcgctcctgcatcagaaccacacgctcaatcagatgattcatctgcacatcaatatctcccgttccgttttcagaaaaagcatgcagcattttcatacagcttaacatctcggggagatcaaactttttgcaaaagtccgtgtatgtctgtaattgatccggacgctcgtccattctcgcgcaaagctccgcaagttcgctcccgagcaccgccggggcatgttgtgcagattttgtaatcgccatctgaacgttattgttctgtaaaagtaataccatctcaaaaagccagcgcggcagcgcctgatacaattccgccgtcacgtcccgctcggcaatgcggtaactgattctcggctgcattgcaaccagtaaaccagtcaccagcaggagtattcccgcaatgcgccatcccacagtccaaaacacaaacgcagtcatagtcacaattcctgcaggaatcaggcgccgatactgctgtgatttcttttcataccccattaccagttcatagctgtgtctgatatatgccgtgtcatacagcggcttttcctccagccagtcagccgtcaggcttctgacactcttcacataaaatgcaagcagcaacaaaagaaacaccatcgaagatatctggatcacaggaacggtaaacaccgatacgtcagcctctgatgtaaacatctcctgcatctcatttaaaagatacaatgcagccgcgcacaagagcactgccaccacaatggaaatcacattatccgtatgactcttccgcttctccgcctgaagctgatatccgcgctttttgaaccgctcaatatcctccagaacaagcgtgaccgatgcctccacatccccgccatattcctccgcattcagtagaagttcatgtaccgtcgccagcttatcacaggcataataccgttcgattttctgtaaaccctcacgcagaacgccctgctctccgaccggatgcccgtactccatatgcgcaatcgcttcctccacgcagagtcggatctgcccttccccaaaaattccgcgcacctccttcaatgcactcacaatctttccggtcttctgaaacgcatagagcagctgttccatgtaggcacatgcatctccaaaacgcttctgctcatacattttcttatacatgtcaagtatcagtaccgggaatacgaaaaacactgtcaaaagcacccctgccaaaaacagcggttttagctgaaacaccattccaatcccaccgattccaaccagagcggcaatcaccgccataagatgcgtcctccatgaaaaacgataaccgtacacatgcacttcgcgctgcagatttttcggattcaacagccgcagtttctcccacagtccttctcttttcatctattttccctctctcctgtatctctgccagtgtgcgcaacaaaacggatcctctattcccgcctgtccaaggcgtctcacaatcgcaggcggtagctcttccgagagcagttccccatcctccagtatcatataaatacgattctcatactgctccctgctgtaaaaacacagctgatccatatatcttcggatctttccgtccggctgtctgacgcagcggatcagaatccccacattcacatagcggtagatccggttctccatacgctctgcgtcacgcgcatcgctcatcatattctgaatgcggtccggaagttttctgacatcatccagatggatcgtcgtaaagccgctcacaccggtactccactgctcgagcagcgatgttacctccaccgaccttgcctctgagagaacaagccacttcgggttctgccgcaggctcgccttgatggcatccgtgtaggaaaaatcttctccgacgcgaagctccaccgcatccgcacccggattgatgtccctgtaatgaatctctaatgaatcctcaatcgtaatcacccgctcctcgcgcggtataaactgcataaagaattttgcgcactccgtctttccagcaccgggttctcctccgaacacaaaattcatgcccgccagcacacagttcatcaaaagctgcaaaatccgttccgggcaataggattcttccagcattctctcaatgttcatgcgcaccatgctcggcgacttccgaatacagatactggtgccggatgcggccgccgcctcatggataatactgatacgcagttctctggtatcagcctccagcaccttattggcattattgaactgacgattcacgcagttggaaatattgtgcgtaaaagtgctgataaatgcatcggacagatgctcttttacacgataccttccgatctttaagtccgtaatccacaattcgcttccgttgtagtccacatcggtaacattcgggcgctgcagatatttccagaaaaccccaaactgcgcttccgttggttcaaatgtcatgatctcccccatgtcatcctccctatggcgttaagccattcatgcgggaaaagaatcccgtcagcgcatttttaaactccgtcgccacatatccgtccgaggagagcgccgcaataatgattgcgccgagtgcaagcaatacaataattgcaaggattgcatttccataatgtttcattacctgttccataataatttcctccttcacccttctgttgtgtctttttcttttaccaaacatgtccggttttatcgatcttacatacctcccttaaaatacgatccgccgcttttactaatccgtcgataaactcctgattcctgccgcttctcgcagacccgtattcctccgctataaaagtgctgcccagcccgcgcttcaatgcacagtcatacgctgcattgtaccgcacgatgccaatctgcccctcatccacccgatatactctgtttagcacatccggctccggtgtcccgatgcagttggcatacagatacaccatgcgcttctccagatacatatggcgcaaaaagaactgctccattccgtcgtaatcctgcggttcaaaatttaccaccacaagatccgctgtcaaaaggagcttcttttgacccgccggactgcacactcccgcatcccacaaaaaaagtgccgaatcctcgcatcgctccctctgcaggctgccgcacacaatcttcctgtccgggcataagtgcggcaaaatgcctgccattgcagtatagttcgccgtcgtaccgctccggtgtgtttctccccaaaatacaatattcatttgttcctcacttcactctgtgctgtgtgattgtccttactggaattatggatgaaactgcctccatatagcgtgatacttagaaatgtggataaaatccaactatttgataaaagatgtgcttattttacatcgttttcttacatatgt

SEQ ID NO: 11663 - DNA, 181 bp, Unknown
  gut microbiota DNA sequence
acgtccgttggaagaagtgtacgctgtcgtatttatggatgctatccactatcatgtccgaagtgaaggacgaattgtaaaacgtgcagtctacattgctcttggcattgatatgaacggaaaaaaggacgttcttggtatgtatgttggagaaaacgaaagcgccaagttctggctctcc

SEQ ID NO: 11664 - DNA, 1049 bp, Unknown
  gut microbiota DNA sequence
aatacaaggggattatactttgccggaatttcagttgattccggcggcggaaaaagctaaaatgggattacgacctcttggcctgggtgagtttgcagacattgagtctgccagtctacattcagggcaggggatatggaaactgaaccacttccatttcgcatacaagaaacagccggaaacgctttctctggaaaatatagagcttcctgccggaaatgtaacggcggtcatcgggcacaatggagccggaaaaacgacactatcccgttgcttatgcggattggaaaaaagatgtaaaggtatcctcgaaaaagatggtacttcctattcaagcaaacagcggctgaagctatgctatatggtcatgcaggatgtaaatcatcagctttttacggagagcgttttagaggaagtcctgttaagtatgccggggaaagattccgatgaatcgcctgaaaatgtggaaaaggcagaggctatcttgacagaaatggatttgctcccgtacaaagcctgccatccgatggggctttcgggagggcaaaaacaacgtgtggcgattgcttctgcgattgcctctgaacgtccggttatactatttgacgaacctaccagcggccttgatctctttcacatgaggcaggtggccgattcggtcaaaggacttgccgattcaggaaaaaccattgtgattgtgacccatgatcctgaatttatactcaggtgctgcaattatgtgatccatctggaaaacggcagattggaagaaaactatttcctccaggatacggaaggacgggaacggttatttaatttctttatgatggaaggaggcggcggaaatcaaactgtttgatggtaaaataaactgcggctcaaatgttaaaaatgtcattgaaactgaggattgcgttgtcctgcagctttttgacgagagcggcgagggaaccatgacagcccacaaaatttttgatggcgcttttgtgatgtatagcgatatgcacctgaaagaatgtacctcctactttcagagtagtacggacagt

SEQ ID NO: 11665 - DNA, 285 bp, Unknown
  gut microbiota DNA sequence
gacatccgaggcaagaaataccttgaaagctctgaaaagttctatttgtgtgacagcggtattcgatatgcaatactgggaagcagaaatatagactatggcagagtatatgaaaacgttgtttgtatcgagcttcttcgccgtggatatgatgtctatgtcggcaagctctatcaaaaggaaatcgactttgttgctcagagaggtagcgaaaagatttatattcaggtcagcgacaacatttccgggcaggaaacatttgagagagaatgctctcctctgctt

SEQ ID NO: 11666 - DNA, 1731 bp, Unknown
  gut microbiota DNA sequence
ctcactcatagctgtcctatttcgattctttcatcagaccgagaaacgcccggtacgatttggtgatctgtgtatagtaaaaaatcttggcgtcgcatacatcgctatacagcttccttgtcgtcacagcctctttatgaatgcagatgacctccggcgaatacagcatccgcagtccgctctttgccgccagatagtagagaatctcctcctccgcatacaaaaaggtgccttcccagaagccatcatacactttgaagaaatctcttgaaaacacaaggcagcatccgtggagcagcactccctcgcgctcctcgccgactctgctgtccgccgctaccgcctcgccgtccacctcgcgggtcgctccggtgctccgcgacagatcgcctccattcttcttccccaaaagcagcctggacatccggtagctcatcgcccggatccaggatgatacgatctgctttcgcatatagttcaaggtataactgcgcttctccgccaccgggttaaagtgctgcgtgcgggtcgcgtccacaacatccgcgcccagtatcgcatacggctttctgtcgtagatctcaaacaggcgctcacaaaaatccggctgttcaaacaggatgtcgctgtttgcagcgacgatcagatccggatcatagtgctctctcgcatagcggatgcctagattgttccctctggcaaatccgagattctctcccgacgcgatcacgcgcacccgtttttcatcgataaaatgctccacaagccactcctcgctcccgtttccggaaccgttgtccacgatgacaatgtgcatgtttttccaggtctgcgtcgaaaggatcgactctgcacatgcggcggcttcctcgtatgttttgtaatttaagatgacatagcaaatcgttctcatcggcactgtctccctgaattcttatgcgcccgagtatctggtcttcgtgccaaggataatgcggacatacggggtgatggaacgcacgattgccgttccgagtccaaaatacttatgcaggaaatggaaccagtcccgaaacggcagtccctttctgctctccttgagcttaatgcgctgcatccttggcagcgactcgtcctgccaggttccctttaagctgccgtcgttgcactgcccgatgaacttcgggaaaatgcggatctcatatcccatccggctgatggcgagtccgtaatcaaaatcaccgatactgtgctgataaaacgggtcaatcgacactttcatgaaaatgtcatgcggaatgaccgcgcagttcgcgttaaacgtgtcaaaacagatgtcctgcgcctccgggccgtattttttgtacttgatgcccttgacgtacttgatgccgccgtagctcatcctgccgtcatccccgcacatcgccccgaccatgaccttatccggcgcaaacaatggaagcatctcgtcaaaaatgcccggcacaaacttcgtgtcgtcgttcatcagcatataatactcgtaatcgggatgcacctttttggcgtgctcgattgcctcatacatgccacggttccagaacagtccgccgtcgccgttgattaaatcgatctcatacggcatcgccgccagcatctcatccgtgccgtccgtgctgccgtcattgacaatcacataatcaaaggtgacatttttgttctgcccgagcagctccatgctctgctttgtgagttctctccggttgtaac

SEQ ID NO: 11667 - DNA, 269 bp, Unknown
  gut microbiota DNA sequence
tggaactgcatatgaaacattcgttggagaaaaatgtgtgtatttcttccagccggatgactgcatctgattccgtgtctcttccacgtttggactctcccggagtgtgtccgacaagccacagacaatgagcggactttctagtgtccctaatggcaccgcttcacagacaatataaaaccgcgcgaaccgaaactcgttggcatctgctattgaaaatagggcagatgccaattcagacatcggcttcgcgcggttatgttttgttc

SEQ ID NO: 11668 - DNA, 602 bp, Unknown
  gut microbiota DNA sequence
ccaaggattatttcatcgaggacggtgtgcatctgaacaccaccggttacggcgtgatcgcctcggtgtatgactccgtcgtgcgcgacgcgttcgcacagctgaacgcattcagcgtggataacggcgccaaccgcgcggcgaccgccggtgtgatcgaccagacggcgaacaccgtgtcactgactctgcccgcgggcaccgacatcaccgcgctgacccccactttgtcgctggagccgggcgcaagctacacccccaccggagcacagaatttcacgaaaccggtgacctacaccatcaccggcgcaaacggttccacccgcgcgtacaccgtaacggtgaaccagctgccccgcgtgaaggtcgcctgtgtcggcgacagcctgaccgcgcaggaggtgtatccgaagcagctggaagaatttttgggcgacggctacgaggtcggtcatttcggtgtcaacagcaccaccgcccaaaaggacggccttaaagaaaacggcgataatccagcttccggcgcgtatatcaatcatccgcaatatcagcagagcctggacttcaagccggatattgtactgttgacgctgggctccaac

SEQ ID NO: 11669 - DNA, 589 bp, Unknown
  gut microbiota DNA sequence
acttcaacggttacatccacgtaaaagcgatccccggcgctgacccggcactgattgagaaggcagggtttcttgcggaccgcatgagcatcaatctcgagcttcccacggcaaacgggctgaagcagcttgctccctgcaaatcaagacacacgattctctcccccatgcgccagatccagaatggcatcacggagaaccagaatgaactgatggtctaccgcaaagcgccgaagtttgtgcccgccgggcagagcacacagatgattatcggtgctaccccggagaacgactatcagattatgcgtgtgtccgaggcactctatgagaagtttcatctgaagcgcgttttctactctgcgttcatcaatgtcaacggcgattcgtcactgccggtgctccccggcggacctccgctgctgcgcgagcaccgcctgtaccaggcagactggctgctgcgctattaccgctttcatgtggatgaacttctgtcggaagaccgcccgaattttaatatttatctggatcccaagtgtgactgggcattgcgtcatctcgacacatttccggtcgagatcaaccgcgccag

SEQ ID NO: 11670 - DNA, 2351 bp, Unknown
  gut microbiota DNA sequence
cattcttctggttggtctaaattccggttggtctaatatttaagaaaccattggacggctattattggaagtatgcaaccataggataaggaggaagcagcgatgattcgacatatctgtatgtttaagctgaaggatgaggataaggaagcaaatttgaaggaggcactgcgccgtctggaggagatgagagagattcctctgattgcaacgtttgaggttgtgacgaatgcggctgctgctccggacagcaattatgatctttcacttatttttgattttaagaatatggatgatctgaatgcatatcagaagcatccgatgcatgtggagtttggtaagtttattacagcaatcagagagagcagggcttgtattgattatgaattctaagaatcttttggaagaaacgtatgatgtggcagttgtgggagcgggacatgcaggatgtgaggcggcgcttgcctgtgcgagactggggctcgagacaattatttttactgtgagtgtggacagtatcgccctgatgccgtgtaatccgaatattggcggaagttccaaggggcatctggttcgtgagatcgatgcgcttggcggccagatgggaatcaatattgataagacgtttattcagtcgaaaatgctgaacaaatccaagggacctgcggttcattcattgcgggcacaggcggataaggcaaattacagcatggagatgcggaatacattacagaatacggagcatctgacgatccgccaggcggaggttgccgagattctcacaaaagagggcgatcgtgagcagattaccggtgtgaagacagtttcgggtgcaacgtatcactgtaaggcggttgtactgtgtacgggaacctatcttcgcgcgcgctgtctgaccggtgagatgattacctataccggaccgaacggtctgatggctgcaaatcatctgaccgactcgttactggcacatggagtagaaatgttccgctttaagaccggtactccggcaagaattgacaaacggtcgattgatttttctaagatggaagagcagaagggtgacgaaaaagttgttccgttttctttcacgacaaatcccaaagatgtgcagatcgaccaggtctcctgctggctgacttacacgaatgagaaaacgcatgagattatccgcaacaatctggatcggtctccgatctatgcgggaatcatagagggaaccgggccgcgttactgtccatccattgaggataaggtagttaagtttgcggataaggacaggcatcagattttcattgagccggaaggacttcacacgaatgagatgtatgtcggaggaatgtcctcatcacttccggaggatgtgcagcatgagatgtaccgcaccctgccgggactggagcatgtgaaaattgtccggaatgcctatgcgatcgaatatgattgtattaatccgaaccagctgtatgcatcccttgaatttaagaagatccggggacttttttccggagggcagttcaacggcagcagcggttatgaggaagctgcctgtcagggactcattgccggcatcaatgcggcgatggaaattctcggaagagagccgctggtgctggaccggtcggaggcttatatcggagttctgattgatgatcttgtgacgaaggagaatcatgaaccatatcgtatgatgacgtcgcgtgcggaataccgtctgttgcttcgccaggataatgcggatctgcgtctcacgaaaaaaggatatgagatcggtctgatctcaaaagagcggtacgactgggtctgtaaaaaagagcagatgatcaaagaggagattgaccgtgttgcgaaggttcatgtaggtgcgaacaaagaagtgcaggctcttctggagagttacggtagcatatcgttaaataccggtgtgacgttaacagaactgatccgcagaccggagcttgattatgataagctggcgccgattgatcatgagagaccggtacttccggaagaagtgagagaacaggtcaatattctgattaagtatgacgggtatatttccaggcagatcaagcaggtggaaagctttaagaagctggagaagaaaaagataccggaaggattcgattatgatgaggttccgagtctgcgcattgaggcgcggcagaagttaaagctgtacagtccgacgtcaatcggtcaggcgtcgcgtatctccggtgtatcgccggcggatgtttcggtattgctggtgtacatggaacagatgaatcatcatggggaacatcattcataggagtatcattcataaaaagaaaaacagcgcagaaatggagatttgtgttttgcac

SEQ ID NO: 11671 - DNA, 15876 bp, Unknown
  gut microbiota DNA sequence
agacaacgggaatcgaacccgcctcctcagcttgggaagctgatatactaccgatgtactatgtctgcaaaacacatattattattatagcgtaaataaaaaagattgcaaccactttctatgagagttgttcggcaaaattgtttctgtacaggattagttgtttaaatcgtgtatcggaagaagccttgccagaaacatggaaagacagaagctatgcttacaaaaacaaaaccagaatcattgacacataatttgtgcaaatagacgaaaaaataaatgaaaacgcatgaaaagtaaaaaaagtgttgaaaacaggatagaattctaggggttttttgtttggagttatatataatgtagatataaggaggaaggaggaagcgtagatgcaaatgaaacttggaaagcttctggcagagaccaagacgggagaaaaaagacagattgagcctgaaaaagatggaagaggacaaaagtatgaatttgaactggcggggtatcatttttttgtaagagacatggtaaaaaaaacagaagaaagtgataaagagaatcaagaatattttatcacaagaagaattgtgggaaagagaaaggaagcttctggaaagaaggaaggaattgcactatcaatgtaccttgagtttggagaggaaacggatatttttcgagtgggaataccgtcagcggtatatggtgcatatgtaagtcgagaggaaagtacatatcactcctttatggaggatcgcctgacaggagtgatgctgcttttatttgatgaggatcataagaaatcaacggttgtgcagaagatgaaccctgcaaaatatatagaaaaggaagagcggaaacgtggagagggcaggtacctgcataaaacagagactacgtccatagggtatggcttcggggaagcagcttatgtaaaactctgctggccttatgaggaacgggaaaaaagtgtggcgcttgattcaatggagactcctgcacaggcattctatccgttggaggaggaacagatagaacttgttttggaatacagggtggcacacaaagaatgcaaaacctttacggatggtctgtatcaggaatatcaggaactttcgcggcggcttgtgaagagaggagagaagacagtgcgcttgcctttttctagggaagagggaatacaactccgaagaaagtgtgtaggcagaacttaccgggaatttggtccggatggagcgggttttttcttcgatttcgaccctgaatatgggtatgagtcggaaccttccggattcgggacgtctttccacacgattccacataagacttacacgcatattctggaatacggatttaccggacgtcagcttaatattgcgcttgatctggcaatgcatagtgaggactatttcaggaaagctgagagggtcatagatttctttgtgaattactgtataacggaaaatgggtgggtgtactcattgtacgatacagaaaagggagcgccctttgcgtccttcggagatgcttcagcgcctcggttgcactatatgtactacgaaaaatgtaagggcaattatttgagaactatgacagagccaatgctggatttgttggaggcatatctttggtatcggaaaaaaggagtaaaaaaggaaaagtggctggagagcgttatacgctttgccaattttctgttagagaagcagaatgcggatggctcctggtgtcgggcttattccatgaccggagagccagtgtatatgaatgatcgggaggactacactacggaagaaaatgacagagggagaaaagcttctacgattattccggtaatgtttttgtgtgcgctggcaaactgcctgggcgaggaaaaataccttcaatcggctaaaaaagcgggcaattatgcattggagcatgaggtgagatgggaactttaccaaggcggaaccatggataatcccaatgtcgtggataaggaggcctcccaatatatgatggcaggtctgtatcatctctaccagatgacaaagtctccagaatatctggaaggggcactgtgcgctgccaagcagtttgttacatggaattatatctggaacgcacctatgagaaaaggaaatattcttttttccagaggattttgtacgaagggaatgggagccattaattccatctggtgcggtggtgtggttgacatatactcgctcttccatatccgggagctatacttgcttgggaaagaagcagaggaatcatttcttatagaaatggcagaagatatcagcattgcaacccaacagattctgtcatggtctggagataccatgggcttttgcgatagtggcatgcagccggagggatttggaatctgccctcagggaatggatgagggaatgattgaaaagggagatatctggggaactctgggttggatctactcagctggaatctcaggaatggagcggtatttgaaggtgataacatagaggctgttctctgtccaggcgccggacagaatagtatgataaaagaaagcaaaaacaaaaggaggatttactatgaagagaagaattacaagcatgctgcttgcagcggcaatgaccattactatgctgacaggatgtggcagtcaggggaaagaaacagaaaaaacagatacgggtgcaattgtattggacatgtatcatagctggagcaccgacagcgaaagaggagcggctttggacaaactgatacaggaatttaataaggaatatgagggaaagattgaagtaaaagttacaattaatcccgatttcccagcatatcaggaaaaggtaaaaaccatgatttccactgacacaacgccggatatttttcattataattttaatcctaacgatttatcgagacagaagtcaggaaaactgatggacttttcggaatatatggatgacgagtggagagctagatttggagagggagatcttgaaaatctgaccatagacggagagattacatctattccttttgaaaaggcaggagcagttttctattataataaagaagtatttgaaaaagctggaattacggaatttccaaaaacctgggacgagcttttggaggcgtgcaaaaagattaaagacagcggtgtgacaccaatttccctttacacggcagatgatgcatggtatacctgtaatctgtttacatatcttgcggcaggctatgcaggtgtggatgcactgaacaagggcggcgatatcaatactgaacagatgaaggcggcagctgcaaagctgaaagagttctggaattatacgacaggagatgctataggagcaaactattctgtggcaatgaataattttgcatctggtaagactgcgatggtaattgacggaccttggctgattggctctcttggtaacgatatcaaggataagattggaattgctcaggcgcctacttttggagacggaaccgtatctgaaaattatgtgattacagatgcacaaacaccatgggcagctgcaaagacagatgataaggaaaaggcggaggctatcgtaacctttatgaaatacattacttctgaggaaagtgtaaagcaacttaccctggaaggggcggtgttcctttctccgaagcttgatatggaagatccagatgtacagggaacaggcgggcttctgggagaatacctcgctctgaacgcgaacgctgaggagagtaccgtaaatatccagagaaacttaagcacagcagccaattcgaagctgccgtccctgttggaagagcttgcccttgacaggctcacgccggatgcattcattgaacagcttgcggcagaaaataagtagataacccaaggaaagagaaggagcgtgtactatgaaaggacaacaaagactgttgtatttacttcccgcctgtatattggtgtttgcctttttcctattcccattggcttatctttcctatataagtttttttgagtgggatggtttaggaccaaagacattcgtgggatttgagaattttgaatatgtgttttcggatccgattttccggacagcagtgaaaaacacgattgtgtggcttttatcggcactgctccttcatatcccttttgggcttttgttggcacttttgctgaatcgaaaaccaagagggtggaaggtatttcgggtaatgtattttatacctaatgtgatctcaaccacagccattgcatttttgtggtattttatttaccatgtggacgtaggacttttgaacaatatgttgaatgcggtagggttaaagaaactgacccatgcatggcttaatgatccaacaacagctctgtggtgcaatctggttccatttgtcgtgtatgtggggttgacgatgattatctttatgacgcagctttcgacgataccgaaagaactttatgaggcagcggtcgtagatggagcaaccagcctgcaggtggatcttaaggtgtatctgccattactgaaaccagcgtttatcacgaatattatgttgaatctggcattctgtctacgtacctttgagtatccgtttttaatgacgggaggaggaccggcaaacagcaccatgaatctgtcgctttatatttataaagagatggtgggagcaaaccggtatggcatttccatggtagcaggtcttgtgacagtatttatgggattgattgtaatggtattcgtcaatattctgcagagagaaaggaggaactgccatgcataagaagaaaataacaccaacgggagcattgctttatgtatttctgacggttgtactggtatttatgatgattccgtttgtctggcttctgatttcctctttgagaccgaatgcagatttgttcaatgaaccatttgcagtgcccaaaacgttgtcctttgaaaatttccgggcggttatggagagccatcccatgcttttgtactttgcaaattcggttgccattgcagcgattgccacggtaatagctgttggggcggctacgcttgccgcctacgctatgcagcagagatttttaacaaggaagagcctgacggtattattttccatgtgcctttttattcctaccaatgcatttatggtgccatattatgttatgattaataaaataggactgtacgataatgtactcggaattgccttagtatatgcgggagtgaatctgcctatgagttttatggtaattaagggctatatggatacgattccgggtgaacttttggagtcagcaaagattgatggagctactgcaggacagtctttctggaagattattcttccggtatcgaagccgggaattgtgactgcatgtatctttctggtcatcaattcatggaacgaactcctttttgcaaacctgctgaatcaaagtgactcttccagaaccattcaggtggcgatccggtcgttccttacgacttttgaggctaattatgcatatgcttttgcagctatggtaatttctatactacctacaattattatctatgcattgctgacagatcggattatcggaggtatgactgcaggcgcagtaaagggatgattgcaatgaaaatcatgatagtagaggatgaggaaaatataagagatggcattagaaatctcgtagactggaatcaggaggggtttgaagaacccctgctgttttccagtgctgtggaggcgcttgtgtttttagagacagagacagtggatgtggtgctgacggatctctatatgccggtgctgaatggaattgaatttatccgtatgctacgagagcagaaccaagtgtgcgaggtaattattctgacaggacacgaacgttttgaacttgccagagaggccattgcattaggagtaaagcagtatctgctaaagccggtgacggggcagacgcttttaacagaactgcacaaagtcagccgggaaattcaagagcggatgaggttaaaggactgggtcgatattgcgaagaaaaagcttcatgactatcttccggtcattcagaatcagttttggaatgatcttttgttaggaaatttaattgaactgaagaaaattaaggagagagcggaggaggcggagataagcattccggagtcggaaatgacctgccttgcggtgcaaaggaagggggaacagctggaaagagacaggatcaccagagaaatggcgcttcgggaacttacagaagaaatattaggggaaaaatatttgggtgctcttttttataacggaatggagatggtgatatgcaagggacggatttctagagactatgtggagattctgaatgagtctgtcaagcataatttcggctattctatttcaattggagtaagcacggcacaaaaagatgcgacaaatctgagaaatctggcaagagaggcgatggatgcggtgcagtccattcatgaagaggatgtaatatcttatatctattaccgggatattgaaaataaaaagaaggaaagggtggaatacccgtacgaggaggaacgaaggattttacatgagattcgatttcagaggcttccagacaggaacttgcttcggaaatttttagaaaagcttcttcctccccggtattcggtggaaaagtctaaaatgctgcttttacagttccttttagcacttgtacggatggcagatgaactagagatagatgttgcgacggagtttggaaaagcggaagcaagcattgagagtctgcagaaggtggaagaagcattggagagaatgatcacaagaatggtcagtgagaaagagaaaatgtccagaagatatacagagattcttgtacagtcggcaagaaactatattcaggagcattttgctgacgaggagctttcggccggaaaaatagcagaagcagtgggagtgacacctaattatctgtccagaatttttaagagtattacaggagatacctgtgtcagtttcctgagcaaggtaagattggatgaggcaaagaaacttttgcgtgactcttcatttaaaagctatgaggtggcggaggcggtggggtacaagaatcctaattattttggtgctatgtttaaaagatataccgggtatacaccgaaggagtaccgggaggcttcgtatgaagataagaattaagtctgtcaaaagcaagataatcgttttctttatcggtctggcagcgttccagatctgtgtgatggcagggtttgccaaattgcagttggagccatccattgtgagtatgtattcagaacatttagaacgatttgcagatgtggcgttaacagaaacgacacaggagacggagaagatagaacgttatatggtaaatatcatcggtgatgcccagattcaggatttcctccgcagagcggacgaggagcagagtgcagaactgccgccggtgttgtctacagaacttcgcaaccggattcttagctatacagattacgataatattattacggcaatatatctcgtggataattatggaaggatttacagtaatcttgggaaaagccctatgcagacctttatgaaccgcaatcaggagttgaaagacagaaaggaggagtctgctgtctggtatggaggggaaaatggaaataccataacggtgtaccggaacgtcaataataacaccacagatctcacacaaaagatcggagcgttgtgtatttttatagaccgcaagatgtttcaggaacgcattgacgatctgatgatggaagaagaacagcattatgttctggaaaatgaggagcggcacctaaagatttcttcagatcaggatgagacagaagaaagggacagtattgtggtgatgagaacggatggcaggtgggggctgagaacctggattgaaaaggatatcatttaccgaccggtgaagatgatgatgcggatcctgctagcagaactttttgcactgcttctggtgagtattgctctggtggtatttctgtcagaacggattacaagaccaatacgtaagcttactattgccatgaaggaaattggagcgggaaatattgatacggtggtattagatgagggggaggatgaactagggcttcttgcagcaaccctgaaccgaatgtcaaaaagcatcaaaaagctcatggagcagattcatgaggatgagaaacagaaacgatatctggagctaaaggctatgcagtatcagattaatcctcattttctctataacacactggactctattgccatgtctgccagaagaaatcaggataggcagagtgaggaaatgacccatgctctggctgaatttttcagaatcggactaagccacggagcggaatatgtaacagtggaaatggaggttcggtatgtaaaagcctaccttgaaattcaaaatatgcgatttcccgatttattgacatgggagtgcagtatagaacatggacttgaggagataaaaattttaaaatttattttgcagccgctggcggagaatagtatttatcatggctttcgtgactcgggagagtgcggtcacatagagattcgtgtatataccagcggaaaaaatctgcaactttgtgtatccgataatggaattggaatgatgccggaacaactggaaattctaaaaagcaggatggcttggaaacagatgacagaacagagtattcaggaggggggatttgggctgcagaatgtacagcagagattgcagcttgtgtatggtacgaaagccggacttcacatagaaagtgagtgggaggaaggcaccaggatcacggtagtgattccggatataataaaaacacattcagaaaaggaagggagtgtttgatatggaaaaagcaagaccggtttcgttgaaagagatacgtattagggataacttttgggataaatatcggagacttgtaagggaggagattctgaaatatcagtggtgcgctatgaatgatcagattgagggcgcgcctaaaagtcattgtattgaaaatttccgcattgcagcaggagaaaaacagggagagttttacggggctgtgtttcaggactcagatgtggctaaatggctggaagcggtagcatatacattggcagagaaaccggataaggaactgaagaaactggcagacagtgtaattgaactgatcggtagggcacaggagccggatgggtattttaatacatattttattctgaaagagccgggacagcggtttagaaacttaagagaagggcatgaactatatactttggggcatatgattgaagcggcagtggcatataagcgggcgactggtgaaaaacggtttctggagattgtacagaagatggcggatctggtggcaaatactttcggagtggaagagggaaaacgcatgggaatgcctgggcatcaggaaattgagctggctcttatgaaactttatgaggaaacgggtaaagagagctataaggaactggcaaaatattttattgatgtacgtggctgtggaaatagaaattattttctggaggagatgaaacaaaaggacgtaaaacgtatttttccggagcttaacgactatcgtccggaatattcacagtctcaccttccggtgcgcaaacagcgcacggcggaaggacatgcagtgcgggcagtttatatgtatgcggcaatggcagatattgcagcggaatatgatgatgaagagctgcttggcgcgtgtgagacgttatggaataatatggtgcatagacggatgtatgtgacaggaggaatcggatcatccgggattttggaacgctttactgcggattatgatcttcctaacgattataattactgtgagtcctgtgcatctatcggactggcgttttttgcgcggcgcatgatgcagattacaaaaaaagcaaagtatgtagaggtgatggaacgggctttgtacaatacggttcttgcaggtattgcaatggatggaaagagttttttctatgtcaatccgttggaagtatggccaccgagctgtatggagcgaacctccaaagagcatgtgaaaagtgtaaggcaaaagtggttcggagtagcatgctgcccggccaatatttcaagaacgcttgcgtcattgggagaatatatttatgcctgtgagaaagatactatctatgtgaatttgtttataggaaatgagacgcagattacagtgggagaacagaaggttcacctgtcattggagactgacttcccgtggaaaaatcaattcaaaatcaacgtttccggcgtgaaggaaagcgtacagcttgcagttcgtatcccagaatatgcgcaggattataaaattttctgcgagggaagggagcagttttacaaggaaaaagatggatatgcctacataacctgtgaaaagaacggaaggtatgaagttcagtttgtttcagagccacgctttgtgagggcaaatccaaaagtaagagcagatgaaggaaaggtctgtgtgatgtggggaccactggtatatacagtagaggagacggacaatggagaaaatcttcaggctctttacatagatactgccaagccggtaaaaaaaagtgaaaaagaggaatttccaatgttgattgcagcaggaaagcgtatatgtgaaagcggttggggcgaggaagaactttatggaagtcatcctttggaatttgcagaaacagagattacgttggtaccttatgcttattggggtaaccgggaaaacggagagatggcagtgtggttgaaggagtatctgtctgatagaaataataagtaaaaaaggatatgttccacttgatatactaccctcataataggacaatgaaatataaaagtcctatatgagggcagtttcatgtccagaaaaagtaagataagtccaatataaaaggtcaaaatagttgagcaatagttatatgttttgtgagagatcagtgttgaagtggagacgaatatgatataatgaatcctatcggattcatattagaagttcctacggaacttcggatgcgcagaaagcagcgcaaaaagatgatagggcgaatgcccgtcagtccgggaaatctttgatttcccggacgagcactgcgctacaggaaaagggaaagttattgtgccgcgcccggacatttgccggagcgtagctgatttgcatgccgggcactgcgctactaccagaggagaaaacaatgaaaacagttgcaatcgtggcgtgttccaacgggcagaaagaagaatatcgaagccagaacgaggaactggcacggtatctggagaaaacaggacacaaggttttatggagcaatgatatctatgaaaaaaatgccgcattttcaggtacgggagcagagcgcgccgcggaactgatgcgtttcttcaatgatccggaggtggaggagatctatgacatttccggaggagatctcgccaatcaggtgctggacgggctggattatgccgccatcggaaaaagcagggcagttttctggggctacagcgatctgacgacggtcatcaacgccatctatgcacagaccgggaaaagcagcgtgctctatcaggtcaagaacatggtctggggagagataaaagaggtgcagcgacggagatttgagaaccgtacggcgctgtttgacccgcaggttcgctttgtgcagggggagaagatggaaggcgttgtcgtcggcgggaatatccgctgctttttgaagctggcgggaacccgttatttcccggatctttgggacaagattctgctgttggaagcatacggcggtgaggtgccgcagatggcgacgtatctggcgcagctaaagcagctgggggcttttgagaaggttggaggaattttactcggaacatttacggcgatggaggcgcatgcatgcagcccggatatcactgcactggtgaaggaggcggcaggaacgaagattacgattgcaaagacacaggaaatcggtcacggaaatgacgcgaaagcaatccggatcggagaaaagatatactgctgcggagacgaagcatgtcgaagcgttgttacagatgctgaaaggagacagttggaaaccagatgaaaaaagagatgacatacacagaactagcgaaagagacggcaatcctgacggctgccgtggcgattatcgccgcagccgtatacttttttctggtgccgagccacgcatccgtcagcagtatctccggtctcggaatcgtgctgtccaactttataccgctgccgctgtccgcgatcacgatgatcttaaatgttgtgctcttaatcattggattttttacctgcggaaaggaattcggcgtgaagacggtctacaccagtgtggcgctgccggtatttctgggaatttttgagagaatgttcccagattacgaatcgctcaccggcagtcaggaactggatgtgctctgctacatactggtggtcagcgtgggactcagtattctgtttaaccggaatgcgtcttccggcggattggacattgtggcaaagatcatgaacaaatatctacatatggagttgggaaaagccatgtcgctgtccggtatgtgtgtggcgctttcggcggcgctcgtctatgacaagaagacggttgtgctcagtatcctcgggacatatttcaacggcattgtgctggatcattttatttttgaccataacatgaagcgccgcgtctgcatcattaccgagaaggaagaagaactgcgcaagtttatcatagaagatctgcacagcggagcgacgatctatgagtcaatcggtgcatacaatatgcagaagcggaacgaaatcattgctatcgtggacaaggcggagtatcagaaactcatgaattatatcagccgtgaggacccgcatgcattcatcacggtatacacggtgtcagatatccgctatcagccgaagcggcagcaatgaagaatgcgatacaactgttgtaaaaaggagaaacatacatggaaatctacgataacggagacagttcatacaaaactgccggggcggaaacctaccatctgccggttctgtatacggaggacgagcgcagcagctacgccgtatggggcataaaaaaagaaaaactgttgctgccgttcgctgttgtgacgatcatcattgacgcgtttgtgctctgtgccacggtcgtttatctgtttgtgaaacagcggcagacgccggcattttccgtctggctttcctgttggggcggtgtggtcggcgatgtctcctatggtgtggcgctggtcttgacggttcttattttaaagccgctcgactggctgttggataaaatcatgcacagaccggagcaaccaaagatgttacaggtgacgccgaaggaaacgggcgtctcgtatctcattcttcgcggtacaacggtacttgcgcaaggactgctcccgtggaatgcgtgggaggctgcgctcactgtggagacgaatgagatattgctcgaggggcagagactgcggatcggaagcaatacgatcgcatcgatctatccgcctgagaaacagaagccgtggatggatcatccggcggagcagataacgggaaccatcagcctggcgcatatccggaaaaatatgcaggggtacctggcgtccctggaagaacagaaaagggaagcagagtggagacggcagaatccatagatctgccggtggaaaataaaagaaaatggagacagacacagatgagatatccgaaaaatttatccgaacatggaacgatcggttttgtggcgccatccttcgggtgtgcgactgagccgtatcacaccgcatttttgaacgcacagaaaaaattccgggaaatgggacatcccctggatctcggaccgaattgttatgccgactgcggaatcgggatcagcaacacgccggaggcgtgcggcagagaactggcagagtattattgcagcgataagaatgaggtgctgatctcctgcggtggcggggaactgatgtgtgagacactggacgcggtggattttgaacagatccgggcagcggtaccgaagtggtacatgggatattccgacaatacgaacatgacatatcttctggcgacgctctgcgataccgcttcgatctatggcccgtgtgcggcggcgttcggcatggagccgtggcatcagagtctttcggatgcatatgcacttctgcgcggacagaagcatacggtaaacggatatgatctctgggaaaaggaaagcttaaaagatgccgagcatccgcttgcaccataccatgtcacggaacagcggattttgcatgttttcccggaatcgacggaggcacttacggtgcagggacgcctgatcggcggatgtgtggactgtctggtgaatcttctggggacaacttatgataaaacaaccgggtttgtggaaaagtataagaatgacggtatgatctggttcctggaatcctgtgatcttaatgtgatggcgatccggcgggcggtctggcagatgaagcatgccggctggttttcccatgtgaaagcttttctgatcggaagacctgccgtctacgggcaggaactgatggggctggaccagtaccatgcggtgtgggatctgttgaaagattacggggtgccggtcattatggatgtggatatcggacacctcgcaccgatgatgccgctggtgtgcggaagctatgcaacggtgcaggtgaacggaaatgacatctccgtgaagatggagtatttatagaataatgttaatatttttgccgatgccggtatttaagagggtatccagatccagactctgggatacgatctgtgccgcggtggtggcagtgccgtcatccggacttcctgtggtgctggatgtggtggtgccgtctgctgcggaagaaccggtggcagcggcattttttttctgcatcagccggttgttgtcagaagcgacgagcgcctcgccgcggcttgcaaaccgtttggcatatgttgaggtgcgctgcatgtaagccgcatcagcggaaaaaagttccttgaacttggagagatccgcactctcaaataaggttgtacggcttgtgagtgtgccgtcatcattgatggtaatgccgatcttatcgagttcggaagagtattcgctggtaatatttttcaactgctttgcactgcgctccaaggtacggtccgaggaactgccggcagaggaaagcatgttgttgtaggtctggatataggcgagcacgctgttgcgtgtgttggcgtcctggtcatccgaaaaatcagaggaagtcagccggcgtactgcctgacgaagcgccctgccgtctgcgagagcgagctggctgccactgaattcacggcgtttggaggaagtcccggcttcccggttggaacggtagaaactgcgcaggtaatatttggaacttaaggtggtgccggatccgatatacgctgtatttgacatagtgattcctccttaaaaagattctctaatatgtttcggcagaatgcggcatagaattaaccatagaaaacaaaaaacggatatgctatactaaattccaaagaattcagcctggaaacagaaactgctgaattctggtgactgggatgtatgagaggaggatatcatatggaagcaatgatctggataggtctgattattctttttgtgttggttgagattgcgacggtaggactgacgtccatctggttcgcagggggcgcgctgatttccctgattctgtgcctgtgcggcgtgggactgggctggcagatcggcgtatttttcgtggtttccctgattctggtggcatttacccggccgtgggcggtgaagtatttaaagccgcatctgatccggaccaactacgagcaggcaatcggtgaaaacgtatgtctgacggag

SEQ ID NO: 11672 - DNA, 327 bp, Unknown
  gut microbiota DNA sequence
agaaaggctatccaatctttttgactgggtagcctttgaaaatttttattcagtttttaatgattattcagctttaggaagtggaagtaataattcttcaactactgcaccagcactgaactctactttgattgcaccgccaatggtatcaagagcatatacttttgccaattctgcttcatcatttgttgttactctaataatgatgttgtttgtggtctcatatacgccagacgttacaacaaatgggatttccttatttaccattgcatttgttatcttttcctgtaactctgtgagatatgccaatgtgtaagtaccttttac

SEQ ID NO: 11673 - DNA, 158 bp, Unknown
  gut microbiota DNA sequence
cttatttaccattgcatttgttatcttttcctgtaactctgtgagatatgccaatgtgtaagtaccttttacgaaagtagtattgctttcacttctgccaagttccttacaaatagctgttctattagctggtgtatcttctgtaagaacgattacaa

SEQ ID NO: 11674 - DNA, 418 bp, Unknown
  gut microbiota DNA sequence
cttgtactataagcatgtagatacattatgtatgtatccgcatgcttatttttattataataaaaggcggataaggctagtgcggtgggacatagctcccgttttttagagtttattccgcctcttattataagcattcgtttaaacaggttggattaaatacatccgtgtaacgaacaagtctgaatggtaataagtctggcggagaaaaggaggatttgcatgaaacaaatagtaagtgtaggaatcgatgtatcaaaagggaaaagcactgtctgtgccatgatacatcctaatacgattattaaggaatcgtttgaagttttgcataccgtagaagaaatgtcaatgttagctgattacatcggatcacttgatggagaaattcgtattgtaatggaatcaacagggcattatc

SEQ ID NO: 11675 - DNA, 209 bp, Unknown
  gut microbiota DNA sequence
tctttccaagtttggagcactccgcgggtcatgtccgcatcccggaagacaatttgtaggacttttgtgtgtcccttattggcacctctgaacaaaacataaccgcgcgaagccgatgtctgagtcggcatctgcaatattttcaatagcagatgccggcgagtttcggttcgcgcggttttatattgtctgtgaagaggtgccattag

SEQ ID NO: 11676 - DNA, 402 bp, Unknown
  gut microbiota DNA sequence
gaggcattgacagatcagcaggtagccgtgcttctggatacagtcaagggacttcctccatatttgtttattatgctcggtttgtattctggtctgcgtcgggaagaaattcttgcactgcaatgggattgtgtatttctggacgaggatacaccttatctatcggtgaggcgggcatggcgtacagagcataacagacccgtgatttctacggtgctaaagactccggcggcaaaaagggatattccgataccgaagtgtttggtggattgtctgagagaaacgaaagataattccatatcagattatgtgattgctgacagcaaaggggagccgctggctgcttcgcagtttcaaagagtgtggcagtatgtcgttgtccgctccactaagccccggaac

SEQ ID NO: 11677 - DNA, 158 bp, Unknown
  gut microbiota DNA sequence
cttatttaccattgcatttgttatcttttcctgtaactctgtgagatatgccaatgtgtaagtaccttttacaaaagtagtattgttttcacttctgccaagttccttacaaatagctgttctattagctggtgtatcttctgtaagaacgattacaa

SEQ ID NO: 11678 - DNA, 817 bp, Unknown
  gut microbiota DNA sequence
aaaaatcagaaaggaggattgagtatgaacgacaaggacattattcagttgtatttaaatagagaccagcgtgcattatctgcaactgcaaagaagtatgggaaatactgcacttctattgcaaaaaatatcctaggtaataatgaagatgcagaagaatgcgtcaatgatacatatttaagtacatggaactctataccgccaactataccaacaattctatctgcgttccttgggaaaatcacaagaaatttagcttttaacaaatacaaacataatcatgtgatgaaacgtggaaacggagaaatagcagtcgttcttgacgaacttgcagagtgtgtatctggcgtagatgatgtagagcaagaaattgacagacgagaacttgtcgcaacaatcaattcttttctggaaaccttgccaccaaaaaagagaaacatattcatctgtagatattggtattctgacagcgtttcatcaattgcaaggcggtatgaaatgactgaaagtaatgtatcggttacattaaaccgattacgttctaaacttaaagaatacttatcggaaaggggttatgtattatgaaaaaagaagatttgtttgatactcttggtgacattaacaatcaatatattaaggaggctcatatgaacaacaagagaaaaaataattttgcatgggttaagtggggaacaatcgcaacatgctttgccttattggttttatgtattcctatggtaacacacttatcaccagtagaggataccaacacaccaacagttgagtcattaccaatcgaaaacaataataaagttga

SEQ ID NO: 11679 - DNA, 388 bp, Unknown
  gut microbiota DNA sequence
gcatgctttgccttattggttttatgtattcctatggtaacacgcttatcaccagtagaggataccaacacaccaacagttgagtcattaccaatcgaaaacaataataaagttgaggatttacagaacaacaaagaagaatctgtaaacattcaagaaagtaaaagtacagaaatcgaagatacttcagaaactattatagaagatgttcctgcagacaataagggagaatataacgaagaagtaaatagcagtgacttaaccaaagatacttcagagttttttggtggttcctatacagatgctaatggaaaatttgtaatcgttcttacagaagatacaccagctaatagaacagctatttgtaaggaacttggcagaagtgaaa

SEQ ID NO: 11680 - DNA, 896 bp, Unknown
  gut microbiota DNA sequence
ctgaaagcttatccttcgccgctcccgtcgtctccgcaagcttatccttcgctgcccctgtcgtctccgcaaatttatcctttgctgctcccgtcgtctctgcaagcttatccttcgctgtctgcggcagcccgtaaatattttccttcgtctcgctgatcttatccatcagctccacatgtgttttctggaatttctcggatttttcaataacgtctgtcacattttcatagatattttcgccgatctcatcggacagccggtgaatagacgccgccatctcatccatgacctttaagcgcttattgaatttcagaatcgtcgtgaccgtgatgatgcagtctgccgcgaacacgcccatgataatactgagcagcactacgccaagcacgaacggaataaagcggatggctgcataaatgatcggatgaatgatatccatgataaaggtacatgccagtccccagtagatcgaaaacttcaggcagacgtaacctttgatgttgaatggcttgtcagaatagtcccaccacttgttgtgaaatactttttccagaatataacccgtaatgtactccagcacagaggtgagaagaaaagatcctgcaaacaggatcagcagattttctttcagaggtgtcaggatggccaccacaatcaccacgccgcacccatagatcggacagtacggaccgtttaaaaatccacggttcacgaactttccggtatcgagtgcagcgtaggatacctcggtacaccaaccgataaatgcatagataataaaaatccagaccaattcataaaaattctgcggcataatcattctcctttgttccgtgccttctccacgtactcataagaatcattatagtccattgaaatttatgaaacaatcc

SEQ ID NO: 11681 - DNA, 181 bp, Unknown
  gut microbiota DNA sequence
acgtccgttggaagaagtgtacgctgtcgtatttatggatgctatccactatcatgtccgaagtgaaggacgcattgtaaaacgtgcagtctacattgctcttggcatcgatatgaacggaaaaaaggacgttcttggtatgtatgttggagaaaacgaaagcgccaagttctggctctcc

SEQ ID NO: 11682 - DNA, 739 bp, Unknown
  gut microbiota DNA sequence
gttgcttttgtctgtttctgtaaaaaagtctttgaaatatgccggaaaatttgttataatactatagtgcatctttgacatagcagatgtcggacaagcaatccggcagacagatgcaaataatcatgaaatcgaggaatcagatatggcattattagagcagtggcagaaagttgcttataatgagaaggcagacagaggagaactgcagagattctggcagagatattttcttctggaaaagggtgtctatgagaagcttctgacgaacccggatgagaaggtagagggaacggtcaaagagcttgcagataaatacggactgagcatcatggatatgacaggtttcttggacggtatcaacgagagcctggtagagccgaacccgatcgacaccatggaggaagatacgaaggtcagcctcgtattcgacaaggagaagctgtacaagaacatggtcgacgcgaaggcagactggctctatgagcttccgatgtggaatgacatttttgacccggagacgaagaagagactgtatctggagcagaagaagtccggaacggttatcgtcggaaagaaagtcggacgcaacgatccgtgtccgtgcggttccggcaagaaatacaaattttgctgcggaaagtaagcacaggcagcagagtgcaagggaagtaccggtatgtggtacttccttttttgtgtaatagggaacttcgttcctattacacaaaaacgctct

SEQ ID NO: 11683 - DNA, 172 bp, Unknown
  gut microbiota DNA sequence
tctgaacaaaacataaccgcgcgaagccgctgtttgagtcggcatctgccctatttttaatagcagatgccgacgagttcggttcgcgcggttttatattgtctgtgaagaggcgccattagggacaccagaaagtccgcccattgtctccggtgtgtcggacatgcacccg

SEQ ID NO: 11684 - DNA, 184 bp, Unknown
  gut microbiota DNA sequence
gcggcaccagacaacagatggcataaatgccatctttatgtcgaacaaaacataaccgcgcgaagccgatgtttgaattgccatctgccatatttttaatagcagatggcaacgagtttcggttcgcgcggttttatattgtctgtgaagaggtgccattagggacaccagaaagtccgctcat

SEQ ID NO: 11685 - DNA, 892 bp, Unknown
  gut microbiota DNA sequence
aatcaccgagtcatcgatcttaaagcaatgttcctcacccgggaatgttccctcttttgtctctttgatatatgctttgacgccctcgcgcatcacctcaccgacattcgcgaataccttcacaaatttcggacggaaatcgccgtacatggcgagcagatcctggtatacaagtacctgtccgtcacatcctgcccccgcgccgataccgatcgtcggaattgtaagttcttcggagatcttagccgccagcttcgccggcacacactccatcacgaccatgcaggcacctgccgcttccactgccttcgcatcggcgagaagctttttcgctgcctccacatcttttccctgcactttgaatccaccgaatgcattgacagactggggggtcaatccgatgtgcgccacaaccggaatggatgccttcacgatcgcctcgatgtgaggtgcaaattccacaccaccctccagctttaccgcattcgcgcggccttccttcatcagtcttccggcattgaccactgcgtcgtacacggatgtctggtaggacataaacggcatatccgcaactacaaatgcatcttttgcaccgcgggagaccgccgccgtgtgatgaatcatatcttccatggtcacagagagcgtatcctcatatccgagcattaccattcccaatgaatccccgacgagaatcgtgttgacaccggcttcatccatgatctttgccgtcgtgtaatcataagccgtcaccatgacgatcttatcgtgttcttccttctgcttctgtaacgtcaatactgtgtttttcatgtttccctccacttttcctgcgccccaggcgcatagactgtgttttcctgtttacactgtttccgcgcattccgcgccc

SEQ ID NO: 11686 - DNA, 17497 bp, Unknown
  gut microbiota DNA sequence
caggcagtgaggggatgcggaatgaagagacagaagatgaggacggagcagaagtctaatgtgaaaaacagtgtgggaagactggtgtttgtgggattatccctgcttttgcaggttttatggattctgctgctgtttttgcggttgaatgcatattctacggcaatcagtttatgctttagtgtaggagcatttcttgtggcgttaagcatttacgccaagcacgagaacgctgcgtttaaaatgccctggattattctgattctggcgtttccggtgctggggctctgcatatatctggtgtttggacacaagaatgtggtcgcaaaggcgatgcgcagacgctttgagacgattgaaccggtgctgtttgagcagattccccaggatgaggcagtgcttgggcggctggaggagcaggattttgcggtggcgaaccagtgccgctatatcaagcggttcgggcattatccggtgtaccggaatacggatgtgacattttacccggatgcggctgagggacttgcggctcagctgcacgatctcgcatcggcagaacattttatctttatggaatatcacgcgatcgaggaagcggaggcgttcggcaggattaaggacgtcctcgccgagcgtgcggcacacggggtggaggtacgcctgttttacgatgatgtcggaagtatcggctttatcgatccgggctttatcaagcgcatggaagccatcggcgtagagtgccgggtgttcaatccggtggttccggtcttaaacattttcatgaacaaccgcgatcacagaaaaattacggtggtggacggaaagatcggctacacgggcggctataatcttgcggatgaatattttaatatcacgcacccgtacggaacctggaaggataccggaatccgcctgacgggagatgcggtggcaagcctgaccgtgacatttcttcagatgtggaatgccacggcggaagcggatcatgagtttcagacgtattttccacagctggattaccgcgcggcagacgctggttttgtgcagccgtatgcggacggtcccctgacggacggctattttgcggaggatgtttatttgaatctcatcaagagtgcgaaacactttttctatgcggcgacgccgtatctgattatcagcgatgatatgacgagggaactgtgtctggctgccgagcgcggcgttgatgtgcggattgtgacaccgggaatcccggataagaagttagtgtatcagacgacacgctcctactatgcgcctctggtgcggcgcggcgtgcgtatctatgagtacacgccgggatttatccatcagaagcagacactttgtgatggggagacggcgacggtcggaacgatcaattttgactatagaagcctgtaccatcattttgagaacggcgtgctgttgcatggctgcggggcgatcggtgccattggagaggactttgcgcagatatttgaggtgtcgcgcgaggtgacggaacagtataagggaaagcggagtatggggcttcgcatcatacagtgtattctgcggttgtttgcaccgctgttataggagaagaaaaatgcgacgcattgcgtctgcggaacggaggtttttatgctgagagagtggaaagagccggtaagacccggggaagaggaattaaagatgcgccttgcggcagccagggaaaagcttgccgcccagcagcttctcatcaaggagcagaaagtgccggtactggtgctgctggaaggctggggaacggcgggaaaaggctactgcatcggtcagatcatcgagaatattgacccgcgccattttaaggtggagtccatggagagaaagaccggggaggaagagcgcaagccgtttttataccgccattttacccggattccggaggcgggaaagtttgtgttcttagactccggctggatggatgaggtggtggaagagcgccttcacggggggctttccgaggaaaaatatgcaaagcgcatcgagagcgtgcggcgttttgaacgtcagctgacggataacggctacctcgtgatgaagtttttcctgcatatctccaagaaagagcagaccagacggatggagcgcctcacggatgaaaaggacaccgtctggcgtgtgggaaaaaaggatctgtggcagaacagtcactacgagaagtgcatggatgcgttttcttcctatttgaagagcacgaatatgccgtccgcaccgtggtatattgtggatgcaaagtcgaagaagtggacggaattgcaggtgcttgagacgctgacgcagggaattgacattgcgcttgacaaccgtgatatggcggttccgcttctgcagaatgtattcccgttagagcgcatgccgcttctctcggagataccgctcgataagacgctcgatgaggagacgtaccgcaaggagttaaagcatttaaaacagcggcttggcgagctgcacaaccgcctgtaccgcaagaaggttccggtcatcatcgcctatgagggatgggatgctgccggaaagggaggcaacatcaagcggatcaccagtgcgctcgatccgagggggtatgaagtgcatccgattgcaagcccggagccgcatgagaaggcaaggcattatctgtggcgcttctggacgagactgccaaagaccggtcacatcgcaatttttgaccgttcgtggtacggacgtgtgatggtcgagcggctggagggattctgcacggaaaacgactggatgcgcgcgtacaacgagatcaatgaatttgagaaggagctgcatgactggggagccgtcatcatcaagttctgggtgcagatcgacaaggatacgcagctggagcgctttaacgagcggcagaacacgccggaaaagcagtggaagatcacggaggaggactggaggaaccgggaaaaatgggatcagtatgagacggcagtcaatgagatgatcacaaagacgagcacgacctatgcgccgtggcatatcctcgagtctgtggataagaagtacgccaggatcaaggcactccggatcgtgattgaggagctggagaaggcactcgattaggttctgttttagaatgacagaaatatgcaaattatgccatgcgtggcaatacaatttcgccctctgtcttactataatattttcagaaggaatgaaaataggaaggtaagacagggggattttttatgcagtacggacattttgacaatgagaaaagggaatatgtcattgaccgcgtcgacctgccggtatcgtggacaaattatctcggcgtgaaggatttgtgcgtcgtggtcaatcatacggcgggcggttacatgttctatcagtctccggagtatcaccgggtgacgcgttttcgcggaaatgcggtgccgatggaccggccgggacattatgtgtatctgagggatgcaaaggacggagactactggagcatttcctggcagccggtgggcaaaccgctggatcaggcaaaatacacctgcagacacggcatgagctacacaacctatgagtgcgattacaagggaatcaaggcgagccagacactcatggttccgatggacgatgcggtggagctgtgggatgtgcgccttaagaacaccacggacaaagagagaagactatcggtattttcgtattgtgagttctcgttccatcacattatgattgacaaccagaatttccagatgagcctctactgtgcaggatcatcctacgatgagaatatcatcgagtatgatctgttctatgaggaattcggctatcagtatttcacgtcgaatgtgacgccggacggatttgactgtctgcgtgacagctttctgggagcataccggacggaagacaacccgattgcggtggagcacggaacatgcagcggttcccatgaacttgggaacaatcactgcggaagcttacagaaggatcttgtgctggcaccgggagaggaagtacggctgatcttcatgctcggagagggcaaccgcgaagcgggaaaaaagatccgggaaaaatattccgacatggcaaatgtggatgcggcgtatgcacagttaaaggactactgggaaaataaatttgcacagctgcagatcaggacgccgaatgagggaatgaatacgctcatcaatacctggaacctctatcaggcggaagtaaatatcatgttttcgcgttttgcatcgtttatcgaggtaggtggccgcacgggtctggggtaccgggatacggcacaggatgcaatgacgataccgcactccaatccggagaaatgcagacagcgtatcgtggaactgctgcgcggactcacgaccaaaggctacggactgcatctgttctcgccggaatggtttgacccggatgcaaaaaaggaaaagaaaaagccgtttaagtctccgacggtcattccgacagtgaacgcgaacgacattgtgtacgggctggaggatgcctgctcggatgatgcgctctggctggtgccgtccattatcgaatatatcaaggagacgggagatgccggatttgcagatgagaccgtgacctatgccgacggaggcgagggaacggtatatgaacatatgaagcggattttggatttttccgcggaacaggtcggcgcaaccggaatctgcaagggactccgcgcagactggaacgattgtctgaacttaggcggcggagagagcgcgatggtgtccttcctgcattactgggcgatctgccacttcctgcagctggcagaatatctcggacgcacggaggatgtggaaaaatatcaggcgatgcgcgagcgggtaggaaatgtctgtaacagggaactgtgggataaggaatggttcatccgcggtatcacaaagaacggaaagaagatcggaacatcggaggatgcggaaggaaaggtacatctggagtccaatgcatgggcagtgctttccggtgcagccgatgtggaaaaaggaaaacgtgcgatggattccgtggataagtatctgtttacgccgtatggaattctgctcaatgctccatcgtacaccgtgccggatgacgatatcggatttgtgacgcgcgtttatccgggactgaaggagaacggctccattttctcccatccgaatccgtgggcatgggcagcggagtgcgtgctcggacgcggcgaccgcgcaatgaagttctacaatgcactgtgcccgtattatcagaacaacatgattgagatccggcagtcagaaccttattcgtactgccagtttgtggtcggaagagaccacacagcattcggacgggcacgtcatccgtttatgaccggaagcggcggctgggcttatttttccgcaaccagatatatgcttggcatccggccggattttgaacacctgaccattgacccgtgtatcccggcagactggagagagttttctgccgtcagacgctggcgtggggcagagtacgatattcacgtggaaaacccggacggcgtgatgaagggcgtgcaggaattgtatctggacggagagaaggtcgaacgtatcccagtgatggcacagggaagcagacatgacgtcagagttgtgatgggatagcacaggaaaagaaaggggacattgatatgatcaaatttggaaccggcggctggagagccgtgattggagacgattttacaaaggcaaatatacagcttctggcgcaggggctggtcaacaaaatgaagagcgagggtgtgaccgagcagggcatcgttatgggatatgaccgcagattcctctccaaagaagccatgcagtgggcggcagaggtatttgcagcggcacagatcaaggcatacctgatcaacaaatcctcgccgacaccgcttgtcatgttctacgtgatgaagcatgattttccgtacggaatgatgattaccgcaagccataacccggcaatctataacggaatcaaggtgtttactgcgggcggtcgtgatgccgacgagatccagacgaaggatctggaggactacattgccgacatcgcatcggacggcgtctgcgcggttgcatatgaggatggaaaagcggcgggctatatcgaggagatctatccgctcaatgagtacatagacaatatcattgcatcggtggatatgaaagctatccgcgacgctgatcttaaggtggcactggatccgatgtacggcgtgagtgagacatcgttaaagacgattcttttaactgcccgctgcgaggtggcgacaattcatgacagacatgatacgctgttcggcggaaaacttccggcgccttccgctgcaacgctccactcactgcagaattatgtggtggaaaaacagtgtgacatcggtatcgctacagacggagatgcggaccgtatcggcgtgatcgacgacaagggcaatttcctgcatccgaacgatattctggtgctgctgtattactatcttgtaaagtttaagggctggcatggacctgtggtgcgcaatatagcgaccacccatatgctggataaagtggcagagcagttcagagaaaaatgctatgaagtgccggttggttttaagtatgtctccgctaagatgcaggagacaggagccatcatcggaggcgagtcttccggcggtctgaccgtacacgggcacatcaacggaaaagacggcatctatgcggcggcgcttctgatcgagatgctggcagtgaccgggaaaaagctttcgcagatcatggatgatattcacgcagaatgtggggagatccatatggaagagcgtgattataagttcacactggagaaaaagcttaagatgcaggaagttttaatggagcagaagcagctgccggatttgccggaagagattgaccatgtctcctatctggatggcagcaaggtctacttcaaaaatggaggctgggtcatcgcccgcttctcaggcacggagccgctgctgcgcattttctgcgagatgccggatgccgtcgaggcggcggacatctgcaccagatacgagcagttccttgacctgtagagcacaaaaacgccacattttacattccattccgtgtcttgccacgctttgacaatccaccgggggaatgtccgacaagcacagacaatgagcggactttctagtgcctctaatcgaattgcttcacagacaatataaaaccgcgcgaaccgaaactcgttgccatctgctattgaaaacatggcagatggcaattcagacatcggcttcgcgcggttatgttttgttcagcaattcgataagaggcacacgaaagtcctaaaattgtctgcagcttgcggacatctccggtggagtgctcaaaacttggaaagacacggtatacctagtccgcgcggcggtgttctgctataatggagagagaaaacggggaggcagccgtgtgaaaatacatttttttcgcatgcaggaatggagatttttatggagaaaaagagacgactgtcgtcattgaagaagaaaattatagtatttgtcatcctgtgctggggcgtcccgatcgcggtattttttgcatataccaccagctcctaccggaagggaatcattgagaaaacggaaggactgatggaggatcagcttgagaatatggcttcctttgcgtcgatccgcattgaggatgccatcacgctctgccagagaccttcctatgagaagacctgggagaatgcctggaagaaatacctgcggggagattattccagaaacgactatcttcaggatgtctataccagcctgcgcggaaagttctatctggacgagcgttttaatatgtatgcctactactgttacggaaccgaagatccggagagcttttcttcgcgcaccggcatctcattaaagagttatgtggatgagatacagccgtacctcaaagacatcatagattcggattcggcgtatgcctgcgtgcgggtggtcgacgggcgtatttttatcgtccgcaatctgtacacgacgatggattatacacggtacggcacgctggtggtggagttaaaccgcagtaaggtgttccaggatgtggataccggtcttttgaatgatatggtggtctgcttcggaagccgcgatgcgcgggttgactttgtgaaaaacgaggagaagagtgacaaggaacagcttttagagcagcttctgcaaaagtatgacggggtgagcagccacacattctcaaaggcggaggacgctacctaccgcgcgtatctgtatcaggagcggcgggatgattttcacatcggcattgtactttttgccagaaagagcgaactctattccgggctgtaccagttctatacgattgttgcgctgatgtttttgctgttgattccgctgtttggctatgtggtgtattttatccgcaggaatatccagcacccgatcgaccggatgctccgcgcttccggacggatggaagcgggagagatgggaatcacggtcgagggagacatgcccaatcaggaatttatgcagatgaaggagagcttcgacagcatgtccgcgcaggtgaagtatctgtttgattccatgtacagtgaaaaacttgcgcgcaaggacgcacagattcaggcgcttcaggcacagatcaatccgcattttctgaacaatacgttagagatgatgaactggcaggcacggatgtcgggagatacggttgtgtctaaaatgattgaatcgctgggaaccgtgcttgattaccggatgaaccgcgccaatgtaaaggagattcaccttgcggaggaactgcagtgcattgatgcctatttttacattatgtccatgcggttcgggcagagactctcgatcgagcgcaagattgacgatgatctgctctatctgatggtgccgccgctgatcttacagccgattgtggaaaatgcgattgtgcatggggtggagacggtaaaaaacggcgtcatccggcttcacgtataccacgatgatgaaaatgtctacttaaaagtgcgcaatacaggcaaaaagatgacggaggaggagctggagcggatccatgctatattggagggcgatgagagcaggcttccgaagaataccggacgccacacctccattgggatccagaacgtgaaccgcagaatccgcctggtatatggggacgaatacggtctgtcgatcgagcaggaggaagactgcatcacggtttcgacgattacgataccgtacgttgaccatgaggatgaaatatcgttaaaagagagaagcgaagcgcaaaatgagttaaagaacatagcaagattgaacaaataatgtcaaataggtctaatgccttttgtgagttctgctcgtataatatcagtatagcaaatgaaaaacatttgcaggaacaaaaacaaggagggttttgactatgaagaaaaaggtattatccatgatgctggctggcgcaatgacagtgtccatgctggcaggatgcggggcgggctccgatgaggctgcaacgacagacaacacggcagccgacacaaagacagagacagccggaacaacagaagcaggcgggggtactgcagaagcatccggaaatccggtgacattaagaactgtgtcgatgttcggaggaaccgatccgaataaggagacctacgaagcaattaacaaagagtttatggagcagtatgactacataacgatcgaagacaattcacagacatccgatgaggaatggaaagcagcagtcaatgcggacttctccgtaggcaatgagccggatgtcatccagttcttcacggatgcaaccgcagacagcatcattgcaacggataagctggtatcaattgaagacatccgcgcagaatatccggactatgcggcagacacactggattccgcattacaggcagcggtaaacaccgacggtgttgagcgtgcggttccgacaaccggatactgggaaggcttatactgcaacaaggatctgttcgaccagtacgatctggaacttccgacagactgggcttccatggagacagcgattgagacgttcaaggagaacgacatcattccgattgcctgctcgttaaacaacgtaccgcattactggattgagttcctgatgttatatgcatccggcgtggatgagtatacttccattccgacgagcgcgccggaaggatgggtaaagggtcttgagatgtttaagacattaagagatatgggtgcattcccggaggataccgacaccgttgatgacgcatacacaggccagttattccgcgacaagaaagctgccatgcagttagacggttcctggtatgcaggaaacatcgaggataccgacaacaccgttgtgatcgcattcccgggtgttccggatcagaaagcagaggcgggctctttggtaggcggtatctcttccggattctatatcacaaagaaggcatgggaagatccggacaagagagatgcagcagtgaaattcgtcatggcacacacctgccaggcaggcgttcagagatactgggaagcaaccggcgctgtgtcacaggcagctgttgaggtaacaccggtagagggtgcaacaccgtttgcacagtctatcgcagagtacacaagcaacgcaacggcgatcgtggcaccgacagattccagaatcggcgatgcatacaagacacttgtggtagagattgtcaaggtatctacaggtgctatgtcggcggaagatgccatcaacgaggcactcacattggtgcagcagtaaaatcagatacagaaaacagtatgacggaggggctatgcccagcggccccttcgttttttgcacccaaaaaacagttatttttatgatagaaaggtggaagaaagatgttatataagaaaaaatggccgcttgtggtgtttttagtaccgggtttattgttcatgttagtctttctttacataccgttcgtgcagaatattaagaacagcttttatgatatgacggcaatcatcgagatgccgggaactgaatggaagtttattggatttgaaaattacaagaaattgtttacagacccggatgtgaggacggcactcgtcaattccctgaagatgatggtgctcacggtgatttttgaggtcggaatcgcatttgtgcttgcggtaatggtttcacagataaaaaagcttcagcagttattccgtacggtgtacttttttccggtagtgatttctgcaacggcgattggtctgttgttcaaattattctacaactataacggtggtatgctgaatcagattttagagagcattggagcaaagccggtcaactggctttcccccagcctggcatttatcatggtctgtatcccgacgctgtggagttacatcggtttttactttgtcattctactcacggggttaagcgatattcctgacgacatatatgaagcggcgtccatcgacggatgcagccgctttaaacaggtattttatattacactgccaatgatgaaaccggtattctttacatcggtcacactggcggtaacgggagcattaaaagtatttgatcttccgtgggtcatggtgccaaacggcgcgccgcagggactgacccatttccttggaacgtatatgtaccagcagaccttcggactgaacaattatgattatggttctacactggcggtactgatcgtggtgctcggcattgtggtgtcgaaggcagtcggctttcttacggcagatgcggacgacaaagaagcgaaaaagcgcgcaagagcagagaaaaagaagggggtggcttaaatggatgtagcagtaagtgtaacgacagtcagaaaaaaacacaggagaatcggagccggtacggttgtcatttatctcgtactgatcttctgggcggtgctcaccattttcccgtttgtgtgggtggtgctgaattcctttaaaccgtccgcggaggtgctacgctcctccttctcacttccggagacgttcacctggatgaattatcagacggcatttgagcggttaaacgtcttaagagcctataggtacagcttcgtgatctccggcacggtaacggtaggcgttatggtattcgcgtcgctgatggcattcggacttaccagatatcatttcaaaggcaaggagctgatccgcagcctcatcgtggcaagtctgatgtttccggtattttccacgatcattccggtgtttaagatgatggtggaatgggggcttctgaacaaaagcattgcggttatcctgccgcagattgccggaaacttaagctttgcgacgatcgttatgaccggtttcatgcagagcatcccgctggagatggaggaagctgcctacatggaaggcgcagatgtatttaaggtatttggaaaaattattgttccgctttgcagaccgtcacttgcaacggttgccatctttagtttcctctggtcttataacgacctgtttgtacagaaaatcatgatgcgtgatccgaccaggtatccgatctccacattgttagagcagatcagttcccagtatggaaccgacttcgggctgatggcggcgtctgttacgatcattgtcatcccggtcatgattgtgtatgtactgttacagaaaaatattattaaaggattgacagcaggtgccgtgaaaggctagacttcttggaaagagagcggaatttgctcaaggggaggattagctatgtataaggtgatgattgtggatgacgaaccgatcatcgtggaagggttatcgaggagcatcgcgtgggaaaagtggaattgtaaggtcgcggcaacggcgcacgacggactggaagggaaaaagattatcgaggagattcacccggatattgtgtttatggatatctgcatgccggagatggacggactggcgatgatcgctgcgatccactcgcagttcccggatctcgaggtctgtgttctgacgggctaccgtgatttcgagtacgcgaaggaggcaatccgtctcggggtgacgcgttttctgctcaagccgtccaacatggacgaactggaagaagccatcggcaagatgtgcgggaacttaaaacggaaaggaattaccggggatgagccgaagcgtgatccgcaggatggggaagcggcggaagcgcataaggagagcgcatcgagcagctttatcgtgaagaatgcactgacttacattgaggagaattatacgaagaagctgacgctctgcgaggtggcagagaaaacgtatgtgagccagtggcacttaagcaagcttttaaaccgccacacggggcagagcttttcggatattttaaatcacgttcgtatcgagcatgcgaaagaactgctaaaaaatccgtcgctgcgcatcggagatatctccgagcaggtgggatttttagatctggcacatttctcaagggtatttaagaagcaggagggagtctctgccaatgaataccggaatcaggtactgggaaagtaaggtgccggacggctagagtacatagtatccgagcacgccgcacagaatccctgcaagagcgcctgcgatgacgtcgcgcggctcatgaacgccgccgatcacgcgcaggacggcaaggacaacccctaagagtccgagcagaatgccggcggaagggtggacatagaaaatggtggcggcaatgataaatacggaaaagacatgacggctgggaaaagatttcccggccgtatctttttctatggcaggcggaaggccgaacttctcataaggtcttggggcgttaaagatccggcggaagagcgtgactgcggcaaaggagatggcggggacgagaagcgcccgcaggaaaaaagtgctgccctcaagaaaaagcagcagcagaaatgccgggtacagcacgaaaataaagccggtcaaggtgtggttgagcaggcataccagccggatgcgccgcggatgtccccgtaagatgccggtgattgtttcataggattctctggtcatgagacctccgatccggcaacggcgaacagtgccccgatgaaaatgcagaagtcagagatgttgaagacgatcgcgcgcagccatttcggaccgaaattcagatgaaaatagtcgacgacatgtcccttcgtgtagcggtcgtaaaggttgtttaaaccgccgccgagcaggagcgcaacgcccgttttttccagcgcgtgtccgctaaggcgcatcagaaaataggaaaaaaccccgacaacaacaagaatgacggtgtggatgatgcgcagaagatttggcctttttaccatgaaattcaaagccgcgcctttgttataatatttttccaggacaatcctgcccccaagccgcggatggcgtaccttgcgggcatattttttgtccatgtaacgctttaagatgagatccgacaggaataccccgccggcaataatcgcataaaccatgtaaaaatctcctgacaggtattgatgtatgtatcatatcatcttccatggaaaatgaaaagtgatttgcgcttgcctttttttatccctgtttgtgcagttgcccgcaaacccttgaaagggcgttgcctggctgataaagtcaagacagaggcagaaaaatctgcagtaaataacgggcgggagacgggaaggcgtctcctgcctcatgagagaaagggaaaagggattacgatgaacattatcagagcaaaagactatcaggatatgagcagaaaggcggcaaatatcatttcggcgcagattattatgaaaccggactgtgtactcggtcttgccacgggatcgacgccggtgggaacataccgccagctgatcgagtggtatgagaagggagatcttgacttttccagagtgtcaacggtcaatctggacgaataccgcggcctggcacacacggacccgcagagttactactattttatgcaggagaacctgtttgaccatgtgaatatcgataagacggcaacgcatgtcccggatggcacaaacccggacgcggcagatgcctgcgtaaagcatgagcagatcataaagtcgctcggcggaatcgatttacagcttttggggctggggaataacggacatatcggatttaatgagccgggtgcagcgttcgagaaggagacacatctggtggatctggcagagagtaccattcgggctaatgcacgtttttttacctctattgacgaagtgccaaagcaggcatatactatgggaataagaacgatcatgcaggcaaaaaagattctggtggttgtctcgggagagggcaaagcagatatcgtctcacgcgcgttcttcggaccggtgacgccggaagtgccggcatccatcctgcagatgcatccggatgtgacggttgtctgcgatgaggcagcgctttccctgtcaccattatagaggtaaagtcagagggaaatgggggatttaagatgagaattaagaatgcacttgtatacacggtagagcacggatttgtggagcgggatgtccggataaaaaacggctgttttgcggggagtgaagcggccggcacggacggggaagagattctggacgcagggggagattacctgattccggggcttgtagacattcattttcacggatgtgcaggtcatgatttctcggacggaacaccggaggcattgcaggcgatcggtgcgtacgagcttcgccagggtgtgacaagcatctgcccggcatcgatgacactctcggaggagacgcttaagacggtgtgtgccaatgcgtatgcgtatacaaagagaccggaggcagagcaggacaccggggcgagactgatcgggattcatctggaaggaccgtttatttccatggagaaaaagggtgcgcagaatccggcttatatccggaatccggatgtagagatgttcctgcggctgcaggaggcagcacacgggctggtgcgtctgattacgattgcaccggagacggacggtgccaaggagttcatccgccggctggcggatcaggtacatatctcggtcggacatacctgcagtgattacgagaccgcataccgcgcattttcgctgggggcggatcatgtgacgcattttttcaatgcaatgccgccgttcacccatcgcgcgccgggcgtgtttggcgcggcgtttgacgcgaagcatgtcatgccggagctgatctgcgacgggattcatattgatgcttcggcggtccgcgtggtattttccctgttcggggcggagcgtatgatcttaatcagcgacagcatgatggcgaccggtatggaggacggtgcgtattccctcggcggacttccggttactgtgcgtggcaatcttgcaaccttagaggacggaacgattgccggctcggcgacgaatctcatggactgcatgcgaaaggctgtctccatgggaatcccgttagagacagccgtgcgcgctgcaacctataatccggcgagagcgatcggtgcggcggatgtgtgcggaagcattaccgcaggccaccgcggcgactgtgtccttctctccaaggatgacctgtccacgaagaaggtcatcttcggaggaaaggtggtcgcctagcgctcgatccagtcacggacatccgggatcttagagagcaccggaagcagtatcagactaagaataatgccgacaacaccctgtacgatgttaaacgggataccggtcgcagaggaagcaatgccggcggcgatagatgcctggtttaaggctccgctgccgagtgcggcaagtccggtttcgtagagaaaatagccgatgaccataatggcttctccgacgatgccgccgagtgcgagcgctgcgtagcgtccctttttcgagtgcagggtgtttttaaaatgatggaagagcagtccggcaatgccgcccgtgagcgctttgataatgaaagttgcaggagcccaggtcacgtagccggagaaaatgtccgagaacatcgagccgatgccggcagcgagcgctccgggaagcggaccaagcacgacgccgcacagcagaacgaagccgtctcccggatgaatgtagccgaaggtcggtgtcgggatcttgatgatcatggtcgccacgcatgtcatggcggcgaggagggcagcagttaccagttttttgatattttgatttgtcataggaagtctccatttctgtcagattcatataaaagtttgtatttcaacgttgatgcataagagtataacacaagatggattgataaaaatgtccagttgcgattaaattgaccatgccagtttgccggaatggtcttttttcttgcctgaaacacaaagcactgatacactagagacgatgagagagaagaataagggaggaattttatgaataaaaagtgcagaatcatattgtatgtgctgtcgattgtcatggtggcaggatgtattgctgccgtggtgcggacgaaagagagcacgccggcacctgtggtatcgggtgaggac

SEQ ID NO: 11687 - DNA, 7384 bp, Unknown
  gut microbiota DNA sequence
gggcggatagcggagcggatcgtgcgcctgccagggaggagaatgagaccgcggtggagaccacggaggcggaggagagaacggaagccgcggaagtggccgaagaagcggaagcgggcggtcaggcggaagcggatggcagtacgacgattctttttaccggggatgtcctgtttgcaaatgcgtttaaggcgggttatgatgcggacggaatcaagggcgtggttgcaccggaactgctggaggagcttcgggcagcggatattctgatggtgaataatgaattcccgttctcggatcgcggcacgccgatggcggacaaacagtttacattccggtgcagtccgggctatgtaaaggcattaaatgagatgggcgtggatgtggtatcactcgccaacaaccacacacttgattatggaagggaagcgctctcggatacgtttgcagcgttagacggtgccggaattctatatggcggcgcgggcgattccgcggagcgggcaaagcaggtgcaggtaatcgaagtccacgggaaaaaatacggatttatcgcggtatcccgggttgtcccgacggcggactggaaggtggaaaatgcagtgccgggactgtttagctgctatgacaccacggctcttgtggaggtaattaaggaagcgagggagacctgcgactatgtggcggtctatccgcattggggcgtggagtaccaggcatatccggaggcgaaccagacacagatcgcgaaggcgtgtatcgacgccggggcggatgtggttgtgggatcgcacacccactgtctgcagggggtctcctatattgaagggaagccggtattctacagccttggtaattttatcttcgggcagagtatcgaccggtcggcgatgcttgaggtgacgatcgacgccgcggggcgggcatcctaccggttcgtgccggtgtatgcggcgggaggcgtgacatatcctgccgaaggcggacaggcagagtcggttttgaattatctggacggcatttcggaagcagctgtggcatcggatggaaccgtgacggaagattaactaaaattagtttacaatcagattaaaaaagtttataatttagagcaagaaagcttccttctgcgcggcagaagaatatcagtaaaaggagaagaagagatatgagttacatggaggcttacaaagagtggtgcacaaacccgtattttgacgagaatacaaaggcagagcttgctgccatcaaggacaatcaggcggagattgaggatcgtttttaccgtcagttggagtttggaaccggcggactgcgcggcgtgatcggagcgggaacgaaccgcatgaacatttataccgtgcgtcaggcgacacagggactggcgaactacattctctcccagaacggacaggagaagggagtggcgatcgcccacgattccagaatcatgtccactgaatttgcggatgaggcggcgctctgcctgaacgcaaacggcatcaaggcgtatgtgtttgacagcctgcgtccgacgccggagctttcctttgccgtgcgcgaactcggctgcatttccggaattgtgattacggcgagccataatccgagagaatacaacggctacaaggtatactgggaggacggtgcgcagatcacaccgccgcacgataaaaatatcctggcggaagtggcgaaggtgacatcctttgaccaggtgaagacgatgaagaaagaagatgccgttgcggcaggactttacaaggtcatcggaaaagagatcgacgaccgttacatggaggaactgaagaagcagtcgattcatccggaagtcatcaaggagatggcgaaggacatcaggattgtatacacaccgctccacggaaccggcaaccttccggtgcgccgcgtgttaaaggagcttggatttgagcaggtgtacgtggtaaaagagcaggagctgccggacggcaatttcccgacggtatcctacccgaacccggagtccccgaaggcatttgagcttgcgttaaagctggcaaaagaagtcgatgcggacatcgtgctcgcgacagacccggatgcagaccgtctcggcgtgtactgcaaggacacaaagaccggcgagtatgtgacatttaccggaaatatgtccggtatgctgatcgcagagtacatcttaagagagaagacggcgatgggaaccatgccggagaacccggcgctcgtggagacgatcgtgacgacagatatggcaaaagcgatcgcggcagcctacaacgtgaagctgatcgaggtgctgaccggatttaagtatatcggagagcagatcaagttcttcgagcagcagcatacctatcactatgtattcggactggaggagagctacggctgtctggcaggaacctacgcgagagacaaggatgcgtgcgtggcggtcatgatgctttgcgaggtggcttcctggtgcaagaagcacggcaagaccctgtgggatgcaatgctggatatgtatgagaagtacggctattacagagagggattggagacgaagaccttaaagggaatcgacggtgcggcacagattcagtcgatgatgagtgagtaccgcacgaacccgccgaaggagctgggcggtcatcgggtactggcggtgcgcgattacaaggaggacaccagaaaggatctttctactggcgaggtgacaaagaccggactgccggcatccaacgtactttattatgaactttccgataatgcgtggtgctgtgtgcgcccgtccggaacggagccgaagatcaaatactactttggcgtaaaggggacttcccttgcagacgcggatgcaaagcttgcggcattgaaggaagatctgttgaaataagaagcgggagatggtatgggagcaattcattattacgaaaaagaacgggtttttaaactggatacaccacataccagttatctgatcggtatcgtggatgaagaaaagtttttgggacatatctattacggcgcaaagatcacggactatgacgtccgtgcgctgatgcgcaccggggaggcaccgtttgttccttcacagaacaaccgcgaccggagctcttttctggatgcgtttccgatggagtatccggggcacggcgtcggcgattacagggagagtgcgatttccgtatcggacaaaaacggcaatacggcggtgcagccgctttacagggagcataagatctatgcgggcaaaccgggacttccgggacttccggccacgttcggcagcgaagaagagtgtgagacgcttgagattgtgctggcggatgaagtgctggatcttacggtcacattgtactacacggcattttatgacgtggatgtcattacgcggagcgtgcgcgtgacgaaccatgccaaagaaccggtgtatcttacgaaggtattttctacggcgttggatcttgacgcggaggattaccggatgctgacgctgcatggttcctgggcgagagagcgacagatcgaataccgccagatcggctacggaaaacagtctgttggctcctgccgcggtgaatcttcccatcaggagcacccgttcgtggcgctggtgtccgcaaacgccggacaggagcaggggcgcgtgtacggattccattttgtgtattccggcaatttcctggcgcaggtggagaagaaccagtttgattccctgcgcgtggtgctgggaattcatccgcaggattttaagtgggaattaaagcaggatgagacatttacggcaccggaggttgtgatgacttattcggatgccgggcttggcaggatgacgagaacgctgcacgatctctaccggaagcatctgatccgtagcccgtataaggacagggagcgcccggtgctcatcaacaactgggaggcaacctactttgactttgacacggagaagctgcttgcgattgcgagagaggcgaagaaatccggaatcgagatgctggtcatggacgacggatggttcggccaccgcaacgatgacaacacaagtctcggcgactggcaggtaaacgagcagaagattacgggtggattaaaacggctggtcgatcaggtgaatgagatcggattaaagttcggcatctggtttgagccggagatgatctcgccggattcggagctgtaccggacgcatccggactgggcgattgcccttccggggagaatgccgtgccggtcgagaaatcagtatgtgctcgatctctccagaaaagaagtgcgggattatgcgtatgagtgtgtggcatccattttgcgcagcgcgaacatcgcttatgtcaagtgggatatgaaccggcagctgaccgatctgggaagcggtgtgcttccggtggaaaagcagggagaattgctgcatcgctatgtactgggcgtctatgaattacaggagcgtctgatcaccgaatttccgcagctgcttctcgagaactgctccggcggtggggcgagatttgacccgggaatgttgtattacagtccgcagatctggtgctccgacgacacggatgccatagagcgcttaaagattcaggagggaacggcgctgctgtatccgctctctgcgatcggcgcgcatgtgtccgactgcccgaaccacacggtgggacgcgtgactccgtttgagaccagaggaaatgtggcgctggcgggtacgttcggctacgagctggatgtgacaaagcttccggaggaagactgggcgaaaattccggggcaggtggcgctgtaccacaaatatcatgcgctgatacgaagcggcgactattaccggatcgcttcctattcgcagaatgattcgtttgactgttatgaggtggtggcaaaggatcagtcggaggcgctgatcacctttgttcaggtgcttggcagaccgaatgtgcacagcagacggatccggataccgggacttgatgagaagaaaaaatatcgtgttgagacaacgggggaagtgtactgcggagataccctcctgcatgcgggactgaatgttccggcgatgtggggagatttccagtcggcactgatacacttatccgaggtgcctgatgaacagtagttggaggatgaaaaaatggcaaaagcggtaaagctggcagatattgcgggacagcttggcgtgagtacggttaccgtatcgaaggcgctgtccggacagaaaggcgtcagcgaggaactgcgggagaagataaaaacgcttgccgatgagatgggatacaaacagccgtccgccaggcggcgcgaacacgcggtaaaaagctataatatcggtgtgctgattgccgagcactggctggataagtatgattccttctatctgcagatgtatcagcaggtggcgacgcgcgcggtggcgaaggaatgttttacgctgatggaagtggtcagcgcacagatggagactgcctgcgagatgccgaagcttgtgcaggagcagaaggcggacggtctgattatcatcggacgcctgacgggagaatatctgaagtttttgaatgaaaaagcaaaaattccgcttctgtatatggatttctgtgacgagaagacagatacggatgcggtgatttcggacagctattacggtgcttaccgcatgacgaattatctgttcgacatgggacacagggagattgcctatgtgggaaccctgcttgcaacgggatccatcacggaccgctatctggggtatacgaaatccctgatggagcatggcgttgcggtgagggaggactggatgatcccagaccgtgacatccagaccggcaagattgatatggaccggctgttgcagctgccaaaggagatgccgacggcttttgtgtgtaactgtgatctgacggcgagttttctgatccgcaggctgcatgagcacggataccgtgtgccggaggatatatcggttgtgggatatgacaattatcttttcccgggactctgtgatgtggcgatcaccacttatgaggtggatatgaaggagatggcgagacagacggttcacacgctgatcaggaaaatggcaggcgaaccgtaccgccagggaatctgtatcgtcgagggacatatggtcacaaaggacagcgtaaaagccagaaaaaatatgggttagtgcagggaagactgccggaattgcagaggtgtgattccggcatcttttttgaacagattgataaaatgtgtcgtgttttcaatccctacggcggcgctgacctcacggatggtgagggttgtcgtgcgcagcagcgtgcgtgcggctttcagccggacccggttcagatactggattggcggaacaccgatgcagtctgaaaaatcatggcagagccggtagcggctgactccgagagaactctcgagcgcggcgagagagtgggaatgtgcgtaatcggtgtcgaaaatctctttcatgtgtgccacatgcgcgggaagggaaggcgtcgatgcagcacggcgggaagcggcgagggaggacaggacaagcgagagcatggcggtcagatgaagcgaggaaaccggttcatcggagagcagctcgcgggagaggcagggcagaatacgccatacgatgtcatccgcctcggtccggttcgtatgaaaaatgcggtcgttcgcacacaaaaacggaagatattccgaaaaatactctgtggacagataaaaacagtggtagcagaaaggggtatgcgtcgtggaaaaccggtatgcggtctgatccggaagaagcatgagatcccccggtgcaagctggcaggattccggctcctgcacagcgtcgccggcagtcgttaaagtgccgcttccggattcgacatagagaaagaggaggtacggcagcgcatcccgcgtcagacggacgggggacgcgtagctgatgcgccctcctgcagggacaaaacggttgtgtacagccgatgtgtcctcgcggaaaacgaaagccgggtcgtctgaaagatcggaaaaacgaatgccgtttccggctgccccggagaagtgataagcctgattcaggcgtgccttgatcgtgatgggttccataagaatcggtcctttctgcataactatcctatattatagcggaactattttgcaatacaataggtttcttgattattaggttaaaaaatagcaaaaattaagtaattaaaattaaattaagaggaaaaagagagaaaaagaaggggctaaaaatatgaaaaatgactaaaaacaggatataaaatttgtataacatgtggaaaatgcaggaaaacgcaagaaaataatatattgtgcaataatatgtgatgactaaaaatagaaaaaatatataattaaattaagctacaaaatgagctataaaaaa

SEQ ID NO: 11688 - DNA, 10362 bp, Unknown
  gut microbiota DNA sequence
gcctggcagcagcaatgactttgagcatggcagcatgcggcggcagttcatctgacagcagcgcagcatctgatgatgcgacaacaggaagtgtggcagcaaccacaactgagagtggggatgcagcagagaccacagatggcgatctgaattacgcaggcatcaaattgggcgaggattacaccgacatcacgacaaccatccatgtattcaaccagagaaccgatatgtccgaggacagctatccgggaaagaactgggaagcttacattgctgatttcaatgagatgtacccgaacatcaccgtagaggttgagacggataccaattattccgatgattccctgcttcgcttacagagcggtgactggggcgacatcatgatgatcccggcagttgacaaggcagacttaagtgagtatttcctgccgtacggcacactcgatgagatggaaggacagattaagttcgcaaatacctgggattacgacggactggtatacggtgttccttctaccggtaatgcacagggtgttgtatacaataagagagtcttcacagaggccggcgttgcagagacaccgaagacaccggatgagttcatcgcggcactgcaggcgatcaaggattacgattcttccatcattccgctctacacgaactacgcagacggatggccgatggagcagtgggacggacagatcgcaggtacgacaaccggtgattctacttacatgaaccagaagcttcttcacacaaaggatccgttccaggattacggcgatggcacacatccatatgcactgtacaaggtgctctacgatgcagtggcagacggactgacagaggatgacttcaccacaacttcctgggaagattccaagggcatgatcaacagaggcgagatcgcgaccatggtacttggctcctgggcatattcccagatggtagacgctgattctcacggcgaggacatcggctacatgccattcccgatcacgatcgacggcaagcagtatgcttccgcaggcgctgactacagcttcggtatcaatgcggcatcggatgcagatcatcaggcagcagcaatggtattcgtaaaatggatgacagaagagtccggttttgcatacaacgagggcggtatcccgatcgctgcagacgataacgattatccggatgcatacgcagagttcggtgatgtgacatttgtatccgacgagtccgcattagagggcgaggaagatttactcaatgcattgaacgctgattccggattgaacatcaatgcaggcggaaaagagaaggttcaggagatcattgagcatgcttctaacggtgatatgtcctacgatgacatcatggctgagtggaatgagaagtggacacaggcacaggaagacaatggcgtgacggcagaataaataagacatcatgcacagacgggaccggaatgagagatctgtttccggtcccgttattttaaaaacagggtgaaaaagatggaggttggatatggcggcgacatcagtaaagaaagtagaaaataaaacagccaggcgtggattcctgaagtgggcaaaaagcaggaaggggcagcagacactgattatactggcatttaccataattccgcttgtgctgttggcagcatttacctatgtgccatttgctgaaatggtgaagttcagtttttacaaaatgaaatattccacgccggtagataaacgggtatttgtgggttggaagaattatatcgaggtattccgcaacaaggatatttttgcatccctgtggttaagcctctactacatggtaggttcggtggtacagcttgcgcttgcgctgttccttgcaacgattttgagctttaagacaaggggaggcaatctctttaagggactgatgtttttcccgtatctgatcagcggtattgcgatcggatttatctttaaatatttttacacaagaggatttgtattcgattccatcctcggatggtttggatttgaactggatagtcttccgtactggctgcgcgatcagaagatcaacaactggtcactggttgcaacttctgtctggagatatttcggcaacaacatggtgctttttatcggagcgatcatgtctgtagattccgagatgtacgaggcggcggagctggacggtgcaaataaatttcagcagtttgtacatatcatactgccgagcatcaagacgattgtgacgctgaatgtgattttatccatcacaggagcactgagcgcattcgagcagccgttcgtaattaccggaggttccaacggaacggcaacgtattttatcaacatgaacaatattgcacataccagccagaaggtcggactcgcgtcggcgatggcggttgtgttacttcttatcattttcgcatgtacgatcttacagaaactgttctttaaatatgtataccacaatgcggatcaggacgatgaagtcatgaccagggaagagagaaagcggttgaaacagtttcacaaagaacagagagcggcgaaaaaagcagcaaagggggcgatgtaaatgaaaaagcgcagaaaacagtattcggcaggagccattatctggatcatttttaaatatgtatcgcttgtgtttttttcctttgtcgccgtgattcccattatttcctgcgtcatcactgcattcaagacggaggaagagtataagacgacgaatgttatgacactgccgcagaactggttcaattttgacaactttgtggaagcgttccagcgtgcgaacatgggaagggcattcgtgaattccgtgatcgttatggtctgtgtcctgatcggagccatcatcatcggtacacagcttgcgtatgtgttaaaccgtttccagttcccgggcaacgggctgatccgcaacctgtttttattcgcggcactgcttccgggtgttgccatgcaggtaacggtctaccagatcatgcatgatcttggctttatcaatcatctgtacggctacatcatcatgatgatgggaacggatgtcatctccatctacatctttatccagtacatggaaaatattccggtgtcgctggatgagtcggcaatcatcgacggagcgtcctactggaagatctactggaagatcatgcttccgctgctaaagccggcaattgtgaccgcctgcatcttaaagggcgtgggcgtgtacaacgaatactattcggcaaacctgtatctgaccaaggaaaacttaaagacgatggcgatctccctctatacctttaccggaccgcttggaagccagtacaacctgatctgtgcaggtgttatcatttccctgctgccggcactcatcgtgtttatcgtattccagaagcagatctacagcggcattacggcaggcgcagtcaagggctgattacaggaaaagaggaacagcgatggaaacattagaaagcatgcgaggagaagttaaaacggaacttctcacacatatcattcccttctggcgtgcactgcgtgacgacacttacggcggctattacggctggctgtcttatgatcttgcactggatcagaaagcggaaaaaggatgcattttaaacagccgcatcacatggtttttctccaatgcctacacggcatatcgaaagggactttttacggaggaagactgtagaagcgcaggctataccggagaggcgctcttggaggaagcaaaacacggctacgtctttttgaaagagcactgcatcgaccgggagtacggcggcatctactggtcattaaactatgacgggacaccgcttgatacgacaaagcacacctacaaccaggcgttttgcatctatgcattgtcctcctactatgaggcgtcgcacgacgaggaagcgcttgcactggcgaagcagctcttttccctgatcgaggagaagtgtacggatgaggtcggatacctggaggcttttaccagagagttccagccggaatccaacgagaagctgtcggagaacggcgtgcttgcagataagacgatgaacaccctgcttcatgtttttgaggcgtacacggagctgtaccgtgtgtcgcgggatgagaccgtgggggagcgcctccgttggatcatggatgtgtttgcagagaaagtatacaatccggcgaagcggagacaggaagtgtttttcgatgccgggtatcacacgattttagatctgcattcctacgggcatgacattgagacagcgtggcttttggaccgcggcgtcaaggtgctgggcgatgaggcgtatgaggcgaaaattgttccgatcacacaggcgcttgcaacacatatttatgagacggcgtttgacggacactccctggcaaatgagtgtgacaggggcgtagtcaatacacaccgtgtatggtgggtgcaggcggagacagtagtcggatttttaaatgcctgtgaacagatgccggatcattcggagtaccgggatgcggcgttggcggagtggcagttcatcaaagaacacgtcattgatcctcgcaggggaagcgagtggtactgggaagtgtatgaggacggaagcccgattttagaccggccgatcgtggagccgtggaaatgtccgtatcacaacgggcgcatgtgtatagaggtactgggacgcatcaaggaaaattgaggagaattggttatgctgcataagagatattatatagaaaaagaaaagcaggaaaaactgcttgcacggaaaaacgagaagtcggatttttacaacggcgtatttgaccgttacgagtatccggttctcacaagagagcatattccgctgacctggcggtatgatttaaaccctgacaccaatccgcactttatggagcgtctcggcatcaacgccgtgatgaactccggagcgatcgagctgaacggaaaatattatctggtggcgcgcatcgagggaaatgacagaaagtctttcttcggcgtggcggagagcgacaacggaatcgacggtttccgtttctgggattacccgattcttctgccggatacctgcccggaggagacgaatgtctacgatatgcgcttgacgaagcatgaggacggttatatctacggcgtgttctgctccgagtcaaaggatacgagtgtgagcgatctctcagcggcagtggcggcagccggaatcgtccgcacgaaggatttaaagacctgggagcgcctgccgaacctcgtcacgctgcgttccccgcagcagagaaacgtggtgctgcatccggaattcgtcgacggcaaatatgcgttttacacgagaccgatggatgattttatcgagacgggaagcggcggaggcatcggattcggtctctgcgaggacatcacacacgctgtgatcgatgaggaaaaaatgacgagtctgcgcaagtatcatacgatcacggaggcgaagaacggagccggtgcgacgccgatcaagacggaaaagggatggattcatatcgctcacggtgtgcgcaacacggcagcgggactgcgttatgtcatctatgcgtttgcaacggacttaaaagatccgtcgaaggtgattgccgagccgtccgggcttctgatcggaccgagaggtgaggagcgcgtcggggatgtcagcaatgtggtattcaccaacggagcggtcgtcaatgagaaaaacgaggtgtttatttactacgcatcctcggatacacggatgcatgtggcgaccacgacggtggagaagctggtggactacgtattccatacgccgtccgatccgggaagatcggtggagtgtgtggcacagcggtgcggtctcatcgagaagaatcttgcatttttaaaagcgaatgaataaatacggtcatcatagaaaaatgagccgcgtcggcggcagaaagaggtagaagttatgagcaaatataaaatgatcagccccaaagtaccgaatgtgccatggcaggagcgcccggcggagttaaacggagcaccggtatggagatacaaggagaacccgatcatcggcagaaatccggtgaagggcgtggcgagaatcttcaacagtgcggtaatgccgtacggggatgagttcatcggcgtcttccgcggagaacagacgaacggaattccgtatatctatctcggaagaagcaaggatgccatccactggaattttgaggaaaacaagattaactttgtggacgagaacggtgagtcattcatgccggtctacgcttatgatccgagacttgtgaaggtggaggatacctattatattatatggtgtcaggatttctacggcgcagcgatcggtatggcgaagacgacggattttaagacatttaccagaattgagaatccgttcctgccgtttaaccggaatgcggtgctgttcccgcgcaagatcggcggcaatttcatgctgctctcgagaccgtccgacagcggccacacaccgttcggcgatatttttatcagtgagagtccggatctcacctactggggaaaacaccgtcatgtgatgggcaagggttccgagtggtgggagtccttaaagatcggcggcggtgcagctccgatcgagacatccgagggatggcttctgttctaccacggtgtgagcggcacctgcaacggatatgtgtactcgattggcggtgcgatcttagacatcgacaatccttccatcgtgaagtaccgctgtgagacgtttcttctgactccggaagagtggtatgaggagcgcggattcgtgccgaacgtatgcttcccgtgtgcaacaatccacgattcggagagcggaaagattgcaatctattacggagcggcagacagctatgtgggactggcgttcacggagctggatgacatcatcgattacatcaaggaacacagtgtggtgacgacaaccgataccgagattggaaaaagataacagagaactggaaaatgcagggctgcggcagccggaaagagaagggcgcattgtgtgcgtaacacctcggggctttcgcagccctgctgcgtatccggcgggaagtcggaaggcagagggggaaaagaaatgacagcaaaaaaaatggtcaggaatatcgagccggacgatccgatgttacagtacagcggaagaatcgatgacgacgatccgaaggcgccggtgcttatctatgcggcaagctgggtgaaaatgatttttacaggaacatcggtggcggtcacgcttgccaaccatcatgcgtactggacgaatgagatgggctatctcttagacggggtgcaggggcgcatccgccttttgaatgacggaaaaaagaaaacctatgagattgcggggcagctgccggatgcgcggcatgaactgatgctgttcaagcgtatggacgcctgccatacggtgacattctacggatttaccgtggatggcggcgcagatcttctgccgccggaaccaaagcctgcccgccggatggaagtgtttggcgacagtgtctcgtgcggcgaggtgtcggaggcggtcgactatgtcggaaaagaggatccggtgcacgacggacagtattccaacagctggtattcctatgcctggatgacggcgcgaaagcttggggcagaacttcacgatacctcacagggcggcattgcgctgcttgacgggacaggatggttcggcgcaccggcgtactacggcgtggaatcctgttacgacaagctcgcatacaatcccgatctgggagaggtaaagaaatgggatttttcacgctatacgccgcaggtggtggtggttgccatcgggcagaatgacaatcatccggtggactatatggcgtcggatccggagtgcagtgcggcggagcactggcggaagcgctatcgggaattcatcgagacactgatgaagcgctatcccaaggcgcagatcattcttacgacaactatcttaaaacatcatccgaactgggatgcgtcgattgggacggtgtgtgggcagatcgcaagtgagcgcgtgcaccactttttataccggagaaacggctctggaacgcccggacacatccggattccggaggcggaggagatgtcggaggagctggcttcctatatccgttcgctcggagatgaaatctgggatgtttgagagacaataaagggaaaagaaagagagaaggagcagaaatatgaatatgcagattgatctggaaaagggaattgcaaatgtgggagatgtgagcagaatgaaggaggtcatggcgcgcgcaaaacgcggggagcgtctggtaatcggttttatcggcggttcgatcacgcagggaagcctttcctcgacaccgcagacgtgctatgcttaccgtgtgtatacatggtggaaagagacctttccgcaggcggagtttgtctactgcaatgctgggatcggcggcacgacatcggagttcggcgcggcgcgtgtggggacggatcttctggcggagagaccggactttgtgattgtggaattttccgtcaatgatgagagcacggagcattttaaggagacctatgagggactggtgcggaaaatccttggcgccgcgtggaatccggcggttcttctggtacacaacgtgttttaccacaacggagccaacgcgcaggtgatgcacgcggcaatcggcagacattatgatctgccgtcggtcagcatgcagagctctatttacccggaggtggtggcaggacggattgaaaaccgcgcgatcacaccggatgatctgcacccgaacgatgagggacatgcgctggtggcgtcggtgattacttattttctggagcaggtacgaagcggaaaactgaccggcagcaatgccagttttgcaccgggggcaaagcttccggctccgcttacaaaaaatgcctacgaggattccgtccgcatccgcaatgccgcggcaccggatatgacaggattgcagcagcccacgctggatggatttacgcccgatgagaccgcgcagaatgaaatcacggactgcttccgctatggctggacggcgaaaaagacgggggatgccatcacctttttggcggagggcagctgcattgccgtgcagtaccggaagtcggtaaagcttcccgcgccggttgcactggcggtcgtggatgacgatacggagcatgcggtgcgtctggatgcaaattttgatgagacctggggagataaactggagcttgcgacgcttttagagcacggaaaagaggggcggcacaccgtcacgatccgcctcgcagagacgcatgaggacgatgcggttccgttttatctggtgtccgtgattgcggcggggagaagcggaaaagactgacggcaggcacagcctgttttacagaatatgcgtgcaaaagcattgcaaaatcagaaaaaatgttggaagatagagagagacactgcgattgcaggagcaggaggttataagaatgtttcgagaggattttgtgtggggtgttgcgagcagcgcctatcaggtagagggaacggacgcggcggacggcagaggcgcgtgcgtctgggatatgtttgcggcggacggcagggtgtttgaacatcagaatgcagacacaagctgcgatcatatgcatcattataaagaagatattgcgctgatgaagcatctggggatccgggcgtaccgtttttcactgaactgggcgcggattctgccggagggaaccgggcgcgtgaatgagaaagcgatcgccatgtaccgtgatatgattctcacgatgaaggagaacggcatcacaccgtatctgacactgtttcactgggaattcccgcaggcgctttatgagcggggcggctggcagaatccggacgtagtacagtggttcggagaatatgcgaaggtggttgccgagaatttcagtgatatctgcgaatattttattacgatcaacgagccgcagtgcgtggtcggcctcggacatctgagcggtgtccatgctccgggcgtgaaacttcccgtggcgcagacgtttctggtggcgcatcatcttctgatggcgcacgggcaggcggtcatcaacctgcgcagatatgcggtccgaccggtcaagatcggtttcgctccgaccggcggcgtggcatatccgtacaccgaccggccggaggacattgaggcggcgaaaaaggtgtatttcggattttacaatccgatcgataactggacctggaatgtatcgtggttttccgatccggtattccttggacattaccccgaggaggggctgaaaaaatttgcgccgtatcttccggagatcacacaggaggatatggagctgatctatcagccgcttgattttatgggacagaatatatataatggg

SEQ ID NO: 11689 - DNA, 8539 bp, Unknown
  gut microbiota DNA sequence
cggactggccggtgacgccggaggcgttttactacggcattaagtttttgacggagcgctatccgctgccgctctacattacggagaacggtatgtcctgccatgatatggtgagcagtgacggcagggtacatgacccgaaccgcattaccttcctggattcctatatcggggcgatgcagaaggcatatgatgagggcgccaatgtagctggctatttcctctggaccttcctggataatttcgagtgggcggacggatacaagcagcggtttggcattgtttatgtggattttgcaagccagaggcggattgtgaaggattccgctttctggtatcagaaaataatcgagacgaatggaaggatgttgacaatgaatcagacaacaaaagaaatcttatttttagatccggtgtgcacgcacaatatctggggcggtacccggcttagaacggagttcggctatccggtggagggtgacgacatcggcgagtgctggggcatctccgcacatccgaacggcgacggcagcatcaggaacggtgtgtacgccggcatgaagctgtcaaaagtgtgggaggagcacccggaggtatttgggaacctcgcctacgaccgcttcccgcttctgacaaagatcatcgatgcgaaggcggatctgagtattcaggtacacccggatgacgcctatgcaaaggaacatgaaaacggttctttcggcaagacggagtgctggtacattatggatgcgcccgagaacgccacgctcgtgatcggtcacaatgcgaagacgaaagaggagcttgcctccatgatccacgagggacgctggagcgaatttatccgcgagattccggtgaaaaagggagattttatccagattgatccgggaaccgtccacgccatcaagggcgggcttctgatcctggagacacagcagaacagcgatattacctaccgtgtgtacgattatgacagactgcagaacggcaggccgagagagcttcacattgagaagagcatcgacgtgatcaccgttccggcgaaatccgtcgaggacagtgtaacgtctgcactcggactgccggagaaccggctgaacgagctgtacgcctgcggatactatcagatttacaagctggatgtcaacggaacatgcagttttgcacagaatcatccgttcctgctgatgtctgtgctggaaggtagcggtatcgtcaacggccagccggtgaaaaagggagatcactttattttaccgtgcggattcggcgaggtggagatgcagggagagatgagtctggtggtatccacggtgccggcgtaggcttaagggaaaaatagctctttcggttccggaaaagatttgctataatcagaccatagaaaaagagaacacctggaaagaggaagcatatgaatcaggaagagagacgtcagagaagacagaaagatacgaaaagtgcggtcattgtgtgtgtgatagtcgtgctgatcctgctcgtgttggtcgcgggaggagtatttcttgtgggacgcctgttgccaaagggaggcggacagaatgaaggtaccgacggaaccgagctgccgggagagaatgtcgcggcgacggaggaagtaacggagcagccgcagacggaagtacagaccgatccggtggaggagcaggcggcgcagcttgtgtcccagatgacgcttgaggataagatcgcgcagatgtttgtgattacgccgaatgcgctgaccggatatgcaagcggtgtgacggctgcgggggacaccacaaaggaagcttaccagagccgtccggtggggggaattgtgtatatggcagacaacctcaccgacccggagcagacgaccaccatgctctccaatatgcaggagattgcaagggagcgcaccggacttccggtatttttatgtgtggacgaagagggcggcagtgtcgcgcgcatcgccggcaatgatgccttcggggtgacggacgtcggcaatatgagcgatataggagcgagcggggatgtgcagaatgcatacaatgcgggaagcacgatcggcagctatcttgcggcactcggattcaatgtggatttcgcgccggtggcggatgtccttaccaacccggacaatcaggtgctcggacagcgctcgttcgggtcggacgcgcagacggtcgcgggaatggtgacgtctgaactgcagggactttccgcggcgggagtgtacggtacggtcaagcatttcccgggacacggcggcacttccggagattctcatgacggggcggtgtccacggacaagaccctggaggaactgatggcggaagaactcgtcccgttccagagtgcgattgacggcggcgtgaattttgtgatggtcggacatatctcggctccgaatgtgactggagacaatgcgccggctacgctgtcgaaggtgctgattaccgatgtgcttcgcggacagatgggatataacggaattgtcattacggacgccatgaatatggaagcgatcaccggattctacaattcggacaaggcggcggttctggcagttacagccggggcagacatgattttgatgccggcggactacaataccgcctatacaggaattctgaatgcggtgaatgacggaacgatcaccgaggagcggatcaatgaatccgtgacgcgtatcgtgaaggcaaagcttgccatggggcagccgtaaaagctgtttgtattttgcggtaattatggtacaatgaaggcaagtgttatacattaccatacgaaagcggagggatttgcgtggaagatacgaagaaaaatgagatgtgggggaaagtgatggcaccgcttgccggctttcttgccattgtgctggcagcatttctgatcattttaaaattattggaaagcggagtgatcggaacagtcatggcgatgattctgatctgcgtgatcgtggctgccgtgttcggcggaatcttcatggtgatcaagtcgattctggatcagatccggtccgtgattaacggaaaggtatcggagaatacaaaagttgcggaaaaggcgaaaaagctggcagaccgtgaagacggcatcggggagatggtgcgttccatcgagacgtccgtttcatcgattgagctggtgcttggaggaatccgcaaggctgtggatgagctcgaaggggtatccggtgatttccagcagattttctcggaaatgtcggagtcgatggatcagacggcggatgctgtcgatacgatcaccggcaatacggtgtcccaggcgtctgagacggcggatatgaaggaaaaggtggacgcgatcagcgtgtcgatcgatcatatttcttccaatattgaggatctgacgaagagtgcgcaggccatgcgtgaatataaccgttcggcggagcagattatgcaggagctgattgccatcagtgaggagagcggcgttgcgatcgagaatgtcagaaaacagacagatctgacgaatcagtccgcgcagcagatccggacggcgactgagatcattgcgggaatttcaagccagaccaaccttctggcccttaatgcgagcatcgaggctgccagagcaggggagcacggtaagggattcgctgtggtcgcggaggagatccggacactggcggatcagtccagagagtccacagagcagattaaccatgtcgtgaatgtcctgctggataattcaagcaacagcgttcagattaccgagcaggtatcggaggcattttccagacagaatgagaagattcatgacacggaggagatcttcaaatcattgaaccgagaaatcgaacaggtcggagatgctatcggcggaatcggcacggaggtcggcgatcttgagaatcacaagagcgtcattgagaacggggtcacttcccttacggcttcggcagatgagaatgcgaagagcgcagaggtcaccacagataatatgggacgtctccgcggcgtggtgaaggagtgcgatggcgtaaaagcgcacatcgtcagcgtatcggacgagctgattggatacatccgtaagttttcggacggttcgattctcgacaagttcggtgcgggtaaaaacagataaacatttagcaggaacacaggaagtattgttacagagagccgtattgcggctctctgtaagtggttataggggagaaggtacagatgaatcatacaacggactggggcagaagatggcgcaacaccggctatattacattctttttgagcggtatctgcgcaatatcgagcgggattattgtaagtattctgcagggaaaatatgaatttgactatggcatgacgggtacgatgctcggactgatgagcattggaaatatggcggcgtcctttgcggcgggtattctgccgcagaaaatcggagtgaagaatacagtgcttcttctctgcagcggttatttcctagggtactttctgatggcggtgactggaatgccggccgtgttgatggcggcatttctgttggtcggatttgcaaagggaggggcactcaataattgcacaatccttgtaaaagacaatagtgccgatcgcacacgcggcatgaacatactacatgcctgctatgcgagtggtgcgctgctgtgtccgtttcttgcggcgtcgcttcttgaaatcaacgacactctgccgatggtgggagtggcggtgacggggctgcttttgtggatgatatttttgacggcgggacttccgggcgcggtcaaagagaagaacggcgaacggggaaagatctcgtttgcatttttgaaggatccgaaattctggctgattaccgggcttttattctgccagaatgcggcggagacgagtgtgacgggatggcttgtgacatactataaagacatgggaattctctcgggttcctttgcggcatacacggtaacggtgatgtggggggcgactctgatcgccagacttctgatcgcgttcgtttttccggtgcatcatattttccgcacgcttgcgtggatgggcggctgctgcagcgtgttgtactgcgggcttgtatacatgcagcatccggcgggagccatcgccatgctgttcgcctttgcattcgccatggcaggggtcaatccgatcgccgtggcgggagccggcagggagatgaatgcaacgagtctcggtgtgatgctgccggtggcagggattggcgcgatcgtgatgccgtggctgatcggtgtgattgctgatcgtgtggggcttgtgaccggaatgttctgcaatctgattccgtgcgtgggcattctggttttttccgtattgatcctgaaatatcaggcaaagaattgaacttgtttttcaaaataaaggtagaatgctaaatattgtgccatttttgccaaaaactatctaaagaaaaaagtgcggttctgtgttacgatgcagacagatcaatgatgacgatattttttatggagggatgcgacacatgagagaagtaatcaattttaatacgaaatgggcatttaccaaggaagccacagaagtgccgaaggagatgccggagaagtggtactgggtaacacttccacattcctggaatgagattgacggacaggacggcggcaacgattattaccgcggaacctgttattatgcaaaacagttaaagaagagcgaactgccggaggcagactgctattatctggagttaagaggagcaaacgcttccgcagacgtctatgtgaacggcaaggcagtggcacatcacgacggaggatattccacctggcgtgtagacatcacaaaagagctcacagaagaagagaacctgattgtgatcgctgtggagaatggcgtaaacgacagagtatatccgcagaatgcagatttcacattctacggcggactttaccgtgacgtcaatatcattgcggtaaataagtcccattttgatctggactactacggcggacctggcattaaggtgacaccggagatcaagggcgcggatgccagcgtggaggtagaggtattcctgacgaatgcagctgcagaccagaagcttgtatataccgtaaaagatgcagagggcaaagaggttgcaaagacagagaccgcagccggcgagacaaaggcggtactttccattccggcagttcatctgtggaacggaaagaaagatccgtatctgtacaccgcagaggtggcgcttgtatccggagaggagaccgttgatgcggtaagcacacgtttcggatgccgtacctttgagattgatccggagagaggatttatcttaaacggagaggaatatccgctgcgcggtgtatcccgtcatcaggacagatggggaatcggtaatgcgctgcttccggagcatcacagagaggatattgacttaatctgcgagctcggtgctacaacgatccgcctggctcactaccagcacgatcagtatttttacgatctgtgcgatgagagaggtcttgtaatctgggctgagattccgtacatttcctctcacatgccgaacggacgtgagaataccatttcccagatgaaagagctggttgttcagaattacaatcacccgagtatcgtggtttgggggctttccaacgagatcacgatggcaggaagctcggatgaggatctgcttgagaaccacagaatcttaaatgacatggttcatgagatggatcacacgagactgaccacgatcgcggtggtatccatgtgtgatattcacgatccgtacatccagattccggatgtgatctcttacaaccattacttcggatggtacggcggagacgtatccatgaacggaccgtggatggacaacttccacaaagagttcccgaatatcccgcttggaatgagcgagtacggatgtgaggcgctgaactggcatacctctgatccgaagcagggcgattacaccgaggagtatcaggcatactatcatgaggagatgatcaagcagctcttcaccagaaagtatatctgggcaacgcatgtatggaacatgttcgatttcggtgcagatgcgagaaacgagggcggtgagaacggtcagaaccacaagggactggtaactttcgaccgcaagtacaagaaagattccttctatgcatacaaggcatggctgtctgatgagccgttcgtacatctgtgcggaaaacgctatgtagaccgcgtggaagataccacgaaggtaactgtatactccaatctgccggaggtagagctgtttgtcaacggcaagagtgcaggaaagcttcaggcggaggatcatttcttccactttgaggtaccgaatgtcggagaatccaccctggtggctgttgccggagagtataaggatgagagccacatccgcaaggtggataccttcaacgaggagtaccgactgaaagagagcggcgcaatcctcaactggttcgacatcacagagccggaaggatattattcactgaatgacagactttctgacgtcataaagtccgaagagggaaaagcactcttcatgggactgatgtcaaaagttgcggcgggaatgagtcagggtgatggaaaaaatgacggaaatcctgcagcaggagcaatggcaaacccgaagatgctggaaatgctgggtggatttaccgtcatccgtatgatcaacctgctgggtgcggcaggaccgaaggtcgagtggaagaaagaagatcttctcggactcaacgcacagctcaataagattaagagagtagactaagatagaagcttaaaagaccggggcatggaatgtggtgggcagagatttaaaaaaatctgtacctgcacggttccggactgccaaccggcggcgggaatcctttgaagcaaaatgggagcatttcttctatgccgcgtttggtatcggattccgtgtctttccacgttttgacaatccgcgaaagatgtccgacaaccgcagacaatgggcggactttttagcagcgctagcaacgcttcttcacagacaatataaaaccgcgcgaaccgaaactcgttggcatctgctattgaaaataaggcagatgccaattcaaacatcggcttcgcgcggttatgttttattcagaagcgcagacaagcgctgcacaaaagtcctaaaattgtctgcggattgcggacactctccgcggagtgttcaaagcttggaaaaacacggatcatcggagataccaaacgcggtatagattagaaataccccattttgcgtttcggattcccgccgccggttggcagtccggaacaggcagatacagtatatttgcaaaatccatgcctgccacattccatgcccggtcttttagcgtctccactcgcggggcgtcatgcctgtgatgcggcggaagagccgtgtgaaatagtggacgtcggggatgccgcaggctgccgcaacatcctgcaccggcagaagggtactgcgcagcagcttcttggcgtattcgatacggttggcgttgacgtagtccgtcagggtcatgccgacttcctttttgaacagc

SEQ ID NO: 11690 - DNA, 31078 bp, Unknown
  gut microbiota DNA sequence
gttcgctggcaaaacgtttcaggcttaagtccccggtcagtgaggcgtctatggtgacgagaatctggcggatcggatcggaatacgaactcatgcttcgctgttccacgagctgacagtaactttgaaccatgtaggatatgagatcgttgatttcttccacggattggatgctctcgatcatgcgcgcaaagttgccggagacggcgtcgatataaaacgggtggacgcccgtttcgtacgcttttctccgcaacagcgtgttgagtgtcagaatcaggttcttgcggttgcggagtgcgtcctccgtgcgggggacaaagcgcaggttcccgagagcctccatgaaggagagggcacgggcgctgttgccgtgagagatggcgtcgagcagctcatcctcgatatggtagcgctcttcaagaaggtgcatgcttaagaccgggtcctccggtacgacaaactggtgcttttccaaaaaggactctctggtctcgagatctttcaaatgcagggtctgtacggatacatccgcgtcggcatccagcgtctgatagacgtggcgcagcagggcggtcatggaggctttgtccgcgatcagcggcagggcgtgataatattcctgcagctgtggaaaaagttcagccggaatatccagccggtttataagcgacagaatctgggagcgctcaaattctttccagagaaaaggcccgacgaacaggaaggcacttttatccggcagacggaaaaaagaataattacactcgtaataatctacaataaaatagatggtgttctgcacaaatggaaatggcgcctgtttttgcgcatcggcttcctgcatcaggatactgttgcgcagtccgagatccagatccgccagttctaactgtttgcggtcggtcagtctgcactggatatgcaggtcagaaaaatatgcggtaagaaaagataaaatcggctgttccatcaagaacctcctgtccgggtcagtgtctgttgttttgattttggcacaatattttctgttatgcaaggaaaaacaaaaaaatgacaaggattattcatccctttaaagcatcggcttgcagaccggagcaatttatgataattctataacaacgtgttcacggtgaacacattttagaaaatagtgcagaatgcttgaaagagaggatacccatgaaaatcacagcttatgaagtgagaccggatgaaaaagattacctgcttgccgcagcacagcaggagcagatagagatcacactggtgcaggggccgatgacacaggacaacatcgatcgtgctgagggagcggacggcattacgattcttggagatacaaagatggacgccgcattgattgaggagactgcaaagcggcgtatccgcgtcgttgcgacacgtaccatcgggtatgaccatattgacctgaatgcggcgaagagcaatggcgttcacgtctgcaacggctactacgatccggacggcgttgccgagtatacggtcatgctgattttaatgtcgcttcgcaattataagcaggcactgttccgcgggaatgccaacgattattcgcttggcgggctgatcggaagggagcttcgtaatcttaccgtcggtatcatcggaacgggaaaaatcggacagaaggtggcacagaatctgcagggattcggctgcaggattctggcatacagcagacgtcagaatgccgatccggcgcttggaatcgaatactgttctctggaggaactgtacgcgaagagtgatattatctcactgcacacgccactgtccaatcagacacgttatatgattgataaaaaggcgatcgaccagatgaaggacggcgtcattctgatcaactgcgcgagaggagagttgatgcgcgtggatgacatcatcgagggaatcgagacgcggaagatcggtgcgctgggactggatgtgatcgagcatgaggagggaatctaccatatggaccgccggtcggatattcttgcaaaccggaatatggcgtatctgagacagttcccgaatgtgacgatgacgcagcacattgcgttttatacagaggaagcggtaaaaagcatggcggagagcggtattgtcaatgtggtgaaatgcctgaaaaaacaggataatcctaacctgatctgctaagttcatatacaaaaagagtctgccacaagaaaacttgtgacagactctttttaaatccattgtttgcaatatcttaatctaacaaataaaacaagtctattttaagaaaaaggtacatgaaactagtgatttaacgcggtaagcttaccgcctgcagtaattattttactacagttacgttggttgcctgcggtcccttggatccttctacaacgtcgaactctacggaagcgccctcttcaagagacttgaaaccttccatgttaagtcctgagtaatgtacgaatacatcgttgcctgactcgtcagaaatgaatccgtaacccttctggttgttgaaccattttactgtacctttcatcaaaaagtacctccaaaaataatactaactgtaacttacagctattagtacaatatcataagaatttataaaagtaaagtaataaattaaagttcttcaaaactaatttcatgcgcagtgagaaagcgctttacaagggaatcccactcctgatcgaggctcttgtccacggagaaaatccggtacgaaatgcccgtggtaaggagcagttttttctgctggaatttcagattgataaacattcccgtaatgtcctccggggtaaaagaactgtgggtcgaaagcagtgtccgttccagattcttcggggagagcagaaagacaaatttaaaataagaaggagtgcgtttgcccttgatcaggtcaaaacattgcggacgtacctgttcaaacgggagaaaagaaagtcccgtcagtccgagcgcatcggcttcatctgatgaataaaaatcgggctggatcgtgccgtctaagctccaggtgacgctgcccaagatgacggcttcctttagaagaaagtgcccgaacgtgtccgtacacagcagtttattcataaaatctttaatttccggtagggaaagtgcaatcatagtcttctccgtgtcatatagtattggggcgcattgcctttgtgtagtataacacagattggggacaaatagaaagccgattgggaaggtttgcttcacaatatgatttctggtatgataggaagctgagagaacagccccgaaggggtcacagataaagaagaaaagaggacatagacatgaaagagacagaacttttatttgatttgctgaaaaaaggtgtgtcgccggtacaggcagtccgcgcctgcaaagagcgcctggagagcgcgggatttctggaactgccctatgatgagccgtggaagctgcagaaaaacggaagatattatgtaaatcatcatgacaccacactgttcgcgtttacggtgggagaaggctggcaggagacaaagacgccgcagattcggatggcggcagcacatacggattttccgtgcctgcgcatcaagccgtcggcggatgtgacggcatgcggttacgcgcaggtgaatgtggaagtatacgggggcgcgatcttaaatacctggctggatcgtccgctcggtattgccggccgtgtggcagtgcgcacacaggacgcgtttgccccgaagattgtggagtttgtatcggaaaaaaatcttctgaccattccgaatctggcgatccacatgaaccgcgaggtcaacaagggtgtggagctgaaccgccagacggatatgctgccggtctttgcgctgctgccggaggaggagaaaaaagcggattatttccttacgtttctggcagacgagctgtctgtggaaaagactgacattctggattttgaactgaccgtatactgtaaggaaaatccggaattcatcggtctcaacgatgattttatctcaagtccgcgcctggataacctgacttcctgcgcggcgctcatctccggtctgatggatgccaggcggatggagggaatcaacctgatcgcactgtttgaccacgaggagatcggaagccatacgaagcagggcgccggttcgattctgctgcatgacatgctgcgccgcatcttaaaagagctgggacgggaacagacggcggagcaggatctctaccgcagcatgctgctgtccgtggatgtggcacacggcatccatccgaaccaggcagggaaaatggatcttaccaacaagccggtgctcggcagaggattctgtatcaaggaggcgagttcgcagtcctatgcgacagactgcgaggcgattgccatcatccagcagatctgtgagaaagagaagatcgcgtaccagaagtttgtgaaccgctcggatatgccggggggaagtacgcttggatcgatcgcttctgcgcttcttccggtgaagaccgtggatatcggaatcccgcttcttgccatgcattccgcgcgggagctgatgggcagcgctgaccagcaggcgttaaaggatcttgtgaccgcatattttacactcgcttcgtgagaaagaatgcttcgtaagatataatttagataaagtttagaaattacctctatacaaaaaatggtttttgtgttaatgtaacatagtattgaatactacatgcgatagaaacgaaaaatatattaacggtttattgataacattaaacacataccatagaacaggtggagggattgccatgtataagattgttgtggacagctgcggggaattaccggaggaactgaagaaggacggacattttgagacggtgtccttagaacttgaggtggacggttaccgcattaaggatgatgagacatttaaccagcttgattttctgcgccgggtgaagaagagcatcacgggaccgaagtcctcctgcccgtcaccggagcagtatatgcaggcgtatgagggagaggcagagcatgtatatgtggtgacgctttccgggaagctgagcggttcctacaacagtgcagagcttggcaggaacctctacgaggaggaacatccgggagagaacaagcagatttatgtatttaactccaggtctgcatcgatcggggagacgattatcggtcttaaggtgcaggagttcgaggaggcaggttttccgtttgaggaggtcgttgccagaacggaggagtatatcagttccatgaatacttattttgtcttagagacgttagagactctgcgcaagaacggaagactgaccaatctgaaagcgctgattgccaatacgctcaatatcaagccggtgatgggttccacaaaggagggcatgatctgccagctcggtcaggcgcgcggaatgaacaaggcacttgagaaaatggtgcaggatatgatcgggcgcacgaaggactgcgaacagcgtgtgcttgccatcgcgcactgcaactgcccggagcgcgccgcagcggtaaaagcccgcatagaaaagcttgcaaatttcaagaaaatcattatcataaatactgccggtgtcagcagtatgtatgcaaatgatggcggcgtaatcatggcagtgtaagacacgcgggtgtgtcgctgctgcccggagaggaacgcgggacacagatgacatatgaagaagtagtagatcagatcaatcagatcagaagattcgggaatcttgccggagtggaggttgccgggcgcatgttaaaggcgctgggcagtccgcaggcggggattccgttgatacacatagcagggacgaacggaaaaggttctgtctctgcttttctctgcgcaattttaagggaggcgggacttcgcgtcgggatgtttacctccccgcaccttgtggactttcgggaacgcatccagataaacggggaaatgatctctaaggaggatacgcagaggatcggcgtgcagcttcttgcgatggattttggcgtgcagccgacgatgtttgacgttacacttgccatggcaatcctctattttaaggaacaacgatgcgatgtcatgatcttagagaccggacttggcgggaggctggacgcaaccaatgccgtaggtgtgcctgatgtaaccgtgatcacaaagatcggctatgaccacatggcggtgcttggaaatacgcttgctgagattgctgcggaaaagacgggcatcatcaaaaaaggcacctcgcttgtgcttgagagccaggaggcagaagtcatgacggtgtttgaggcgaaggtcagggaggaaggaattacagatttccggctgatcgaccctttggagataaaagagcagacttaccgcgacggcagacagtatttttcgtttggtgcctaccgtgatctgtccatgcgcatgcttggcgttcatcagtatgagaatgctgtcgcggcgcttctcggggcggaggcatttttcaggagacatacagagtggatctgcggcgggacaaaagagcgggaagagggcgtaaggcgcgcagtctgtcaggggatcgctaagaccgtatggaagggcaggatggaaatcctctcaaaaaaaccgttcctgttggtggacggcgcacacaacagcaacggcgtggaagcgttaagagagagcctcgtggcgcttttcccgggagaaaagtttcattttatcatgggcgtgatggcggataaggattatgagacaatgatcggggaattgctgccgcttgccattgattttacgacctgcacggtggagtgcgagcgggcgctgcaggcggacgccctggcggattgcatccggcggaaaggaattgcagctgcatcagctgatgattttgcgtcctgttttcagagagggcggctcgatgaaacacatcgcacggttgcgtttggttcgctctatttcatcggtgagatcgaggcgctgtttgaggcaaaatagttacgaaaagattacagaatagagcgtttatgacaaaaatgatacaatttcacaaactttcagtaatagttcaccattttgtaatatttcgcctataatgaggtatagtaaatagggatacagtagatagaagtcagatagaaagagtctgtggaatgttatttagcagttttgagtttttatttcggtttttgccggtttttttagtgatatattatcttacaccgaaaaagttacgcaatgtcacattgctggggggaagtattgtcttttatacaattggcgaggcgggttatattacgattctccttgcgtgcgttctggtcaattacacgctgacccgtttgatgtaccggaagaatacggacgggcggggaatcagacagaaacgcttattgcttcttgcgctcgggtatgatctgggcgtgctgtttttcttcaagtacagtggtctggcatccggacttccgcttggaatcagtttttacacgtttcagattatggcgtacgtgattgatgtgtaccgcggaagaattccggcagaacagtcgctgcttcggctgggaacgtatctgaccatgtttccgcagctgatatcgggaccgatcacaaattatgcggatgtgcgtgtagcattgggaagagagcgcacgatcaaggcacgtcagctggaagagggaatgaagctcttgattatcggacttgcagcaaaagtcgtgattgcggaccggatcggcacactctggaacagcatccggatgatcgggttcgacagcatctcaacaaagcttgcatggatgggagcgttcgcttactcactgcagctgtattttgatttcgcgggatattcgatgatggcgagaggaatcggaaagatgctgggatttgagctcccggtgaacttccgctatccctacatttcaaaatcagtcacggaattctggcgcagatggcatattacgctcggcagatggtttagggaatatgtatacattccgctgggaggcaaccggaagggaaaggcgcgcacctttttcaatctgtttgtggtgtggagccttaccgcgttgtggcacggggcgaattataacttcctgatctggggcgggattctgctttgctgcctgttggtagaaaagctctttctgctgcgcctgctggataaaagcagggtgatcggtcatctttatgtattgtttgttgttccgctcagctgggtggcgtttgcggtcaccgatctgtcggagcttggcgtttatatgacgcggctgttcccgtttgcggggcatgcggcaggggtcatcaatcatctggattatttaaaatatctgaatgactatgcaccgctgtttcttctgggcgtgctctttgcaacgccgcttccggagacctgctatcggctgatcgagcgcaaatggatcggcagggtgatactgctcggcattttcgggctttgcatgtactatctggcggtgtcggcaaacaatccgtttttgtactttaatttttaaatgtgtggtggatggatttgagaaagcttttgaaatgtccggtaacggtcgcactgcttatcttgtgggcggcgctgtcggttgtcggctatctggggaaagatacaatatataagaattatacggttgatatacgaacgacaccatacttcgtcctggtgtttgacggactgcatgacggaatttttccgtggagtcatgtgggtgcgccgggcggcataggagagaacggaaagctgccgtccatcctgctgccgggggagagtgtctctgatactgagcttgccggcgggacggagacggtcggagagacagagacggaagaggcgccgcacacgcgggaattctgtgtggtggatgacgactggttcgacgacgcggtctttatcggggattcgagaactgtggggctgcgcgattacggcgggctggacaatgcgaccttttacgcatccacagggcttggaatctacgatatgtggacggaaaagttctgtgaggtggacggggagaagaccacgcttgaggatgcgctttccagacggcagtttggcaaaatttatttccagatcggcatcaatgagatgggaagaggaaccctggacggttttatggagcagtacgcgcagtcggttcagaaatttagagaactccagcccgatgcgatcatctatgtgcagggtatcatgcgggttgcaaaggccaagtccgactcggataaaatttttaacaatcagggaatcaatgaacgcaatatgagaattgcggaacttgcggataatcagactattttttacattgatgtgaatgatgtcgtatgtgatgcagacggaaacttaagagcggatctcacgtttgacaatctgcatctgtacggctcgaaatacggaatctgggtggatttcctcaagacgaagggaattgcaccgtgaagtggttcttctgaaaagaaatgagaccctcgtctcttagatgacacagctcgttcgacatggcgctccggtctacggagagatagtcggcgagctgttgtctgttaaagggaatatcaaaagacgaacttccggatctgcgcgcctcgctcgacagataggagagaagcttttcacgggtggtccgcttggtcatgtgctctaatttctgtccgagctggaaattgcgctcggcgagaacggagagcagatttcttgtgagctggttgtggaattcacatgcgcgggagcagagcgtcatcatttttgagacgtttaagtagagcacagtggaattctgctcggcgtagaggctgacttccagcgcacagtttgtacggatggcataagattctccgaagatgtctccggggcggcagcgggtcatcagatttgtgttgccccagaaatcctccttcatgacatccacacatccttctaccacaagaccgagagaatccagatggtcgccgtagtgaaagagaaagctgccctttggataggagagggtctttgccgacagacagtcgagcatggcatggatttcttcgggtgcaatatcataaaaaacgggagaggcctgcaagagggcatcgtatccttggaaagtttgcattatttttcgtcctttcgactttttgttgtaaaaacaacagaaatgttgacgctattgtagtatcctgtggaagaaaagtcaagagagaatttccggcatgcgtgccggagttagaatggaggatatgatgttacgaagagtcattgagattgaggaagaaaagtgcaacggctgcggagcatgtgcaaacgcctgccacgagggagccatcagtattgtaaacggcaaggccaagctgatgcgggacgattactgcgacggacttggcgactgtctgccgacctgtccgatggatgcgattcattttgtggagcgtgaggcggcggcttatgatgctgcggcagttgaggagaataagagaaagaaagcagcgcagcaggcgatagcgtcacagccgcttccgtgcggatgtccgggaacccaggcgaagacgatccgccatgagcagcaggcagtctgtccgaccgccgcagaagagagtgcggcagaacttacgtcggagctgacacagtggccggtgcagatcaagctggttccggtgcgcgccccgtattttgacggagcaaagcttctggtggctgcagactgtacagcgtatgcgtatgcgaatttccacaaaaaatatatccgcaatcacatcacgctgatcggatgtccgaagttagacgatgtggattattcggagaagctgacccagatcattgcgcagaacgatattaagagcattaccgtggtccgcatggaagtgccgtgctgcggaggaatcgagcaggcggtgaaaaatgcactcgcggcaagcggtaagatgattccgtggcaggtagacattatctctacggacggaagaattctcgagtaatactttccccttttgcgggacatactatgatgcagaagtatgttacgcgaaaggggattttttatggcacttactatgaaaattacagaggtacacgcgcgggagatcctggattcccgcggcaatccgaccgtggaggtggaggtgaccgccgagacggagacaacggggagaaagactacagcgcgggagtcggttccgtcgggagcgagcaccggaagatttgaggcagtggagcttcgggacggcgacagggagtatttcggactgggcacgaagaaggtggtggatcacgtcaacacaaagatccgggaagcgcttcttggaatgaatgttttggatcaggcactcatcgaccgcagaatggtcgagctggacgggacagacaacaaaggaaatcttggggcgaatgcgatcttaggcgtgtcgctcgcctgcgcgaagacggcggcagcggcactcgatatgccgctttaccgctatattggcggaggtaacgccaagcggctgccggttcccatgatgaatgtcataaacggcggagtccatgcgaagaattcactggattttcaggaatttatgatcctgcccattagcgccaaaagctatcgggaagcgctgcgcatgggcgcggaggtatatcatttcctgcgccaggttttaaacgaggagggatatgctacggcggtcggcgatgaaggcggctttgcgccggatcttgcggatgccggtgaggtgttccggtatctgggaaaagcggtggaaaaggcgggctatacggtcggaaaagatgtggtctacgcgatggatgccgcagcgagtgaattatataatgaagagacgggaatgtaccatttcccgggggagaatggaatctgcagggatgcaaaggagatgatcgcgctctacgaagatctggcaaagcgttttccgcttgtgtcgattgaggacggtctgcaggaagacgactgggagggctggcagagtctgaccggacgtctgggagatggcatgcagcttgtcggcgatgacctgtttgtcacaaatcccaagcggatcaagtgcggcatcaaattaaatgcgggaaatgcggtgctgataaaggtgaatcagatcggcacgctgacggaggcgttggacgccatcgagatggcgcagtgtgccggttatcacacggtgatctcccaccgttccggggagacggaggatgcgtttatcgcggatcttgcggtcgcggtgaatgcggggcagattaaaaccggcgcgccgtgcagggcggagcgcactgcaaagtataaccggcttctgcggattgaggaggagcttggcgagacggcgcagttttctccggcggagcctttcgggagagcgtaaaaaacagttgaaaacgcggggggagtatgctataatagctaaagttgtgagttgattaccgtaggagggaattattttggcaattttaaagacgattttaaccgttgttttcatactgatttgtttggcgttgacagtcattatcttattacaggaaggaaagtccgcaggactcggagcgatcgccggagcggcagatacgtactggggaaggaataagggacgttccatggaaggcagactggtgacgggaaccaagattctggttgcgctgttcatcatcattgccgctgtattgaatctgggaatcttttagaaatgaggctgtcgcatctgcggcagcttttttgctgtggagaggaaggatatgagagaagaacttttacaggaacgaaaaaaagcaatttacggactgatctgcgatgaactttatgtgccgatgaaggcgaaggagatcgcggcagtattaaatgtgccaaagagtgacagaagagatctcacggaagtgctggatgcgcttgtggcggagggaaaagtggaagtgtcatcaaagggcaagtacatgaagtcggagggtaaattcctgacaggcgtttttaccgcgcatccgagagaatttggctttgtgacggtcgagggggaggacgaggatatttttattccggaatcccaggtaaacggtgcttttcacggcgataccgtgcaggtggcgctgacacgcgccgaggggcacggacggcgcagagaggggcagatcacaaagattctgatccgcggggtcagccggatcgtctgtacctatgaaaaaagcaagacattcgggttcgcagtgccggacaatccgagatttggacaggatatttttatcccgcaggagcgctccaaaggggcggtgagcggacataaggtcgtggtggaactgacggacttcggcggcaatggaaaaaagccggagggaaaggtcgtagagattctgggacatgtgaacgacccggggacggatattctctcgatcgtgcgtggctatgatctgccgaccgagttcccggagaagatcatgaatcaggtggagcgcgtggcaggcgaggtcagcacggcggatatggcaggccgcatggatctgcgggactggcagacggtaacgatcgacggagaggatgccaaggatttggacgatgccatcaccctgacgaaggagggggatgtctaccgtctgggcgttcatattgcagatgtcacgaattatgtgcaggagcgcagcgcccttgacgtggaggcgctaaagcgcggcacatcggtctatctggtcgaccgtgtgatcccgatgcttccgcatgcgctttccaacggcatctgttcgctgaacgccggggagaaccggctggcattaagctgtatcatgaccgtggatgcgaagggaaatgtgatcgatcacgtgattgcggagaccgtcattaaggtcgaccgccgcatgagttacaccagtgtcaaaaagatcttggaggatcacgatgaggcggagatccgcgagtatgaggagcttgtgccgatgtttgagaggatgcgggatctggcggcgattctccgcaaaaagaggatgaagcgcggatcgattgattttgacttcccggagacgaagatcattctggacgcgcagggacgtccggtggagatcaagccgtacgagcgcaatgttgcgacgaagattatcgaagatttcatgctgcttgccaacgagacggtggcgcaggattacttctggcaggaactaccgtttgtgtaccgtacccacgagaacccggatacggagaaaatccacaagctggcaacgtttatcaataatttcggctattccattcatatcggacaggatgaggtacacccgaaggaactccagaagctactgcttcggattgacgggacgccggaggaggcgttaatcagccggctgacactccgctcgatgaagcaggcaaaatacagcaccgtaaataccgggcatttcggactggcaacgtcctattactgccatttcacctcgccgatccgccgttatccggatctacagattcaccggatcatcaaggacaatctgcgcggaagaatgaatgcgaagcgcatcgagcattatgagaagattctgccggaggtggcaaagcattccagcgagatggagcgccgggcggatgaggcagagcgcgaatgtgacaagttaaagaaagtacagtacatgtccggacatctgggggaagagttctggggtgtcatttcgggcgtgaccgagtggggattctatgtcgaactgccaaataccgtggagggacttgtgcatgtgacgacgctgacagacgactatttccactacagcgagagcacctatgagctgatcggggagaccaccgcaaagcgttataagcttggccagaaggtaaagattgtcgtggcagcgacagatccgtttatgcgaacgatcgactttcgtgtcgttaccggaacagaagacgaagaaaatgaaaaattaaaccagaagtttattgcagaataaaaatttgtggggtatactgtaacagcagtgcagatgaaaagcggcagtgcagacagtaagcgaaggaggatagtcgggatggcaaagaccgagaagaagttaatcgcgaataacaaaaaagcctaccatgactatttcctggaggagcggtttgaggcgggcattgaactgcacgggacggaagtgaagtccatgcgcatgggcaagtgctcgatcaaggaggcgtttgtgcgcatcgagaacggtgaagtcatcgtttacggcatgcacgtcagcccttatgagaagggcaacattttcaacaaagatccgctccgccccaagaagcttctgatgcacaagtcagagatccggaagctgatgggaaagcttgcagagcagggctacacgctggttccggtggaggtatatctgaagggaagcctcgtgaaggtggagattgcacttgccaaaggtaagaagctctacgacaagcggcaggacattgcgaagaaagacatgcgccgcgaggcagagcgtgatttcaaggtaaagaatctgtattagattttttataaataacaggggccagtaaaggtttcgacggggaatatgaagctggagaagcgagccgcacgggatgcgtcaaattccacaattaaatttaaacgctgaagataatttagcatacgctgcctaatggcagcagtctgacctagagcactcacactttaggacccaggcttcgacgatgtgagaaacgacacaggcaaagctttgagcctgcgggcgtaccatgaagctaccaaaaccgtaagggtgtctgttcccggacggcagagggaatgtcaaaggacagactaagctcgtagaaggacaggggattattcttcggacacgggttcgattcccgtctggtccatcttaaaaagcgccatgtagggcgctttttttatgggaaaatgcggaatctttacatctccctgacttgcaattcacactgccatttcctataataagagcaaaatcacagcagaaacggaagagatgaggatcgaagaatgtctgtagagaagagaaaaaaagaacaggaaaagacctccatggtcgtggagggatttttatttgcaaatgaggcggaagccgcgcaggcgagaaaagaggcggagggcgtgaaatacgtcaaggagaaagcccagatggacgaccctgagatggtactccgcatttataataaaatgatacagcagcggctgtttgacacggcagtcggctattcttatctgaaggatctgcaggagtatctgcagtcgattccgtttatccggaaggaagatattttcccgattccggtgcagcatccgcaggtggaggagagtctccgcaaggcgaagcgcgcgccggcaccaaagccgaagacgcagaccgtggtaaaaaatgcggactacaggagacgctaccgcattgtgcgctggatcgcctttattctggcagtctgtgttgtggcgatgtttgcaattacggcgacgaccaataatacgacggtgttaaactacgagaatcagctgatcaacaaatacgaggcgtgggaggagcggctcgaccagaggcaggaagcgatcgaggcgaaggaaaaagagcttggaatcatgccggaatagagcggaaaatacacagatttttcataagtagctgttagaatgacgataaaaagcggaaaggatacgggaacatggataagatcagaattctggtggtggatgatgagagcagaatgcgcaagctggtgcgggatttccttgtgagagagggatacgaggtgcttgaggcgggagacggcgaggaagccctcgatttattttaccgggaaaaagacattgcgctgattattttagacgtcatgatgcccaagcgcaacggatttgaagtgtgccgggagatccgggagacatcgaaagttccgattattatgctgacggcgaagggcgaggagagcgacgagctgaacggatttgaactcggtgtggacgaatatatttccaaacctttttctccgaagatactggtcgcgcgtgtcggagctattctgcgccggagcggaaagacgcaggatgaagaagcggcggtctccatgggaggaatcgttctggacaaggcagcccacatggtgacggttgacggagagcggatcgatttaagctacaaggagtttgaactgctggcatactttatggaaaatgcggggattgcgctctcacgcgagaagatattgaacagcgtctggaattacgattactttggcgatgcgagaacgattgatacgcatgtcaagaagctgcgtgccaagatgggagataagggaaaatatatcacgacggtctggggcatgggctacaaatttgaagtgacggaagaataatggaagtgacgcggaatgaagggactttttgataaaaagagacaggggcgcggcagacatccgaaagagggcggactgaccagggaaatcgccggaattatcatcggtctggtggcgggaaccgtggcgctctgctgggtgcttaacacggtatttctggagcgctactatgtgatgaacaaagaaaatgtactgctgtccggatttactacgattgacgcggcaagcgaggatggaagccttgacgacagctcgtttgatgtgacatttgacaatctctgcgcaaacggcaatatcacggtcatggtgatcagcccggaccgcacgattgtcagatcctccgtgaacgatacacagcgtatgttaatcgagtttacggacattattttcggtggtacgcagaatgagaccacggtgctggcgcaggcggaggactatgtgatccagagaagaacggacaccaggctggatgcggaatatctggtactgtacggaaccctctcaaacggcaatctggtgctgatgcggtcggcgttagagagcataagggagagcgccaagacgtcgaaccagttcctgctgtacgtcgggatcctggcgattgcggtgagcacggttgtgtcggtcttcatctctaagagaatcaccgatccgatcctggaactgaccgagatttccaagcatatgacccagctggaatttgaggtctgctatacgccgaaaggaaagcggcgcaatgagatcgatgaactcggcacgcacatgaacgagatgtcgcaggcgctcgagcatacgatctcggaattgaaaagcgcaaacaaccagctccttttagacattgagaaaaagacgcagatagaccgccagcgcaaggaatttctctcgaatgtatcgcatgaattaaagacgccgcttgccctgatccagggatatgcggagggcttgaaggaatgtatcaacgatgacgcacagagccgggatttttactgtgaggtcatcatggacgaggcggataagatgaatcagatggtgaaaaagcttctgacattaaaccagctggaatccggaaacgagacgatcacgatggagcgattcgacgtaacagagctcatccggggcgtgctgcactcggtggatatcctcatcgggcagagcggcattacggtgacggaatgtcccgcagagcccatttatgtgtgggcggatgaatttatgacggaggaggtcgtgacgaactacctgagcaatgccattcattatgcgggagggaaaaaggagatttccatccgctgcagggagcaggagaagaacgtccgcatccgcgtcttcaataccggagacccgattccggaggaggatatcgacaaaatctggtccaagttctacaaagtcgataaggcacgcacgagagagtacggcggcagcggaatcggtctttccattgtgaaggcgatcatggactcgttccatcagcagtgcggcgtgatcaaccatgaggatggcgtggaattctggtttgaactggaaaaaggaaaacggtcatgatgcagcaaaaaatttttttgttgctatatttcctttaaaatgctaacataatgttagtttatactttgcgtgaggaatggaatcctatgagaagaacaagaatcaagatgatggcagcggtgatggctgcaacgatgctgttgggcggatgtggtgatgcactctacgacctgacagacgacgaggagaacgtcattgtcaattatgcggcgcatatcgtcacgaagtacaacacatatcagcgggaaggtctgacgtatgtgagtccggaagaaccggaggagacgcaggaggatgtcacggtgccgcagacgccggagacacaggacgcgtcagagacgggaacagccgcatctgcggaagctgcggcacctgctgtgtcggtggcggcagccggatcggcatctctggatcaactgttcggagccgacggcattcagatgacctatgcgggcgcgcagcttgcaccggggtacatggaaggtgattattatgagatgaccccggatgccggaaaacagtatctggtgctgtccatagatgtgaccaacaccggggcggacggagtgggtcttgatgttttgagtgtcagcccgaagttcacggttgtattgaaccagtcggtcaagagcacggcggagaccacattgctggatacggatttttccacctatcagggtacgattcctgcgggagggagcacccgcctggtacttgtattccaggtgccggatgatgtggcgtcggcagacagtgtggaactgtatgtgcaaatggatcaaatgatacaaattattctgtaaaacgcatgaaaaacaatgcatttcaggtaccaatgtgctataatgctgtcagatagatacgttgcggtattacgcgagaggagagagacgaatggatacaaatatattattggaatcgggaacaaatgaactggaagttctggaatttaccttgggaaacaatcattacggaatcaatgttgcaaagatcagggagattttaacctatcagccggttacgcctgtcccaaattcacatccgagtatcgaaggaatcttcatgccgcgtgatacgatgatctctgtggtaaatctgaagcgctgtctgggaatgccggatgatgcgaagacagagggactttttatcattacgaactttaacaagttaaacattgcatttcacgtagatgccgtgcttggtatccaccgtgtttcctgggaggcgatcatcaagccggatgccacgatcaataccgagcagaacagcgcctcgaccggtgtcatcaagatggatgacaagctgatcatcatccttgactttgagaagattgtgacggacatcagcccggagacaggactgaagatgtccgatatggacgacatgggacagcgtgagcgctgtgaatctccgattttgatcgcagaggattccccgcttcttagcagactgatcacagactgcctgaagaaggcaggctacacgaacctgattgtgacaatgaacggtcaggaggcatgggataagctgcaggagtttgaaaaagcaggcaatgtgcgtgagaaagtacactgcattatcacagatattgagatgccgttgatggacggacaccgccttacgaagctggttaagacaaatgacaatatgaagaagattccattgattattttctcatctcttgtaaatgaggagatgcgcatcaagggagaacagcttggagcggatgcccagctgacaaagccggagattggcagtcttgtttcggcgattgacgacttgattgacaagagcatggactgagaatgaaatgaagaggggatgtgatggagcaggatcacatcccccgcttaagttataggtcgatggaggtatcgtatgagcggagcagaggaatatctggatgggctgctgcactccgtagagggaggaagtcctgccgacacagcccgtgagacggagccaggcgatacggcagacgggctttatgcagaaaaagaacaggagacaaaaaaagctggtatgagtgaggaagacgattttttaaagtcctttgaggcggatacagatctggaaggagatgcggacacatttatcagacagttcgaggatgagctggatcaggcgcctggagaggaaagaacacagaagacgacggaggagaacaatcagttcttcaaggatctggatggcattttagacagcgcaagggatgcggatgagagcaccggcggtgcagaagcggcggagactgcccatgcgtcggaggacggagatcttatggtcgataccattggtgatttccaggacgacgattcagatctgatggatctgctgcagtcggagggcgatttcccggatatgagccagatggcggatcccactgctccggccgcagacacagacgcagaaatgccggacgtgacggcaatgccggagactgcggatgaggtgcaggacgaggacgacgggaaaaagaaaaagcgccgcaaaaagaagaaaaaagatgagccagatgccggggatgaggctcctgcaaaggagaaaaagagcctgatcaagagaatcggcgacgcactgtttggtgaggaggaagagacggaggaggcaccagcggacaccggggaattacagccggaaggtttagaacaggcaccggagctggatgatctttccgatgagaatttaaagctcttacaggaactggaaggaacgggggcagccgagccggaggcagaggcggaaccggagatttcagaagaagagaagaaagcgcaggcaaagaaggaaaaagcagagaagaaggcgcaggcgaagaaagagaaagcagagaagaaggcacaggcgaaaaaggcgaaggcagagaaaaaagcacagaaagccaagaagccgaagaagccgaaggagccggacaatacaccgccgcttccgaagaagccggtggcgctgattatggtcatggcggcgtctttccttgcacttgtcttggtgggaacgaatctgttcggatataccctgagcttcaacaatgccaagcaggcgtatgaactgggcgactatcaggcagcgttcgcggatgtgagcggacttacggtcaaggaggcagatcaggagacctaccagaagtacagcatcatggcgaatgcagccggagaatatcaggcataccagacctttatggaaaacggtatttatgacatggcactggattccctcatccgcgcggtcggaagatgcgataagtacagcgaggaggctgcggcttacggctgctccacagaactcgcgaagatcagagaccaggcggtggcaggactgtccgggttcggacttacgcaggagcgcgcacaggaactgtacgcggagagtgagagggatacttactcgcaggaactgtattcgatattggcggcagcaggacttggatgacatcgacggagtgagagaatgatagcaattatagactatgacgcaggcaatttaaaaagtgtggaaaaggcgttcctcgcgctgggtgaggaatgtgtggtcacgagagatcatgacagcatacgccgggccgacagagtggtactgccgggtgtcggttcttttggaacggcaatgcagcagctgaaaaaatatgagctggatcaggtgatccgcgaggttgtgcaggaagacaagccgtttctcggcatctgtctggggctgcagctgctgtttgagggtagcgaggagagtgacggcgtggagggacttcatctgctggacggagagatcgtgaagattccggaggcgccgggacttaagatcccgcacatcggctggaattcactggatttcccgcatgaaggaagattgtttgccggattgaaggaacagccgtatgtctattttgtacattcctactacctgaaagcgaaagatccgtcgattgtgaaggcgaccacagagtacggcgtgacgattcatgcttccgtggagaagggcaacctgtttgcgtgccagtttcacccggagaagagcagcacagtgggacttcagatattgaagaattttgcggaaatatagcggaggcatgcgatgtttacaaagagagtgattccctgtctggatgtgaatggcgggcgtgtggtaaagggtgttaattttgtgaatctgagggatgccggagatccggtggagattgcggcagcttacgataaggcaggtgcggacgaactggtatttctggacattaccgctacctcggacgccagaaataccgtggtcgatatggtgcgccgcgtggcggagagagtgttcattccgtttacggtcggaggcggcataaggacggtggatgattttaaggcactgctccgcgagggcgcagacaagattgcgatcaattcttccgcgatcaaccggccggaactgatctcggaggcggcagacaaattcggcagccaatgcgtggtggttgcgattgacgcaaggagacgcgcggacggctccgggtggaatatctataagaacggcggacggattgatgtgggtctggatgccgtcgagtgggcgatgaaggcagaccggcttggcgcaggggagattcttctgacaagcatggactgcgatggtacgaaagcgggatatgacattgaactgaccagacaggtcgcggaaaatgtatcgattcctgtgattgcttccggcggcgccgggacgaaggatcatttttatgatgctctgacaaagggaaaagcggatgcggttcttgcggcatccctgtttcactataaagaacttgagattatggatctgaagaacgatctggcagcgaggggcgtatctgtgcggcgatagcacggtgcgcccacactgctgtctgtgaaaaaaggagtagtgggatatgtcgatgattgacaatgactggcttccggcaatccagggggaattccgaaagccgtattaccgggaattatacacatttgtgcggggggaatacagcagaacagtggtctacccgccggcggaggatatctttaatgcctttcattttacgccgcttagtgaggtgaaggtgctcctgctgggacaggacccctatcacaatgtaaatcaggcacatggtctttcgttttccgtgctgccggagcaaaaggagatcccgccttccctgcagaacatttataaggaactgcatgatgatctgggctgttacattccgaataacggttatctgaaaaaatgggcagatcagggagtgcttctgctcaacaccgtcctcaccgtgcgcgcgcaccaggcgaattcccatcagggaagaggctgggagcagttcactgatgcggtcattcaggcagtaaatgcccaggatcgtccgattgtgtacctcctctggggcagaccggcgcagtccaaaataccgatgcttacgaatccgaagcatctgatcttaacggcaccgcatccgagccctctctcggcataccggggatttttcgggtgccggcatttcagcaaggcaaatgcgtttcttgaggagcatggaatcgcaccgatagactggcaaattgagaatatttagtgtataatatacttacaataaaagcagacaggaggtattggttatgcgtgtaaaagcaattatgatgcctttcagtaagctggcgtgtatcagcgtggagaatacggtagaagaggcaatgaagattatcgacgagcagggacttctctcgcttccggtagtggacggacagcagtttgtgggtgttttgtccaaacagtttttgtttgaggaatttttccggaactatacagggaccagagaagaatttgcacagcgaaaagtgatggagttcatgaagacaagaattgagaccatcggtgagaatacacggattgaggaagcggcagcaatgtttatcacctccaaagttcgttttattccgatcacgaacgagcagaacaagctgcttggaatcgtgacgcagcaggcggtattcaaggaatatcagaagatctttggtaacaaacacaattccatggcaatctacacgtatgatatccgcggtgtgctcggcaagatctgtgagctgattgctaaggagggcggagacatctgcaacatgatggtgattccgacggatgttatggatctggcagagatcttccttcgggtggaagcaccggattttgagcgtgtggtacgcgcgttagagcgccacggttatgatgtgcgtgatgtgaagtataatgatcagaaataatacagaacggatggatctggaatagaagagaggggtgccgcgcatgtgcggcgcccctctctgtctgcgtaaaagggagaaaaaccccctgaaatgaggagtgcccagacacttgcgcgcctgggctattatgaaaaaattatcaaatatattgtaacgaattgtcttgttttttgataattttattgtagcaataagatatgaataaactatgaacaatagttaaacattttaataaggacaagcaccagaaaatgcttgaaaaatctaaggtttcgggctaaaatgacgatatagaacatgaggtaacaagaaggtattgtgcacaaatgcaacagccggatcaacattctgacacggaggtcagatgctttttttcaaaggagtgatagagtatggcaagtatttcaggatatgattcatcgtcactgggcgtgttattttccagtctgaaccggaacaatacaacttcctctctgctgggaggcggaagcgatctgctcggaatcaattattccgattatgcgacgatccgcaacggaagctatttcaagcttttgagtgcctattacagcaagtcggattccacggacagcgccacgaaggtcagcccgtcgatctcaaccgcgaaggatgacgcgaagacactgacccggattgagagtgcggcggagagtacggagaagtcgctttccaagctgacagcaaccggaaaggattctgtgttcaacaaagtggagaagaccgcggaggacggcacgaagacgcaggagtatgaccgtgatgccatctataaggcggtgaagtcgtatgtggatgattacaattcactgctggatcgggcggacgattctaagacgaagagcattctgcgtgcggcgaactctttgaagagcaacgccagagcgaatgagaagatgttggagaaagcgggtattaccgtggatgccgacggcagactttccgtggacgagaagagctttgagaaggcggatatggacaagctgaagtcactgtttacaacgcacggatcttatgcgacgcagacgaatgtggatctcctgaagatcgcatccaacgcgaagagtgaagcggcgaaggcgaatacctacagcaagaatggtatgtatacttataattacagcaccggagatctttacaattccggaatttaacattggaagacacgaagagatgaggctgccataccgtaaggtgtggcaacctcatatgtttgttggcaggagcgggcatggcaggaaaaaaagtagtagtcggtatgtcgggcggagtggattcttccgtggcggcatatttgttaaaacagcagggatatgatgtgatcggagtcacaatgcagatctggcaggatgaggatcagtttacacaggcggagagcggcggatgctgtggactctcggcggtggatgacgcacgcagggtggcggatcgtctggagattccgtattatgtgatgaatttcaagcgcgagttcaagaagaatgtcatggattattttacagcggagtatttaaaagggcgcacgccgaatccgtgtattgcatgcaaccgctatgtgaaatgggaatccctgcttcaaaggagtttggagatcggagccgattacattgcgaccggccactacgcgcgcgtggaacagctttccaacggaagatatgctatccgcaactccgtgacggcggcaaaggatcagacctacgcgctgtttaatctcacgcagaagcagctctcccataccctcatgccggtaggagattacacaaaggatgagatccgtgcgattgcggaagacatcggactgatggttgcacataaaaaggacagccaggagatctgttttataccggacaatgattatgccggatttatagacagagagtgcggggaaatggttccgccgccgggcaactttgtgtcggtggacggagagattttagggcggcacaagggaattacacattatacgatcggacagcgcaaaggactcgggattgcgtttggatatccggtgtttgtgacagagatacgcccggagacaaatgaggtagttctcggaagtgataaagatgtgtatacaaaccggctgtatgcgaatcagctgaactttatggcgctctccgacattgaggagccggttcgcctgaaggcaaagatccggtactcgcatgcgggaagctgctgcaccgtgcggcgcaccggtgcggatgagatctgctgtgaatttgaagagccggtgcgcgccgtgacaccgggacaggcagtggtgctgtacgacggagactatgtcgcgggaggcggcgtgatcacacacgcttaagcgcctgcatcacagggcaaacgtgtggattgcatgcgcgacgccgctgttttcattggagcgcgtcacaaagtctgcgatctccttcacttccggcagggcattttccatggcgacgccgatcgctgcggtttttaaaatgtcgatgtcgttctgggtgtcgccgcaggcaagcgtctcttcgatatcgacgccgagatgcgaacagagcagggtgagaccgtttcctttggtgacgcccgctctggtgaattccagattgtggtagccgccggagagaaaggtgatctcggggtgctctgacaggatctgcatcacttcgtcgcggtagagaaaagtgccgtcctcctgcggataaaaattcagcgtcatcttctggacgttcagattgtggacgcggatataggcagcgagatcatcggtgaaggttctggtccggtgaatgtagcgtttgattgatgtgggcatgtccaggcagtcgatctttccctcacaggaacgctggctgaagccgtcgccattgataaaagcatccatatggatgctctttttttgcagttcttcgatgatggggcatacaagcgcaggctccatcgcagattcatggatgcagaggcgatccggcagatgatagacggcagcaccgttggaggtgatggcataggagacgccgagaccggataaaagtgtgacgggaagcccggcgtaagggcgtccggtcgatatggcaacgtgaattccgcgggaggaagcttcgcgaatggcgtcctgatcctcctttgagatctcactttgtccgttaaaaagagtgccgtccatatcgagggcaatcagactgacaggctgtttcatagtcgagtatcctttctgtaaatgtatctacagaatgatacaataaaatgggaaaacaatcaagaaacggcggtgccgtggcgcggattgcaggaaacattggaaaatacttgcacccggcatggggaaatggtaagatgtggcttgataagcaagaacggatgatagagaggatacgggaatgaccagagaggaatttgcgacacttgtgggaagcagaccggtgatattggacggcgcgacaggaacgaatctgcagaaagcaggaatgccggtcggggtctgcccggagcagtggattctggagaacccgggggttctgatagaattgcaggagcgctatgtggaggcgggcaccgatattttgttcgcgcccacctttacggcaagccggatcaagctggaggagtacggactggagaattctctggtgcagatgaaccgtgagctggtggcactctcaaagcgcgcggcaggcggcagggcatatgtggcgggcgatctgacgatgacgggacggcagctttatccgctcggcgatctgatgtttgaagatctggtggaagtgtataaggagcaggcgaaggtgatctgcgaggcgggagcggatctttttgtcgtggagaccatgatgagtcttcaggaatgccgtgctgctgttattgctatccgcgaggtgtgtgatctcccgattatggtgtcgctgacctacaatgaggatgggcggacgctctacggaactgatccggcaactgcggtgattgtgctgcagagcctcggagcggatgctgtgggattgaactgttccaccggaccggaggcgatgattgatccggtacagcagatggcggagtatgcgacgattccgcttctggcaaagccgaatgccggtatgccggagctctgtgacggcgtgaccgtgtatcgtaccacgccggaggagtttgcgtcagtcggcgcgaagcttgtggaggcgggcgcggcgattatcggtggatgttgcggcacgacaccggagcatatccgtgcattaaagcaggcggtgggttccatgccggtgcatatgcctctcacaaagaaaagacgtatgctcgcctcggagcggatgcatgtggagattcagcttgacggtaagttcatggtgatcggagagcggatcaatccgacaggaaagaaaaagctgcaggcggagttaaaagagggaagtcttagtatggtgcggaccatggcgacagagcaggaggagaacggcgcacagattctggacatcaatatgggaatgaacggaattgacgagaagcagatgatgttagacgccatctatgaggtgacttccacggtagatctgccgctctgcatcgattccagccatgtggatatcatcgaggcggcgctgcgcatctatccgggacgtgcgcttgtcaattccatttctctggaaaaagaaaagatcgagtatctgctgccgatcgcgaagaagtacggtgccatgtttatcttgctgccgctctcggacgaggggctgccgaaggattctgcggaaaagcacgggatcatccgtgagatcttaagacgcgcggaagcgatcggcatgggaaaagaggacattgtggtggacggactggtggcgacgatcggtgccaatccgaaggcggcgctggagtgttttgagacattttctttctgcaaaaatgagatggaactgccgacggtctgcggactgtccaacatttcgttcggacttccggagcgctcctatgtcaacacggcatttctcacgatggcgatcggaaacggccttacgatggcgattgccaatccttcccaggaacttctgatgaatgcggcatttgcatcggacatgcttctgaacaaggaggagagcggcatccgctatatcgggcgcatgaattatctgtccgagaagcatgagggcatggaacatgtgtgggtacctgtcgggacggcgaagggcgctgccgtgaaaggtactgccgcgggacaggcgggaaacgcaggcggcgcaaaagattccgggaacgcgaatgaggcgcgcagtgcggtttttacggcggtcttaaagggcaataagaatcatattttagacgaggtcaaacatgcgttagacaccggggagaagccggatgacatcatcaacggacatctgatcccggcgatcaacgaggtcggcgagctgttcgacaagcagaagtattttctgccgcagctgatttcttctgcgaatacgatgaaggtggcgatcgaatatttagagccgatgttagcacgctcggacaaggagccgaaggcaacgctcgtcgtggcgaccgtggagggtgatatccatgacatcgggaagaatcttgtggtgctgatgttgaaaaattacgggtatcatgtgattgatctgggaaaagatgtcccggcagatctgattgtagatactgcgatgaaagaaaacgcaagggtgatagggctctccgcgctgatgacgacgacgatgatgcgcatgaaggacgtggtggagcttgtcaaagagcgcggatgtacggcgaaggttgtcatcggcggtgcggcgatcacggaaagctttgcggaggagatcggtgcggacggctattccaaggatgcggcggaatgtgtgaaactggtggatcgtctgttggaggaagagtagaaggcgaaaagcggtcttttccgccttcaaactgccccgggaaaatagatgcaaaaaaatagaaaaaaagtgttgactttttgcaatacggatagtatactaatcaagtcggttgcggtagcgaccgatgaatatgggatcttagctcagctgggagagcatctgccttacaagcagagggtcataggttcgagccctatagg

SEQ ID NO: 11691 - DNA, 506 bp, Unknown
  gut microbiota DNA sequence
atttctgtgtgaagttttgaaggtacaatttttatggcccaatggctcagttggttagagcgccgccctgtcacggcggaggtcgcgggttcgagtcccgcttgggtcgtttttatatgggatcttagctcagctgggagagcatctgccttacaagcagagggtcataggttcgagccctataggtcccatttcttattatatatgccgatgtggctcaattggcagagcagctgatttgtaatcagcaggttatcggttcgagtccgatcatcggcttttcacataatttcatattgtgtgtaaatgggcagattcccgagtggccaaaggggacagactgtaaatctgctgcaaattgcttcggtggttcgaatccacctctgcccattcttttgataacaagtattatcagaagtaacttcatagcgcgggatggagcagtctggaagctcgtcgggctcataacccgaaggtcataggttcaaatcctattcccgcaactc

SEQ ID NO: 11692 - DNA, 258 bp, Unknown
  gut microbiota DNA sequence
ccgccatgtcatctttcctttcgcttacggggctttcaccctctctggcaggctttcccaaaacctttctgctaggatcaatgaatcaattatgcggtccgaaccccggaatgcacgcattccggtttggcctctttccatttcgctcgccgctactttggaaatcgatgtttctttctcttcctccggctacttagatgtttcagttcaccgggttcccctccatacgttatggattggcgtatggatacatgaggt

SEQ ID NO: 11693 - DNA, 1542 bp, Unknown
  gut microbiota DNA sequence
tatcgccctccttcttatatcctataatagttgatataattttatgtacttcctccgattgtatcagcatcctcatcttctcatttccatcctcaacatctggcttaccacacctcagattatccggatgttctgacacacagcaatccttataccaacactctcccataagcgcccccttcacggaccacttctcgttttgtgtaaattcacccaccaatgatttcatcactcgttctgtagagtatctcttaaaacctgccaaatactgtaatgtcttctcatcatcaatctttgacaagtcgattctatgattctcaattgctgataaaacctcttcacgaattttgattttatctgtctttccggtacctgtccattccaccagcttatcaaaagcaagaatcaggtattcaaaacaaatcatatccagaatgataatcttcccttctgccttatctgctattgatttcaacatacgatacttgttacgaatatcctgattatcaaccacataatcaaatgcaatataatacacattgtcctctttaatgtctaaatctgacaacgcatccaatatgccctgattgctttctttactttcaactacaagtgcatcatcaaagaaaagttggttaaccaatttccagaagtgaaatcctgcgccggtatcttctgcccataaatacttcatatcacaactcctcttccagtgttatcctataattgtcaaacttcaacaccttaaaactcttatcagaaacattgagaccatcgcaatttcgtaggaaaagcatatattgattcgacggctcaaaattaatgaaacttctgacctcatcattcatcaaattatctgcattatcgactacaataaaactatctctgcactgttcaatcgattctgagaaattatctgatttgtaattaaacaattttatagctttgtattcattagttaatcgtagatcttctaacatttcataaagcacagttttaccggtaccgctatctccaccaacaagagttattctgtcgtcaaattctaaatcgtatgaaaatggatcagctttgaatgtaatattcttataaatcatctgcttctctcctttcatattccttactccaccatgcattataacctctgccaccggtcactatatcagactcattgaatctgatttgcacatcatccggaatatcaaaaagcgttggtctggacatataaatctttatattatccatagtaaaaattattttaagcacattcggaccacactcttctacattcaccaccttatcaggatgctttacaatattaagtaatgtcttgcagccagatgacaaattacggattgtacctaaaccatattttgtttcaatgtgcttgtctggtgtcagcttcgcctcgtctacttgccgaatgagatttatttcatattgggacatttcttcattgcttgtattcaggttgaaatataaatcattttgaagtatccagtcctttgagtctttcttttctgtatatatatcaatcattga

SEQ ID NO: 11694 - DNA, 440 bp, Unknown
  gut microbiota DNA sequence
gataagtaatattataagaaacacacttgaggatttcatgtggaaatgcaactgggaattcgttggagaaaaatgtgagcatttcttccgacgaaatgtttgcatctgattccgtgtctcttccacgtttggacaatccgacggggcatgtccgacacaccggagacaatgggcggactttctggcagcactaactgcactccctcgtagacatgataaaaccgcgcgaacagaaactcgttgccacctgctattgaaattaaggcaggtgacaactcagacatctgcttcgcgcggttatgttttactgcaacataaggatggctgatttatgccatccgttgtttggtgctggtaagtgctgcacgaaagtcctacaaattgtctccgggatgcggacatgacccgcggagtgctccaaacttggaaagacacggatc

SEQ ID NO: 11695 - DNA, 950 bp, Unknown
  gut microbiota DNA sequence
cttggagaactgaggcgcgcgacgggcggctttgaggccgtactgcgcgagtttttgagctgttttcccttgatactccgggcttttccggctttctgcctctcagttatccggtgtgcggaccataaaaaacggccttttttcattcagcaatagcctgatgaaacgcaccatttactaccccaaacagctcctccggtttattgtacttcacttttgcatagatgtccatagttgttttgctgttttcgtgtccggcaaggtattggacggtctttggatcaacaccagcatagagaagattggtaatgtaagtgtgccgcagctgatgcggggttacatcaaagtccagcgtatatctgattttgggttgatttttctgggtcatgcccagcgttggggtaaccgtgtatttgatgctctgcccattcacatacttataatagttccggggcttagtggagcggacaacgacatactgccacactctttgaaactgcgaagcagccagcggctctcctttgctgtcagcaatcacataatctgatatggaattttctttcgtttctctcagacaatccaccaaacacttcggtatcggaatatccctttttgccgccggagtctttagcacggtagaaatcacgggtctgttatgctctgtacgccatgcccgcctcaccgatagataaggtgtatcctcgtccagaaatacacaatcccattgcagtgcaagaatttcttcccgacgcagaccagaatacaaaccgagcataataaacaaatatggaggaagtcccttgactgtatccagaagcacggctacctgctgatctgtcaatgcctctctcttttttgatggttttccgcccttgcccgatattcccgcacagggattgtgttcaagaatttggtttctctctgccgcataaaaaatgcacttgagtagc

SEQ ID NO: 11696 - DNA, 290 bp, Unknown
  gut microbiota DNA sequence
cttcttttttgtcggttttccacctttaccggatattcccgcacagggattgtgttcaagaatttggtttctctctgccgcataaaaaatgcacttgagtagcatattgaccttattgtataagccttccgatttctttgacaatggaacaagcgccagccgaatatcgtcagcggtcacttcttccatatacatctctcccagaggttttatgatatagtttgtcatatccctcgtataacctctgagtgtagacgcagacacctttgccgactgcatcagcagccact

SEQ ID NO: 11697 - DNA, 247 bp, Unknown
  gut microbiota DNA sequence
ccttacctgtcatggcgtatccatcactcatgaactgttccagatagccaagatctctttttacgtagccaaactgtctgcggagtgcgctgcggattttctttgccgtgcgcttcctgctcttagcaaatgtaagatactcttttctggcacatttacggtatcttcttggcaacttaagaccatagcatttacaaaaacggtaaatcatggtctccagtttttctcttgcttcattcaacagtga

SEQ ID NO: 11698 - DNA, 145 bp, Unknown
  gut microbiota DNA sequence
gcagaaaggttttgggaaagcctgccagagagggtgaaagccccgtaagcgaaaggaaagatgacatggcggtatccagagtacatcgagacacgagaaaccttgatggaatgagcggggaccaccccgtaagcctaaatactcc

SEQ ID NO: 11699 - DNA, 148 bp, Unknown
  gut microbiota DNA sequence
gcatcctcggcaaccggagactatggagcatcctcggcaaccagagactatggagcatcctcggcaaccggatacaagggagcatcctcggcaaccggatactgtggagcatcctcggcaaccggagactatggagcatcctcggcaa

SEQ ID NO: 11700 - DNA, 408 bp, Unknown
  gut microbiota DNA sequence
atttaaaatatcttcgtaatatcctgatgccgattcatcacccggtaaatctctacatactcatctctaatcttatacaacactacataattcccgcaaatcacatacttataatccgtccggaagctgactctcttggcaagatccgcccccatatatggaaattgctgtatattctcaaatcgggcatatatctcctgaatggtttttactgccatttcttcattgtcttcggcaatatactctttaatattctttaagtcctctgccacaatagggttaatccgtaatttcatcataagctatacccctacagatttcttaagttcatccaagctcatccaggcactttcatccttaactctttcttctgcctcctgcaacttcataagcagtttcttttccgcc

SEQ ID NO: 11701 - DNA, 769 bp, Unknown
  gut microbiota DNA sequence
gcagaaaggttttgggaaagcctgccagagagggtgaaagccccgtaagcgaaaggaaagatgacatggcggaatccagagtacatcgagacacgagaaaccttgatggaatgagcggggaccaccccgtaagcctaaatactccttagtgaccgatagcgcatagtactgtgaaggaaaggtgaaaaggaccccgggaggggagtgaaagagaacctgaaaccctgtgtttacaagctgtggaagtgctttatatgcacaaccgcgtactttttgtagaacggtccggcgagttacgggtaccggcaaggttaagcacttaaggtgtggagccgaagggaaaccaagtctgaatagggcgtcaagtcagtatccgtagacccgaaaccgggtgatctacccatgtccaggttgaagttgccgtaaaaggcaatggaggaccgaacgcacatccgttgaaaagggtggcgatgaggtgtgggtaggggagaaattccaatcgaacccggagatagctggttctcctcgaaatagctttagggctagcctcattttagtcttatggaggtagagcactgaatttccgcgggggcgtcaaagcttaccaaagaatatcaaactccgaatgccatgtagatgatgaatgggagtcagactgcacgagataagttgggcagtcaaaagggaaagagcccagaccaccagctaaggtcccaaagtgtgtgttaagtggaaaaggatgtgggatttcaaagacaactaggatgtt

SEQ ID NO: 11702 - DNA, 187 bp, Unknown
  gut microbiota DNA sequence
tctttaaatgaacaaccgcgtactttttgtagaacggtccggcgagttgcggatactggcaaggttaagcacttaaggtgcggagccgaagggataccaagtcttaacagggcgttaagtcagtgtacgcagacccgaaaccgggtgatctatccatgtccaggttgaagttgtcgtaaaagacaat

SEQ ID NO: 11703 - DNA, 1160 bp, Unknown
  gut microbiota DNA sequence
tcatatcagctcctcctagtctgactagtttctttctgaactttattagcgtttttcttccaacaactaaatcaatattgctccttttcaacgcttctatgccaacgcatcaaatgacgatgttccgctttccatcactcctatagatgttgaagtacctagcagttccaccagttttcctgtcagatctgccacatctttgccatctattctcagattatattgccgttcttcctgctcctgtttttcggcacgctgtttttccagccgttcttctgtctctttcttttctgcttttcttttttcaagtctttcttcaagttctttccttgctttttctgttcctggatcagcctcatcctgagtacacattacagaactcatgctatcatatccatttatagtaatactataactcagtatctttgctcctcttgctgccacataagcttctgactgttctattgtttttggtattagcgataaattgtactccagccattgttttgtcttttcatctcccatagcctctgacaaaagagagctgtttatatttacggaataatctttgcttcttaagcaatcatatttttgtgttaaatagttcttatattcatgggcattcttatatgttctgcccgttttgctgccagcattttgtgtgttgctataacgattcgtgtttgcagcataggtaacacctgtatcattttgaatcttcattatcctattatcctttccctgaaattttatttatctgttttttatatcgccctttcttcatttattatctactcaaatgtaacgaaccgaccttttttttgtaataaaaaaatcagcagacatatttcccactgattttgtaatcgtcatgctttctggtcgaaataaccattatacttccttatctatcttacctgacgttagagaggaatccgttttcaaatatgtaccattgtttgtataagtcacacttgcgcggtttgcagcatttgatataccagctgctttctgggctgttttgcctgcaaaggaattgtaacctgtaaaaaccgttttcaatgaactgatatctgctttcttcaatgcatcttcatccagctccagcttattcccctttcctatggtaatacctattttagaaagtaaatgactggttt

SEQ ID NO: 11704 - DNA, 71112 bp, Unknown
  gut microbiota DNA sequence
cattctgtaaactgatattaagtgcaaaatgtatattaactagtcaggagcaagtattccggtgccaaaacggtgccaagaaaccatgcaaataaaaatagaccatgtaaaatcaacgaaactatgcagatttcagccataaaaagcatagaaaatatgttgaaaaatgctattcagataacgtgagggtggtagaactgtaggttcaggccgtgttgctacaatcatcgagtaattaaatattattcagtaaatttaaggctcccagggttttccttgggagccttttttgcattaaagtgggaaactgtagctgccgggatctggatcggcggttgcaggagaggaaaactgtagctgtcggagtctaggataaccgtcatggaactgagaaatcgcgggcaagaggccactcgacggaacgtagaatccgcacaaattcaccatattctacgctgcgtgtgtgtgaaagccgtgggagcggggacataatgagaccagaaaggaggaagacatggaccagattaagacaggaaaatttattgcagatgagagaaagaaaaagggttacacgcagagacagctggcagagcagctgggaatcagtgataagacgatctcaaaatgggagcgcggaaatggtttcccggagatttcactgctgctgccgttatgtaacgaactggatctatctgtaaacgaattgctgacaggagaacggatttccgagacagagtatcgggagaaagcggaggagaatatggtgaatttagtgaaagaagcacaggaaagcaagaagaaaattattttatccggaatggtatcggcgctcgtgattattgcagctacgccaatgtttgtggtagcgggagcatttccgatggaggactggatgcggattgcgctgattgcagtcggcatagttgtcattgtgatcggcattgcgattgcatgcattcttgatcgtgatgcaggagcttatgagtgtccggagtgtaagacgcgatttgtgcctgagatgggtgcttatgttatgggaccgcacacgctgaccagaaggaagctggtatgcccgcattgcggagcgcaccggtactgtaaaaaggtgttgacgagataaaaaatatatctgaaaatataggtagaaacctaaagaaggtacgcctatgattacattaaatgattatctctattctggagacaccgtcttaaagattttgaaaaaatacaccgaagacctgcggcagtccgcagtgcagaccgggaatgaagtggatgtcaggcactgtgaatttctgtcgcagattatggaattgctcgagcacaatgatttcctgacggcgcagtcgcagaagatccgggaattctataaatatatggcgcgggaatatccttatctgtcctttacattcaaagggcggatcaagtctttgatccgtgcggagtcgaagttcaacggttatgttgtggagtacatctatgattactatacgaagaacggaacgtatccgccggtgtcggaattgcaggaacgcttgaactgcttccgggatctgattgcgtaccggattgtcatctccatgccgaagtgccatcttaagaatccggaggacggagagcgggaggagatccgttatctgtatgagattgccaatgtgcttaagggatttctggaggagcgcgggtttacggcggagtccgccggaggtgtgaaggagagcgactccctgctgctttcggatgcggtgcgcccgtattaccgcgattatatcgcgcatgtggacccggacggctaccgctccctgcatattacattctttgataacagcgcgaagtgctacatggaaatgcagcttcggacgaaacggatggacgatattgcagagatcggatccgccaatcacctggggtatgagaaaaagcaggagagcgaccgggcgagaagggatgccatccctgagggggaatgtgtctactttgatgaagcctacgagcgctgccggagactgcacgaactggagcttgcgaagctggacgtcaatatgtttgcggcaatcgacaacagcctcatcaatgacgggtgcgggctgtaccgtggccggctgattcttccgtatgagcacctgtcgcgttttcagaatgatctgattgactaggagaaggcaccggccgctttttttgtatttatgtgaaagattctgtggcggatgattgacgaatggagccaggcagagtatgatagaaagataggaatgtgtacacattctatcagagaacacaggaataaggggaaagaacatggggacaaaacagtatgagaggatctttcagattctgggtgctgtactgctcgccgcagtggttgtgggagtgatcgctgtatgttttggcaacggagcgaggagcggagtcaagagagagatcggagcgtccgactattattcgcaggaggagatcagtgcggcgatggataccgcgcaggagtatttcgacgatcattttccgggatgtgtgatgacagctttccggtacgatgaggagagcgtgcgggaagcggagccggaatgggcagatcagtatcaggcagatcaggcaattgttcttctgtcagattttcagacggacaagcacggcggagacggaagcctcaatccaaacgaaatttatcaggactggcagtgggtgctagtgcgctccggaaacggtgactggacattgaagacatgcgggtattaacctgcatgtcttttttttattcataggaaattacatcctatgaatgaaaaagccctccgggcaggatcgcactgcgtcggagtggaattatgtcgctagagcaacccgccgcaggcggagaatcctgcaaagcaggattcttttttgtttcataggaaatatcgtgatacatttatgtgtgaaagtagaaccttcctatgaaataaaaaacgcaccgcgaggatgcgcagctcacggtaaggaaaatatcgctttgcgaaccgcgagcgcgcggagaatctcgcaagcgagattcatttcattaagttactttccggtaaccggggcaaaaaaagtgcgtactttacacggcaggaggcgtatcttgccgggatgacaatggaaaaaggaatcacggaacttgacggacgctcgatctgcattgacggcgacatcggcgaagtgctggcgcagctgtagggaactgttattttttcccgtagagaatgcccatgccgctgatcatccagggtgtgcgcacgtaggcggggacaaaatccagtgttttttccagatttccgatgtagtggatctcggaaatgccttcctttttcagctcttccacaaaggcatccatgtcgccgtagaggcttttctgggcgaagagatcctggaaagaaaaagctccgccgcgttttacgacgcgcagtgcctcccgcacgacatcacgcttgtctctggcggagtggacttcatggaagacgaagttgctgacggcggcgtcaaacgtctcgtcggcatagttcaggtgtgccgcatcgcctttctcaaaatggatgcgggaagcgacgccctcgattgccgcatttttttcgcactgctctttggcgtagttccactgcgcgccccagtaatccatgccgatgagcgctgcgtccgggaatgccttggcacagcggacggtgagcggggcagcgccgcagccgatgtcgagaagcgtgccgtgtccgtcccagttgagatgggcgaccagatgtgcgtgaacctttgccatcatatcgccttttccaaaggcaaagcattcgtggcacgcatacatatagatgccgaaggcgagcagaacggcgcagagaatggcgcagatgaccgcgaggggcgtgtttgagaaagcaagacctgacagcagtgcaagcaccagaaagagagcggcgccgccgaaggtcagatacaagagtttttcaggtacccagtttccgtagtttggtttttgattcattgtgttttcctcctcgataacaaatattttttttgttatgttttataaaagaaaatgcccaccggattaacggtgagcatcattctcttcctttaaatattgtattaaactcagggtgccggcgtcggcgtggatgccgatcgctctggctaaaaacagtctttctttcattgtgtagtctccatgaactaattccagatacccgtgcaggcgcatggacgcaagaatccggatcagttccggatccggttcggcgccgagatactttctgtaataacggcggaaagattcctgcatcatcgcggctgcttcctcatgaaaatgttcatagcagctgccggcggatttctccatcaggataatacattcctcgcggtgtgcagagagataccggatgatctggatctcattgtcgtctgcagtctcgggatgttcctcctccatccgggcaagcccagaaaggagctctctggaatctgcgatgaagggatctaagatggcgcgaagcagcgcttccttgctcgcaaaagaaaagtaaaaggcgccggttgtcacgccggaagctttgcagatcgagcggaggttcgccttcgcatatcccttttccagaaattcccgttttccgcaggaaagtaatttcttttcggttaatttttttcggtcttcttccataacaactgttatgttagtacaaactaacttgaatgtcaagatatacgaggaatttttttgaaatgtatagatttcgttaaaaaaatgaatagaatatgtccgcatatcatgataaaatggggctatagacaattttaatggaggatacgaaaagatgaagaaaaaatcatcggttattgccaaactcattataccggttgcggttcttgggtgcatcgcgattatgattgcaggcgtgagtctttattccatgaccgccgttcagaaggaaagcaatcagatctccggagagggtgtacgtgcgacaatctgtatggatgagatcaatcttgcttttgccaacacgcagaagcttacgcttgcgctctgcgcagagccgagcaaggatctgtatgagtatgtggcatcccagctgacggaataccagtcgaacgtggacagctatgaaaaggagcttctggcgatggatcactattttacggcagatgatatccagcttatgaatgagacatttgatctgctcacagaggcgcaggggacaaccgtggaactgatgcagacggcgatggccggtgattctgcagcagcggtggcaaaggcaaattctgtgatgacggagtggtcagatacgattgcggtcaatatggatacgctcatatctcgcaacgatgaattggtgaagcagaatattcaggaacagaaagatctgtacaaccagaatatgatactatcgctgatcctgctggcaatttcttttgtggcatttgtcatggtggttgttgtgattatcaagacggttgtaaagccgctcagaaagcagacgagtgaactgacagagattattgatgagatcaaaggtggacacggtgacctcacaaagcgcgttacggtaaagtcgatggatgagatcgggcagtcatcgatcggtatcaatcattttatcgagacgctgcagaatatcatgtccaacatcatcagcaattccaatgtccttgacggagttgtcggaaatgtagcaagtagcgttgcagcgtccagtgacaatgccaatgatatttccgcgatcatggaagagctttctgcaacgatggaggaggtatccgcaacgacgaacagcgtcagcgagaatacgaccgccgcggaaggcaaagtacagaagatggcagatcagaccaaggttatgtcacaatatgcgcaggatatgaagaagcgtgcgacggagcttgagcacacggcgacagagaacatgaacaacaccaacgagatgatcggcgagattacgacggagatgaaccaggcgctcgagaattccaagagtgtggagaaggtcgcacagctgacggcggatattttaaatatttccagccagacgaatctgcttgcactgaatgcatcgattgaggcggcgcgtgccggtgaagccggaaagggatttgcagttgtagcagatgagatcagacagctcgcagattcttcgcgtgagacagcgaacaatatccagacgatcaatgagcaggtaattgaggcagtacagggactggttgtttcttcggagaagattgttggttatatcaacgagaacatcctgccggattaccgtgcgtttgtgcagggtggtcagcagtacaatgatgatgcgacccacatcgacaacacgatggcagagtatgcgggcgaggcgcaggatatactggcgacaatgatggagatgacagaggcaattgagggcatcagccgtgcggtcgaagaatccgcaaatggcgtgaccgatgcagccacgaatattgattccctggtacagtccatgtccactgtaaacggacagatggaggagaacagtactgtggcaaagaacctcaaggaagaatccgcggcatttgcatgtgtatagaacgcgggacggagccatctgaaagaagctgccgcacgaagcaggtaaacagctttgagtgataagttatactatgagaagcatacccctacgatttcggctggaatgcctatggaacattctgttcaaaaaatgcggcatttctaaccagccggtgactgcatctgcgatgatccgtgtctttccaagtttggagcactctacggactgtgtccgcaagccaacagacaattttaggacttttgtgtgtcccttatggcaccaatgaacaaaacataaccgcgcgaagccgatgtctgaattggcatctgccctattttcaatagcagatgccaacgagtttcggttcgcgcggttttatattgtctgtgaagcggtgccattagggacactagaaagtccgctcattgtctgtggcttgtcggacacactccgggagagtccaaacgtggaagagacacggaatcagatgcagtcatccggctggaagaaatacacacatttttctccaacgaatgtttcatatgcagttccacccgaaatctgcatcatgcgcttcctgtaatattacttatcactccaaagaggactctgcttattgcggcaattcctttacatccgcaatcttcttcgttttattttacataggcatggtcaaccttaatcttcgggtagtaattatcccccaggcattccgtgactcttccgcagatcgccgcaaccagttcctcatcgctcatcttgaactggaacggcaccagcacatcgaagatcaggttggaatgggtcggaccgctgactaccctgaaatcatggatcgtgatcacatcatctattccctttgtgatcgatacgacagcggctttcagttcactgacgtgctcatcggaggtcacaatcgggtccatatgtatcgtcgcctcacaccccagcttctcccgcagttcattctccacgttgtcaatcacatcatgtacttccagaatatcgccgtctgccggcacttccgcatgcagcgtcaccatcttgcgccccggaccgtaatcgtgcacgatcagatcatggatcccgcagatctccggatgcgacatgacaatccggtcgatctgcatgacaaaatcctctgccggcggctgtcccaacagcggattgagtgtctccttcgccgcgctgatccccgcatacaggatgaatacaccaaccagcacaccgcaccatccgtcgatgtgaagtcctgtaaaatgtccgatcagtgttgccgcaagaactgccgttgtcgcgcaggtatcactcaggctgtcgatcgctgttgcctgcattgccgcggaatcaagctttttcccgatcatgtgattgtaaaaatacatatacagcttcaccagaatcgacaacaccagaatcacaacaatcagtccggagaactctgtctcctccggatgtacgattttgcccaccgaatcccggatcaattcatatgccatcagaagaatcgctgctgccaccaccagccccgagatatactcaatcctgccatgtccgaacggatgctccgggtccggctttgtgcctgccagcttgaagcccgccagcgtcacgatcgaagatcccgcatccgacaggttgttgaccgcatctgccgtgatggcaatggaatggctgatggtacccgcaagaaattttcccgcaaagagcagtacattgaacagaatacctaccacaccgcacagcacaccatattcttcacgaatcttcgcctgatcgttcttctcctgaatgaatatcttcgccaataatgtaaccataaaactaccccctcgatcgcttctcccctactcaagctttccaatatcatgcaccggccagtagatcactgccgccttgcccagaatcttatcctctctcacatacggattcgtccagtatcgtgcgtcccacgaatcattccgattatcccccagcatcagataagagtcttccggcacctcaaaatgataattccccgtcgccaccgtccagtcctctttgagataatcctcgtccagcggcgtatccgctccgtcaatataaatgtatccgtcccggatatccacggtctcgcccggaagcccgatcacacgcttcacatacagttcttcctcgttgtccggataacggaaaatgacaatatcaccgcgctccggcgacttgctccggtatgccagacggtttccgatcagacgatcccccggcatgatggtgttctccatcgacccggtcggcacatcggcattgatgataatataatttttcaaaaacatcgcaacggcaagcgcgattacaaacggtatcacccagcttaaaatctcacggatgaccgcttgtgctgtccccttttctcttttctcttcctttggttgattctgttttggcatctttttccctctgtctgctttctatgtctgcttgttattgtaacacacctgacggaaaatgaaaacgcatgatggcatctaattctaaaatgtgctatgatgtcggtatgcgctgcgggcatccgtccgcacacacatacggattacttttggaaaaggagttcttcatggaaacttataacgatcaattatttccccccgcatttcttgtaaactacacgaaggagcctgccggcagacagcgtgttctcacctactcgctctttcgttttctatcctgcgtgtcagaagagcatccggatctcgcacaattcctcgcagatcaggtttcctgcccgtcggccgaggacagctttgagatactggaggattatctctctgcagacgactatttctcgccttccatcgcagcggacggctttgaaccgttttatctgtatgccgccattgtgctgactgcaggggttcctttcggcaccaccacaccggttatcaactctctgatagaagatcatgcgccagaggctgccagcctgccttacgcagacggcaatctgccgctggatgccctgctcgtggactgccggaacttctacgcagcactctgcctgtgcctgatgcatcacacggacgcactggctgttttgctgccgcagtttttaaatgcataccgtccggaatatcacttcagctgcgagtcttttgttctctatgactttatggacgagtattttgagcagcatgactgtctgcaccatccgtcctttgtccagttgacggataccctggtcgctgccaccttaaactactacaacaccgattttggcacacttctcgagaccgagatcgcccagaacctttccggaaccggctcccggtttgcagggcttaagcgctatggcagcgtgcgtctgcctgccatagctgacacagataaggcatgccatatgctcgccaacctgttccgctatgccgccctttacgagctgcgcagccatctgtttgattttcatctggatgaagaccgcctgatcacactcgacaactggcagacggaacttcactggcactatgtacagtatgcgaatgtctatcagcttgcgcttgactcctttcagtctgctgtactctccagagagctgctgcaccggcagtttctgcttaatctttcctgcctgaacctctgattgcgcgttctgatgcagtgtgacccctgcaaattttgctttataaaatgcagttctctctgcgttcaagaagcggcagccagccgatctcatgatcgactggctgccgcttttttatcttctattatattctctaaatgttcttcgcctattctgtcttaaatacggcgatctcggtcttaagacctgtcatattatctcccaggctctccgccgtgccgtttaagttctctacattctgctccagacttgcggcaaccttcttcaccacttcggcgcttgctgccgtctcctcaatgatagaagaaatattatgtactgcctcaagcgtatcctcgcgctccttatcggcacgctccgttccggcaagaatctcctttaatccgtcaaacagcttatccatggcatcgctcatatcctggaatacaccgataacctcacgcactgcttcggtctgctgtgcaaccatctcgcccgcctgctttgcgctctcgacgctcacgccggtctgcgcactgatattctccacattattgcggatctctccggcagcctccgccgaattgtctgcaagcttacggatctcctcggctacaaccgcaaatccgcgtcctgcctctccggctcttgccgcctcaatcgatgcattgagcgataacaggttcgtctgctccgaaatatctgtaatgacagaaacaaactgattgatcgtctccgattcgcgcttcaagtcttcgatgctttcttccaccttcgcggtcacagctgtcgtctcattcgcgcgctgtcccagctgttcgatccggtccatacctttgcggatcatctcctccgcctcagacacaagcgtctctacctcgcgcgccacacggttgacttcctgaatctcctcggaaagcgttcccgtcttgctcacgcactcctgcgcatgtgtggactgccgctccatgccctcgttgatctcaccgatcgcgtttgctatatcctgcgaatactcctgaataataccggatgcattcgtcacttcaccggcagatgccgccagcttatccgtcgcctggctgaccttctgcaccagctgcttgttgtgtgcgatcatgtcatttgccgcagcagcaagtccgcggaactcgtcgcgtcccttcacggacacggtcgttgccagattaccttccgccacaacctcaaggcttccggaaatacgcttcatattcttgcggattccgcttgtcactgcggttccgatcaaaagtgcaatgatactggagatcagaactcccgctatcgtgatctgcttaatggactctgcctgtccggtaatgacctttaacggcaccagtgcacacatcgttgccccggtatcctcactcttgctgtggaaaaacagatactctgttccgttgtactgcacctggcttacgccgtccgtctcactcgcctgcagataaaaatccttgtctgcaaaaatcgtctctccctcgaccggcgttccctgttcgtctcccgcattgcgcttcactgcaagctctctgccgcctgccgtcacgaatcccacaatgcttccgtctcccagattcagtccctgcatgaactctgtgactgcctccgccttgatgtcgattacgataaccgccttaccgttctgcgcggttgcctgatataccataatgtatccggacgggtcgatgctcagatactcatccagcgcattgtgatggtcatcccactgtcccagcttgccatcagccgccatctcatccatgtactcttggtaaatgcccttctgcgccttgctcttcgtcgagatcatctgcagatcgccggaaggaataatatagatattgctgatataggagttgccgacctgggaagcaagaattcttgtcttcacctggtcaatcaacgcccgcttggacgttggatcattgtcgtaaatccccacaaaatactttccaagatccgaatccaccacgtattttaatgcctctgcactgatgaacgagttgctcgtatcgatattctgcaacgccatctcgatcgtctgctgcgtggaatcgcgataggaactgctcattccgtccgccgccttgcggtaggaaataattccaagcacaatcataaacagaaccggcacaagaaaacacagcacgatcttctcccggattccaaatgccatcgtaacattcgcgtttcttcgctttgcctgcttcttcccctttttcatattgataaccttctccctgtttcttaacatattacccttattatagcaaaaaacacaaatattgccatatatttctacgaaaaagtactttatttaacaaaatatagccattttgttcaaaaagcatacaatattgcctctgcctggctcccgctgctaaaaaagtgttaagtctcttcctggtacactatgaaaaaattaaaaaaaagcggcaaaatccccctccgttttcctggctgttatacttgatgacaactgaaaccaaagggggattttatatgacaatctttgaacacattttttctgtgatcggtattcttatcattatcggaggttttatctacggaatctatgattcctattttgaaggcaaaggcacttcatcatccaaagcttccgcttcaacctcagctcagacaaccgatgccgtctgactctcaagcatgcggtagcccacacgcgggatcgtggtaatgtacgtcggatccatcgggatcttctctatcttcttgcggatatttgtcatattgacccgcagaatacggctgccgctgcttgcatacggtccccatatcttctctaacaacatctgatacgtcaccacagttcccgaattgagggcaagacactccagaatccggtattccactggcgaaaaatgaatctcctccccggcaaggcttacctgtcgtcttgaaaaatcaatcttcagatctcctgcctgataaaagcttccctgtcctcccggaatccttctgcgcagcgcggtgtaaattctcgccgcaagctcctgctcatgaaacggcttgacaatgtagtcgtccgctcccgcatacagggcattgactttatccatatatcccgtctgtccggatacaacgagaatcggacaatccgtccactctctgaaccactggatcagaccaatcccgtccatatcggaaagctgggtatccatcagaatcagatccgggcagatactggtgctcatctccatgccggagcgtccgctggtggaagtataaagcctatagttctcccgcagcagcaccctgcggatcagataaaaaatactttcatcctcatcaatcagcaaaatctttactctgtcacttatttggtttttatagttcactgaaactgcctcctgtcattacgtttttctatatatgtaagtaattcagaaagcaatctcctttctttccatctgtctggtgtatataatagatattctcccaatggtaaatcatgcgacatccgtaacggcggcttagaatccggcagacaacgcataccagaagcatcacccacacaaccaccgccagcagtttggacagcaggctgcgcatgcccgcctgctcccgcatgacgacttcatccagcacggaatgaatcatcgtgaacgtatctgtgcaggcatccggatttgcgtcccttgcttccagcagcgtctgtgcagacatcatattctgccaggaaccttcgtgcctcatctctcccgtcagagcagcctgcccgtctgccacgcaggctgcagcatttccacgctccgccttgcctgccggatccggtaccacataaaaaaaagacagcaggagagccatcgccatcagacagcataccaacttatgtcttttgctgttcgccatttctcccaccatcctttccgcatttgctaattattgtaacatatattctttttatatcaaacttgtatttgtaaaatcatctttttcttaatttcttagcggtttcttaacggctttttcgtatatgacgcgtttacaccggcaaccctaaacaggtaaccatcattcacctcccccgggaggttcacagaaaggatgccctatgaaagcaaatgtgatcgaaggctgtatcagctgcgggctgtgtgccagtgtatgtccggaggtcttccggatgaacgatgaaaatgtatcggaggtctatcatcagccgacgccggaacaggaagatgccacgcaggaagccgctgacggctgcccggtgagcgtcatcgaaatcgagtaatccccggcagagaaaaaacatctgcccgccgcaccagtcagtgctcagcgggcagatgttttttcttgagttcctccacgtttttctccacgcgccgcttatccagcgggtacacaaaccacagaatcgctgccacaacaaaaaatccgatcgcaggcaccagcgttgctgtggtgtacaatccacgccgcaccacatccgtctgcgccgccgcagccggctcatacccgatcacctgcagcgcccatcctccgatgcctcctgccagcgcctgtccgacctttctggcaaacgaatataccgcatagacggttccgtcatcccggtgcccggtctgcacttcctgatcatcgatgacatccgtgatattcgcccagatcactgtattaaaaaagccaagcccgagatatccgattgccccgagccacagaaacagccacatattctgtaatttcagcacatacatgactgcaaatacaacaccggagaacagcatccccgccacggacgcctcctttttcccaaatcgtctggaaacaggcacaccgagcggcgctaccaccagcagaatcaccagtgtggacagcagcgtgaacagcgagatgccgcgggcatccccgaagtaatccggataaatataattgttcatcgtgctgattaacagctgggagagcagcagaaataccgcggctccaatcattccgagaagcgcacggctcctcgcaatcgcaccgagcgttgccgcaaaactcacagattccgcgtccacgtcacgctccaccgccacccgctccgtagtcatgcggtaacagaccagatagcagagtaacgcgagaatcgagaaaatgcccgcaaccaccgtaaatgttccgccgccgcgcacgacctgattgccgtctgcatcggtcgtgtacagaaaaagcggcgtcacgatgccgatcacaagccccgccagtgtcgccccaatcgaccgggaggtagataacgccgtccgctccgatgcctccgtcgtgatcgcagatgccatcgaaccatacggaatgttgatcgatgtataaaaaatacttccccacaaaagataagtaacatacatgtagacaatcttccacggcatagatgcctgcgccatggcagtctggtacattaaaaaactcgacagcgccaccggtccgcacatcctgcggatccagcatcggaactttccatcccgcgccggcggtgccgcgtcgacgatgcgtcccatcgtcacatccgtgaatgcatccacaaatcgtgcgaccagaaacagtgtccccaccattccaccgctgataccgagcaccttggtatagaataccatcagaaacgagctggcaaaaataaaggtaaaatcgttgccaaagtcaccgaacatgtagccgatcttatcccgcctgccaaagtctctcacttctccatccttcattgcactaaccctccgtcttctgctcccatcggaacgtatgaagagagtatgcccggattatctgtcctgtataccttttttctggcggtacatgcgctcatccgcaagcgccagcagttcatggcttttttgctttccctgctctccccgcatcgcgcagccgatactgatcgacagctgccacggggtatccgctccccaggcaattgcatttacattctcctgtgtctgatgaataatcacgtccatctcgtcctgcgtcttaccttttacaatcacaacgaattcatccccgccgtagcgtgccagaaacgcctgcatattgccaaaggtgcgctttaactgctccgccaccagcctgagcacctcgtcgccggtcacgtgaccgtaggtatcgtttactttcttgaacttgttcacatccatcagcagatagcagcaggtctcccgctctccgctgcgctcgtcaagttcccacatatactgatccagtctgcgtctgttgttaagaccggtcagtccgtcctgcgttacctgacctttctgaataccaagatacacccacagcaatgctgcaaccgtgaacgcccatgcggcatccatggaaaatattttttctaccagaatgcccgcagcagggaacaaaaacgcggcggcaagcttccccagttctcccctgcgctgcgcacttccggcacggcgcgcaccaaacgcagcaagaaggaatgccaccacaaggtataacatgcccacggcaggtatcagatatgccgcaggtccctttttatagtaattcaccatattgataaaatagaccgccttcgtccacgggtttgagagcagcacagcactgccgatcagtgccggtatcgccagaatccagcattttatccctctctgtccgtttccgtcctgcgccacatccagcacatacaaaaagcacaggtaggcgcatgccaaaaggccgaacgcataccacacccccagcccctttaacaaaatccttggaccaaatccgccttttccgagattgcacaaaatcgctgtgcggcacagtaaaagcagtacaaacagcagcatctccgtgcgcagcacgcgtgtcctccacgaaaaagacagcgtccgcctggtattatggcacatcataagcagcgcaaccgccggtatgaaattgatctgtaaaaatgctgccgtactcacgcagtccgcctccccatgcaccgcgctctatgcgcgcatacgtttctttttctgtttctcctcatacatccgctcatccgcctgctgtatcaggttctccccgcgccttccggcttcatgccagaacgcgtagccgatactcatggacagctgcagcggaagctgtccctctttgttaaaccggtcgataccttcctggatccgcgcgatcgcttcctcaatctgttcctgcccaaaccagtctccgagcaccgcaaactcatcccctccatagcgtgcgagaaataccggatctttgccgaacaccccccgcagaatatccgctgtatgccagagcgcctcatcgcccaccgcatgtcccagttcatcgttgatccgcttgaaatcatccacatcaatcatcagaagtccccactcgtgctccgggcacaattcgatcttccgctgcagatgtgcgtcaaactccctgcggttattcagtccggtcaacccgtctgtcgtgatctgccggttctgcgcattcagataaataaacagtactgccagtgccacaaaaggtcctcccgtgcgccagctctccgcaaagctctgcaccattccgcccacaaggctgaacacgcctgcctcaagcagatagcgcgtctctttctgcccttccttggtaacctccttcggatacgccgtcgctgtcagaataagtcccatcagatacatcgcaatacttaccagctttgccggcagactgccgtgatttaagctgtaggacaccgcatgcacgccccatccttccgtgctcagtctccagggaatgatcaccgtaagcagcaccacagcaatagcggttcctgtcataacatggcataccgcagccgtccaccgccggttatgccgcacagaaagctttccgttcacatacaaaagccaggcatacggtactgctgtcaggaagaagcagtacaccagatacccggcatacagcaccgtaaaccgatgtacataaagctgcagtgcatgatacgtcacatcactgcccatcatgcagataatcagaaacggaagaaacccgaaaatccggtctccctgcgtccgttcctcccgcttccagttattcattccgatggcaaggagcatcactataggaaacaggtagatttcaagctgtttaaactcttccatcatgcatcctccttacctaagattctcctattataccattattgtttctgtctgtcagtaaaaaacagggaaaaagtaccacaatacctttcccctgttcccagttgtcattctattctttgagaattactgatattttctgcgaaactgcaccggcgtcatctcatacgcttttttgaacagccggttaaaatgctccacattctcgtaacccacgtaggcggcaatcgactctaccgtctggttcgtctcctttaacatagtgcgtgcttttttcatgcgtgctttctttaccgcatcctggaaggtcatcccggacttttccttaatgtatttggaaaggtacggtttggagagattaaactgatctgccagcacatccagcgtcacatccgcatagtgattctgtatgtaattcatgatgtcgacgatccgctcctcgcgtccctccacaatgttctcactctttaacatcttgttggcagcggataccaatgccgcgatcgagctggtgatgatatcttcgtcaattccgacgccccagtaattcttgcccttgcagatgatctccacatacgccgcagccttggatgatgatccttctgaaatggcgtgctcctcgtatacggcaagctcgtagctgatgccgaaatacatcttgattgcgttgctcacggcgtccaggcggccgtttcctgtcgtctcaatcgtgcggcgctccttgttgtgctcgatcaccaggcgtgatgtgatgccgtccttctgctcgaaatgacactctgaaatctgaaaaacatcgcacaggttgacataatgttcttcaaaaatccggtaaattgcttccggcgagagttcctgatgtctgcgatccgatacacccttgaccagataaccgacttcttccttcatcttatccggcagatccataccgaagttctgctttaatacgaatgcgactccgcccttgccggactggctgttgatgcggatgacatccgactcgtattcccttccgacatccttcggatccagcggcaggtacggcacatcccagcggtcgccgctcttgcccgcttctctccacgccatacccttggagatggcatcctgatgggaaccggaaaatgcggtaaataccagatctccggcatacggtgtacgctcgtaaacccgcataccggtaaagcgctcgtatttctcgcggatctcgctgatattggaaaaatcaagcttcggatcgacaccgtggcacaccatattcatcgccagcgtcacaatatcaacgtttccggtgcgctctccgtttccgaaaagagtgccctccacgcggtccgcaccggcaagaataccgaactccgcatcgctgataccgcatcctctgtcattgtgcgggtgaacgctcaacaccacattatccctgtatttcaaatgcttgtgaatatactcgatctggcaggcaaatacatgcggcatcgcaatctgtaccgtggtcggaatgttgatgatcgccttgtgctctgcatccggcttccagacatcgagcactgcattgcagacctcaaccgcatagtccacctctgtgcccgggaagctttccggactgtactcaaacgtaaaattgccgtccgtctccgccgcgagtgtctttaacaattctgccccgtccactgccagctgcctgacttcttccttgctcttcttaaacacctgctcccgctgtgccaccgatgtggaattgtacagatggatgacggcgtgaggcgctcccttgaccgcctcaaatgtcttccttataatatgttctctcgcctgagttaaaacctgcaccgtcacatccttcgggatcatgtcgcgctcgattaacgcgcgcataaagttgtattccgtgtccgaagctgccggaaaaccgacctcgatctccttaaatccgatgtcgaccagcatccggaaaaattcaagcttttcctccagtcccatcggctcaatcagcgcctgattaccatcccgcagatccacgctgcaccagatgggcggcttctcaatgctgtccttcttcacccagtcatatgtcacctccggcggcataaagtatgattttccgtattttgctgcaatattcatgtctttcctccatacaaaataattcaagaaagttgatttctgttattcatttcgtatatactatcataccccttatgcttccgcaaggtgcgtttttaatcaaatatattgatttattttatctttttctaaattccggcctttttgcagatgtcattgagacagcagcggtcgcagtatggcgctgtccgcgcggtacagactgcacgcccgtgatccacaagcctgtggcagaaatcattgctctcctccggcggaatcagcttccagagtgccatctccactttctttggttccctgatcccgtccacgagcccaatgcggttcgccaggcggatacagtgcgtatcagtgacgattgccggctgtccaaagacgtcccccatcaccagattggcgctttttctgccgactcccggaagttctaacagcgcatcaaaatcttccggtacttttccctggtacttttccttcagcatcttcatgcaggcggagatgtcgcgcgccttgctatgtcccagcccgcacggttttacaatacgctcaatctcctccacatctgcatccgcaagtgcatccacatccgggaattcccggtacagatcctgcacgaccacattgactctcgcatccgtacactgtgccgccagtctcacactgaccagaagcttccatgcatcgtcataatccagtgaacatcccgtgtccggatactcctttttcaaacgctctatcacctgaagtgccagttcctttttttgcatatttctcctccgtctctcttaaatccggaacttcttccactgatacagttccatatccacatagccgtcagttacttcgacgccctctgcctccagcagcagcttctgctcattcacaccgccaaatgcaaaggcatccgagagtctgccttcccggttcaccacacggtaacagggaatatgcgctggatccgggttcacgtgaagcgcgtagccaaccactcttgcccatctgggattccctgcaagcgccgccacctgtccgtaagatgccacacatccctttggaatctgctttacgatttcatagatcttctgataagaattgcccgactccgccatgattgccgcctttcttcctatatcatttattatcatctatcttaacatacaatccggcttttcacatcttctttttcctgtaaaatgtcttccatttttcccagttttgctcacctttccatgtgcttgtattttttcccgtgcgttcttgcgttcgcgtttgtaaagtgctaaaattttgacttgtgtttataaaaatttaataattacagactgaggaaatgaaaatgaatgaattgaaaccaaaactatttgacgtcttaaaggactacagcaaagaacaggccatgcgcgacgtgatctccggtatcatcgttgccatcattgccctgccactgtcgatcgcgcttgccatcgcatccggcgtcgggccggagcaggggctctatactgccatcatcgctggattttttatctcgtttttcggcggcagccgtgtgcagatcggtggtcctacggcagcctttgtagtcatcatctatggcattgtcacggattatggcacggcaggccttactgtcgcaaccattcttgccggcatttttctgatcgtaatgggaatctgccactttggttctctcattaaatatattccttataccatcacaaccggttttacctgcggtatcgctgtgaccctgtttgtcggccagctcaaggatttcttcggactctccatcgcatccgtgccgtccgggttcgtggataaggtcattgcctacgccacaaatatttccaccatcaactggactgccaccgctgtgggcgctgcagctattgtcatcatgctgctctggccgaaagtcaccgacaagattccgggatctctgattgcgattattgtcacgaccgccgttgtctacttcgcggatctcccggtcaacacaatcggcagtgtctacggagagctttcttcctccttcccgacaccgcatgttccggcactgtccatgaaactggtgcaggaaatgctctcaccggcatttaccatcgcgctgctggcaggcatcgaatccctgctgtccgctgtcgtctcggacggaatgatcggtgatacccacaaatccaacgccgagctggtcggtcagggactcggaaatattttttccggtattttcggcggtatcccggcaaccggtgcgatcgcccgtaccgcagccaacgtccgcaacggcggccgcaccccggtcgccggcatcgtgcactgtattaccttaaccattatccttctggtgctcatgccgcttgccgctttgatcccgatgacaacgcttgccgctgttcttctgattgtggctgccaacatggcagactggacttcctttttccgtctctgcaaaacagcgccaaaaagcgatgtcattgtgctggtggcaactttcctgctcaccgtatttttcgatcttgtgatcgcgattgaagtcggcgttgtgctcgccgccatgcttttcatgaagcgtatggcagaaaccgccgatgtgaccgcatggaaatatctggatgagccggacgttaccccgggcgaagcggaaaaactgcgcgatattcctcacaccatccgtgtcttcgagatcagtggtccgctgtttttcgccgccgcagaccagatcttacagatcaacagtgacaaggctacccgcgtgattgtcatccgcatgcgcagcgtccctgccatcgacgccagtgccatgaaatcactgcgcgaactggccgaccgtgcaaaaaagaaaaagattacactggttttctcccacgtcaacgaacagccgatgtccgtaatggtcaaagatggctttaccgagtacgtcggagcccaaaatttccatgcaaatatcgtagaagctctggattatgcagaaaatctggtaaaatagtcctgttcctcttacatctactttatgaacatccgccaaactgttacaataatagcaggaaaaaggcatcggtgcacaagatgcaccggtgccttttttacatttagagtaatacggtatttacaaaggaggattctttctatggataatcgtttgaccgatctttcccatccggcagttgcagcacaaagccgcaataagacagccattgccggcacctgcacaatgaatacggtacttgcggcggcctacatcgcagaagtcttaaaaggcgtgcgcagtcttccgtcgtatctgatttttcttctgctctgtctgctgccctgtgtcacatccattcttgcctacacaaagcagaaggatacctctagtgtgcgctatctctgcggcggcggctttgcccttctgtatgcctatgtgatgtttacctcatcaacagatctgacgttctgctatgtaatcgtaatgctgttgattcttctggtgtatgcagataaaaagctcgtttccctgctgtgtacttatgcactggtgatcaatatccttgttctggtctttcgtgccgttacacagggtttcaccgctgcccagattaccaatgccgagattataatcgcctgcattatcctttcctatatttttgtattgatgtctgtcacaaagattgcgcagatcaacgatgccaacatcaaaaaggctgactctgaccgcagccagtccgatgatcttctgcagctgaccttaaaggttgccggagatatggcaggaaatatcgatcaggtttcacacagcacctcacagcttcgagattccatcgccggcacgcagaccgccatggaggatcttaccagcggcacttccgagaccgccgctgccatccaggtgcagcaacagcagacagaaaacattgaccagcaggtacagaacgtatcatccgtcactgccgaacttctctcctccaccgcagagacctctgccaatctgacggcaagcaaagatgttatgaagaatcttgtgcagcaggtacaggtctcagaggcttccagtacacgcgtcgcggattctatggaagagctgaaggaatatgctgacaaaatgcagagcatcgttgccttaatcagcagtgttgcttcccagacaagccttttagcgctcaatgccagcattgaggcagcacgcgccggtgaagccggacgcggttttgccgttgtcgccgaggagatttccagccttgccggtcagaccaatggtgctacgggagatatcaatcagttgattgagcacatctcgcagtccatttcctccgttaccgactccgtcactgaactgttcgacagcaacaggcaccagagtgaatacattacttccgctgccggatattttgatctcattgagaaaaataccgcaagcattacctccggcatgtccgagttaaagcagggtgtggatgcggtatctgattccaacagccagattatccagagcatcgaaaatgtatccgccctgacacaggaagttaccgcaagcgctggtgcgacccttgccggctgccgcaccaatctgcaaagcgtggacgacattgccctgatcatgcagcagcttcaggaaaatgccaatgaactgcagaaaaatacacagtaatcttttctcttccatacaaaacgggactgtcgcatcaaacagccagtcctgtttgatgtggtaagtagtatgaagaatgaccatgtccttcgatttcagatggaatgcatctggaaattcggatcaaaaatgtggcatttctaaccagccggtttttgcatctccgatgatccgtgtttttccaagttttgaacactccacgggcgtgtccgcaacccgcagacaattttaggattctcgtgtgtcccttgtggcactgctgaataaaacataaccgcgcgaagccgctgtttgagccgtcatctgccttaacttcaatagcagatgacggcgagttcggttcgcgcggttttatattgtctgtgaagcagtgccgctagggacactagggaatccgctcattgtctgcggtttgtcggacacattccgtggattgtcaaaacgtggaagagacacggaattcgatgcaaaaatccggcaggaagaaatgcgcgcatttttttcaacgaatgttccatctacatttccatctgaaatcgataggatgatcttcctccttatattacttatcacgtcaaacgggactgtccgctttatgcggcagtcccgtttttatagatgttcttagcgtccgagctcctggcggagctttaccgtacggcagattttctcatatccggtatttgttcttaaaagccggatcgttgcccactttttccgggtgtcatcccagtagcgcagcacacttccgtcgatgccttcggaacggatagagggcgtctgaagatgctcgatcacgcaccccatcgtatccgtccgcactccctcgaggtactgctgcgccatgctgcggaactcctcgctgcccagatactcccggcgccatttccgtccttttttctcctcggagagcaccttgtaattatgtacgatctccccggcttttgtcaccggtgcaggtccgtagtcgcgggctgcaaaatgaacataatacaactgccagtcactggtgagaaggaacgccctggtcggcgtatttacaatctcccccacgcagcagattgccccgataaacccgacccagaaaactaatgtgagaacacacgccgcaagcccgagtgctctacggtcaaggtttgcggcaagcagcgggatcaccgctatcgatcccgccgctatcacgataaaaactgccgccgtaacagactgccccgttcccgctctgcggttgacgccaacttccaccgtcatcactctgtcgttgccccgtcctgcgcatccggctgtcccgcggctgtcttttcatcttttaccacaagattcacggaatccagtcccgacacattgatgttgcggttcacctgtgcatcgtaggactctgcgttgatgatgtctgccagatcaataccggtagcctctttcatgctctcaaatacttttgccatgacaaccggcacattgccggcaacctgatccacaccgtttccaccttctccgccgccgataatcgtgatcttgtcgatctgaccgagcggctctgccactttggctgcgatgtccggaagtaccttgatcatcatctctgccactgccgctttattgtactttgcgtacgcctccgctttcttctccatcgcttccgcctctgcaatacctttggcctggatcgcagatgcctctgcctcaccgaccgcacggataccggcagcctcctgttccttggcgtaacgctctgcctctgcctgcgcttttctcgcctccgcctcgcgctgtgcctcgaactgtcttgcctccgcgtccttctggcgctggtagagttctgcctccgcgcgctgctgtgccgcatacttatccgcttccgcctgtttcttgatctccgcctccagggactgctccttgactgcaacctccttctgcttcagctcaatctcacgctcctgctttgcaatatccgcgttggcggttgtcacctcgatcgtcttacgctgctcctctttctggatctcataagctgcatcggccatagccttcttcgtatccgcctccatctgaagttccgacttcttgatggcaagttcattctgcttcttcgcgatctccgtctgcgccgcaaccgctgcatcattggactctttgtccgccgctgcctgtgcgactttgatgtctcgctcactctcggcacgggcaatcgccgcactctttttgatctttacaatgttgtcaatacccagattttcaatgacctcattgccgtccacaaaattctggacattaaagctgatgatgtcgagtcccatcgccgcaagatccggctccgcattttccttgaccaggttggcaaacttctggcggtcggataccatctcctcgagcttcatcttgccgacgatctcacgcacattaccctcaaggacctctcttgccaccccggcaatatactcggtgtttttatttaagaagttctctgccgcaagccgcagcttctccggatcattgctgatcttgatgttgacggtcgcatcgacattgatattgatgtaatccgctgtcggcacggcattgctcgtcttgacgtcgatcggaatcagccgcagattcagcttatccagacgctcaaaaaatggaatgcggatgctcgcttttccgatgaccaccttggacttcttcttgacaccggaaataatgtacgccatatccggtggtgctttcacgtatccgacgcacagcagtacgatgagcagcacgatcacaatcagtggaatcaatactgtcgctgataaaattgaattcatttgtaaattcccctttcttttgtataaatgttatgccttgtctctccttcatattatagcggattaccattctgttttgtgaaaaaaataacaaatttaaaaaattcttttgttctgtccatcactatgcctgatccatgccccgcgcaccgttctcctgcgcggcggctttttttccaaggtatgccagaatatcttttctcgtcacaataccgataaacacgcgcttatcgtccacgacgggaacgaagttctggttcatcaccttgccgaagagatcctccatcgactcgtcaatcttgactgcctcattgtccctgcggcgctggatggaggtgatcggcatatcctcaagcaacttcaaatccggaaaattgcggtcctttaaaaaccagagcagatcgccctccgtgatcgttccgatatattttccctcgcggctaagcagcgggattgccgtatagccgtgatgctccatcttctccagaacctgacgcatggtatcgtcctcatccacatgcgccacgtcttccttcggggtcagaaaaaataatatattcatgatctgtataatctcctgttgttctttttttctcatctattttaccaaaaattgcagcacagtgccaccgtttcacaaaagattccccaatccttgcaccatgccttgtaatcgctaccgcaaaatggtagtatagaaaggtcgttttaacgttataccattcaacaaaggaggtttcccatgcaggaaaataaaatgggcacaatgcctatcgataaattgatcatatccatgtctctgccaatcatgatctccatgctggtacaggctctctataacatcgtggacagtattttcgtggctcagatcagtgaaaacgcactcactgccgtatccatggctttcccgatccagaatctgatgattgccgtaggtgtaggtactgcggtcggcgtcaatgcgctcctcgcccgctcactcggagagagggatttcgacaaagtcaacaagattgcggaaaacgctgtttttctggtattgctcagctatctgctgttccttatcatcggtctgtttttcgcggaaccttttttccgcagccagacggatattgaagaaattgttttctacggaaagcagtatcttaccgtatgctgctgcctgtcctttggctgctttacccagctgatgttcgagcgtatgctgcaggcaaccggaaaaaccgtctacaccatgattacccagaccaccggagcggtcatcaacatcatcttagatccgatcctgatctttggtctgtttggttttccgaaaatgggcatcaccggtgctgcagccgccaccgtcatcggtcagatgattgctgcggttctcgctgtcgtcatcaaccagaccagaaataaggagattcagctgagtttaaaaggctttcgcccggacggcaccatcatcggtcagatctatgccatcggcgtgccttccattgtcatgcaggcgatcggttcggtcatgaattacggtatgaaccgtattctgatcagtttctcctccacggcaacggcagtgttcggcgtttactttaaattacagagcttcgtgtttatgcctgcgtttggtctgaacaacggtgtcatcccggtcatggcatacaactacggcgccggcagccgcgagcgcgtggtcaagaccttacgccacacggtcacctatgccgtctgcatcatggcggtcggacttctgatcttccagctcttcccaacgcagctgcttaaaatgttcagcgcttccgacaccatgctttctctcggcgtcccggcgctccggattatcagcttaagctttatccttgcaggattcggcatctcctgcagcagcattttccaggcgctcggcaaagcagtctacagtatgtttgtctcgatcgcaagacagctggttgcactgctgccggttgcttattttctggcgcagttcggcaatgtcaacctgatctggtgggcattcccgatcgcagagctgatctccattatcatgacgatcctcttcatgttccggatttttaggacgatcgtaaataagatcggggaaaaagagatggcataaggatagaagaaccacctaaaaataaagctttcatagcgttttgtatattacgcataattactatggtaattaaatgcctaccttccaccagtcaggtacgaaggtaggcatttttatttttacttttgcttgttattccatcattttcttccgtttaatttaaaatatcttcgtaatgtcctgatgccgattcaccacccggtaaatctccacatactcttttccaatcttatacagcacaacataattcccacaaatcacatatttataatccgtccggaagctgacccttttagcaagatcagctcccatatacggaagttgctgtatattctcaattcgagcatatatctcctgaatggtctttactgccatttcttcattgtcttccgcaatatactctttcattttctttaagtcctctgccacaataggattaatccgtaatttcatcataggctataccccgacagatttcttcagttcatccaaactcatccaggcactttcatccttaactgcttcttctgcttcctgtagcttcatcaacagctttttctctgccttctcacgctcatagtcctcaatatccataattacaaacttgcctctgccattttttgtcaggaacactggctctccaacctggcaatttttcaacacttcattataatttcttaagtctgatacaggtaatatattcggcataaaatcaacttcctttcctggatatcgtttctttatttacatatattatacgaaattaagctgtaaaattcaacgtaaaattctacagcttcaaattttttaataatatccattccatttatcaatattctcaccattcacatgtcttatatatgcataaagaaaagtcccataaacaccagtcaaatcgcagatttgatttgtttacaggacttatcaatatctttattatcttagaaattctcgattagcaaacaccctgagctaacatggcatctactaccttctcaaatccggcaatattggcacctgcaacgtagtctgtctgtccgccaacggttgcattgtatctctttgcagcatctgaaatgtttgcgtagatggtctccatgatgcccttgagctttccatccacttcctcgaatgtccaggaaagtctctcggagttctggctcatctccagtgcagaagtagcaacaccaccggcattggcagctttaccgcctacgaataatacgccgtttgcctgaagatatttggtagcttccagtgtggtaggcatgttcgcaccctctgtaacagatgtaacgccgtttgcaaccagcatcttcgcatcctcgatgtcaagctcgttctgtgttgcacacggaagtgccagatctaccttgtactgccatacaccgtgctcaccattctgctttgcatgatattctgcagaaggtcttgctgccgcgtactcggtaagacgcgcacgttttacctcttttacttcttttaataatgcaacatcgattccttccggatcatagatccacccggtagagtcagagcaggtcacaacctttgctcctaactgatgtgctttttcaatcgcatagattgcaacattaccggaaccagaaactgcacaggtcttgcctgcgatgtcgatgccgtgatccttcagcaatgcgttggtcaggtataacagaccgtatccggttgcctgtgtacgtgcgagagaaccgccgtatgtaagtcccttacccgtgagaactccctcgtataatccgcggattctcttgtactggccgaataagaaaccgatctctcttgcacctgttccgatatctccggcaggtacgtcggtatctgcaccgatatatttgtaaagctctgtcatgaagctctggcagaatgccatgatctctctgtcagacttgcccttcgggtcaaaatcggaaccacccttgccgccgccgatcggaagtgttgtaagtgaattcttaaatacctgctcaaatcctaagaatttgatgatgcttaagtttacagaaggatgaagtcttaatcctcccttgtatggtccaatggcattgttgaactgtacacggaaacctctgtttacctgaacctgtccattgtcatctacccacggaacacggaacattacctgacgatccggctctgtaatgcgctctaaaatcgcattctttttatacagttcctcatttgcctcaatcaccggtcttaaagactccagcacctcttcaactgcctgaaggaactctggctcggaagcatttttctcttttacttttgcaagaacttcatctacatatcccatttttttgtctccttactcttagtatattgtgctgtgtatacactgcaatattttcatcagatacattttagtataaaatgttttcatgtgcaatctttttttctttattccgctaaattgttaaagctttgtagcaggatagtgtccccggaacgatttatgtccccgcatcagacatacgcaaaaagcctcgggcaggagttttcccctgcccgaggcttttctatttcttgtgaacttaaatcaagcgataaataataatcgcaatcagcacgccgataatgctggcgatggtaatcttgatcgataatccgaatgtgatcaccagaatgcccagatccagcacaatcgggctggcgaagccgaagctctgcccataattcagccagctaagtcccgaaacgcctgcagcagcatttccgataaaaccgcccagcataattcctgccagaagcattaaaaacagcgcccagttattcttgcccaacgctcctctgctcatatgtctattcctcctccaatccatattcctcttgaaaatagtccacgagctttgccagcgtatagatcaaaatcggcgtctcctgctcattcagctgtcccttgatgttggcgatcattttgcggtgaaactcttcgtgatgcgcatatgccgcttttcctttgtccgtcaggtacacccacaccacgcgtttgtcctgcttgctgcgttctcttacggcataccccttctcagtcaggccatccatcgccttcgtcagcgtaccggtcgtgacatccatcagctttgccaccgccgtcatgcttttcggctcctttaatccgatggcttctataatatgaaaatcgttgtagctgatgtccttaaattcctcattcaccagacatctcgcctcaatctccataatatccttgaatagccttaccagtaattcgttcaatgtctcatccgtggtcatgtatcatactcctgttcatagcagtatctgttcccgaccacaccgcctacaccgtctgccagcggagcactgctgcgccccacgtaagaccggctccaaagcctgccagtactattttactgccttctcctatcataccatgattattgacattatcaagtaaaatcggcacgctcgccgaggaaatatttccatacttctgcagatttgtggggaatttttccatcggctgatgcaggcgtttcgccactgcctcgatgattctaaggttcgcctggtgcagcaggaaaaaatcgatttcatccatcgaaagccctgctgcttccaccgccccggcaattactttcggcaccgtgcgcaccgcaaacttatagacctcctgcccgttcatggacacgtacgagagcgcggtgtcgcccttcacatacggattgtgattcctgcggttgtcacagcgcaataccatcccgcccgcgccgtccgttccaagcacggtgcttaaaatgcccgcctgctcctccgcctcatctgcttccagcactgccgcacctgcgccatccccgaacagcacacaggtactccggtcgctccagtccatgatccgcgacaatgtctccgcaccaatcaccagcgcccgccggcttccgccggcttccagatagtggcgtgcaatatccatcgcgtataaaaaacccgagcaggcggcactgacgtcaaaggcgaccgcccggcatgccccgagtgcgctctgcacctcgcaggcaaggttcgggagcagccggtccggcgtgatcgtcgccgcaatgatgagttccagctcctccgcgtccatatgtgcagatgcaagtgcccgcttcgccgcctccactgccatttctgtcgttgtctctctcacagccagatgtctggtctcaattcccgtccggcttctgatccactcatccgatgtatccatccattgactaagatcatcgttcgtcacacatttttcggggactgcacttccggtgcccacgatctttaccttcatatcgggtctccttccttttaaaacacgcggaatctctgatagcgctccgcagcgagctgatccccggtttttccgttctgttttttcaaaaatgtttttatatgcctcttcatgtaacgcgatatggaaatcagtgccggctgatccgccatgccgtactccggtatgatctcctcaatcacgccgagcgcttttaaatcctgcgcggtaattttcatgacgccactcgcttcttttgcccgtctgccatccttccagagaatcgatgcaaacccttccggcgataaaatgctgtaggtcgcattctcaagcatccagacctcatttcccacagagagtgccagcgcaccgccgcttccgccttccccgatcataatgcaaagaaccggaacctttaagccggacatctcatacaggtttctcgcgatcgcctcgccctgtccgcgctcctccgcctccatgccgcagaaggcgccggaggtgttcacaaatgtaatgaccggacgcttaaatttttccgcctgcttcatcagccggagtgctttccgatatccctccggcgacggcattccataattccggtgcatacattcctttaaatcttttcccttatgcacaccgatcactgtgactggctgtccatccagatacgccacaccgccgacaatcgccggatcgtcccggaactgccggtctccatgtaattccataaattcgtcaaaaatctgctctatgtagtccacagacgccagccggtccacctttctcgctgccttgaccttctcccacgcggacaatgctttcgcctttgtggcgcgctctttcatcagttctgtcgcctcgaggcagtctgcctcccgcaccggatcgaaattggcatagccctctcttttgtgatgcaactttaagatgcggtacagggtaagctttagctctttccgctccacaatccggtcaacaaatccgtgctccagctggaactgcgcccgctgaaagccttccggcagtttttctccgatcgtctgctcaatcacacgcggtcccgcaaagccgatgagtgctcccggctccgccagaataatatccccaagcatggcaaagcttgccgtcacacctccggtggtaggatctgtcagcaccggaacatacaaaagtcccgcttccgaatgccgcttcaatgccgcagatgtttttgccatctgcatcagggaaacgatcccctcctgcattctggcgccaccggagcagcaaaacaggatgaccggcagaccttcctctgtcgcgcgttccacagcgcaggcaattttctcccccatcacatgccccatgctgctcatcagaaatctggcatcgcagatgccaagcaccgtgtcctcgccgtatattttgcagcgtcctatggtgaccgcctcatgcagtccggtcttttcctttgccgcttttactttgtcctcatatcccgggaactccagcggattcgcctccgccagatcctcaaaccacggggtaaacgttccggcatccgccaccatgcggatgcggtttctggtgcgcaccctgaaataactgccacattcatagcagacatacagatttttttccgcttcctttttattgatctccctgccgcaggccggacacacaatcgtctcctgcagcgcctgtgctgcctccaccggtgctttttctgccggttcttttttccgcttctgaaacaaagccgccatttttcctctactcctccttgctgccgattgcaaacgtaagctccgccgtgcagacaacctccccgcgcacagacgccgtcgcactgccgatgccgatcggtcctttctgccggatgatctccgtcgtcagggtcaacacatctcccggcaccacttttttcttaaatctggcacggttgatctccgcaaaatatgccgtctttccacggttttcctccatgcttaagattgccaccgcaccggtctgcgccagcgcctcgacaatcaatacccccggcatcaccggttcccccgaaaaatgtcctccgaaataaggttcgttgtagctgacgcattttcgcgccaccgcgcgttttccgggctccagtttctccaccgcatcgatcagcagaaacggctgtctgtgcggaagaatctccatgatctgtccgatgtccaattccatcacacctcgcctccatatctcttaagcaaaagactcgcattgtgcccgccgaatccgagggaattgctgagtgcatacggcacctccatcgccactgcctccctgcaatagtcaagatccagttcctcatccggtgtctgatagccgacggtcgcgtgcacataattttcctgcatttccttgacgcaggttacaaactccacggcgcccgcagccccgagcagatgtccgatcatcgattttgtggaattgattttaagcttcgtggcatgttccccaaacgcaagcctgattgcgcgcgtctcaaacagatcattcagatgtgtcgccgttccatgtgcattgatgtatggaatctcgtccggttttacccccgcatccttcatggcgttttccatcgcacgcgctgcgcccgcaccgtcctccgccggagatgtaatatggtaggcatctgaggaacatccgtagccggctacctctgcataaatcttcgcgccgcgccgctttgcatgctctaactcctccagcacaacgattcctgcgccctctcccatgacaaatccgctccgctccttatcaaacggcagggagcatcgcttcggatcggtctcggacgacagtgccgtcagcgccgtaaatcctgcaattccgatcggacagatgctgccctccgtacctcctgcgatcatgacatccgcttccccgtactggatgctccggaacgcctcgccgatcgtattggtaccagtcgcacaagccgtcacatcgttgatgctttttcccttgaagccaaactggatcgacacgttgcctgctgccatgttggaaatcatcatcggcaccagaagcggattgacacgtcccggtcccttttccagaagcttcttatattcgcgttcgatcgcctgcagacttccgactccgcttccgatcgctgttcccaccagatacggatcttccttctccatcacaagaccggcatccgcaacggcctctttcgttgccgccaccgcatactggcagaacagttccatgcgttttgccgccttgggatccatataatttttcccgtcaaaattctttacttccgctgccagatggcatttatatccagatgcgtcaaaatgcgtgatttccccaaatcctgtcttttcttcccgcaccgcattccaaaattcttctacagagttcccgatcggcgttatcgcgcccattccggttactacaacccgtcttctcatacctacctcactttctttcagttactactcccttacatacacatgccgccgtccaccgaaatcacctgaccggtgatatacgcggctttgtccgatgccagaaatgtcacaagctctgccacatcctttgtatttccgcatcgccccagtggaatctgtttttgaacggcttcctttgcgctctctgtcatggcatccgtcatatcggtctcaataaacccgggtgccactgcgttgcaggtgatcccgcgcgacgccagctcccgcgccacacttttcgtcagcccgatcacgcccgccttgcttgcactgtaatttgcctgcccggcattccccatcacaccggatacggacgatatatttacaattcttccatagcgctgttttaaaaaatagcgggacgcgtgccgtatcgtatgaaatgttcccttcagatttgtcgaaagaaccgcttcaaaatccgcctcgctcatcttcatcaacagaccgtcccttgtgattccggcgttgttgactaaaatatcgagatgcccatacgtctctataatcgttttgatcatgttttcgcaggcttcaaaatccgccacatcacactgcatggcggcgccgccgattttctccgccagttcctgtgccgcctgtcccgatccgcggtaattcacgacaacaaacgcaccttcccttgcaagtgtttctgcgatcgttgcgccgatccctcttcccgctccggtcacaagcgctacctttccttccagcatctgactctctcctctactttgacatatattccttgaagtcatccatggtttccacattgtatacctgcacggtatctgccgggactttggcctgctttaagatctttttcataaatccgctcagtgtatgacccggaccgatctccacaaacgtatccacaccatccgcaagcagacgctccacggactgctgccagcgtaccggtgcacacacctgctgtttcaacagcggcttcacagcctccgcctcccggacatagtccgccgtcacattcgccagatacggcagctttatctcccggagtgttaccgccgcaagcgcctctcccagcttttctcccgcctcttttagcatgggcgagtgaaacggtccgctgaccttaagcggcaccacacgcttcgcaccgctctctttgcactgttcgcctgccgcggcaactgccgcttcctccccggtgatcacgatctgtcccgggcagttgtaattcgcaatggaaaccattcccgcctcctgcttacagatttcctctattttttccgcatccagtcccaacaccgccgccatcgcgccgccggccggcaccgcctcctgcatgtagataccgcgctttctcacaagcgcaaacgcatccctctgctccatcacgccgcttgccagcagtgccccgtactctccgagacttaatcctgccgccacatccggtgttcttccttctgcaagcaacgcctgaaggatcgccgcctccacggtcagcatgccaatctgtgtgtattcggtgatatttattttctcattttcttcaaagcagagcgccgcaatatccagaccggacgcctcggatgccgccgcaaacacgtccctgctcacgggaatctgctcgtaaaaatctctgcccataccgatgtactgtgctccctgtcccgggaacaaaaatgctgtctttcccatgtcattctcccttatccgatgtgcgtcccaagaagacgctcttcttttcccaaaaatctccgtcacctaaaagccccgcggtctgcgccatcagttcctctatcatctcctgacaggtctgttcttttttcacaagtcccgcgcactgtcctgccatcaggctgccgtgcaccacatccccgtccatcactgcctttcggagggagccaagcgtcagctgctccagttcctcaaatccggcgccctctttttcgagttttaaatattcgcggctcatcgcattgcgcagaacccggattggatgtccggtgctcatgcccgtaacctcggaatcaatgtcgcgcgcctttacgatccgttccttgtaattttcatgtacgatagactccttcgccacgacaaaccgggttcccatctgtaccccctctgcgccaagcataaaggaggctgcaatccctcttccgtccgcgataccgcccgctgcaatgaccggaaccgacacggcgtccgccacctgcggcaccagcgtcatcgtcgtctgcgcaccgatatgtccgccggactccattccctctgcaatcacagcgtccgcgccagcacgctccatcatcttcgccatggcaacgctcgccacgaccgggatgaccaccacgcccgcctgcttccatgcctccatgaactttgccggacttcccgcaccggttgtgacaaccggcactttctcttctatgacaatcttcgccacttccggcgcgtttggattgagcagcatgacgttcacgccaaacggctggtttgtccgcgcctttacctcacggatctgttctcttaccacttccggcggcgcgcttgccgccccgatgattccgagtccacccgcgttcgacaccgctgccgccaggtgatattccgccacccatgccataccaccctgaatgaccggatattttgttccaagcaatctgcttacccttgtttccatacttctcctcttttcttcctgccggtctgttttcttacccttaaacaccggtatgtcccggctgctgtcttcgcctatactgtaaccccgcggttcttcaaatatgtgatcacatctccgaccgtcacgatcgattccagatcctccgacggaatctccacgccgaattcctcctccagcgccatgacaagttcaaacagatccagcgaatccgcacccagatcttcctttaactttgtgttctctttaatctcagactcctgtacgtttaactgctccgcaatgatcggtctcatcttctctaacatgtttcttctccttttccctgttccttttaattatttgcttttcaaatattttgataatcaaattatttgcttttcaaagtatatgtctgtcctgtttgattgtcaaggtattttttggaaacgtttctctaaaattgcattaatgcgttgaaatatcatgcaaaattgcttacaatattcgtaataagatgtgggaggagttcgctgatgaaacaatattttggaatgagccagacaggaaacttaaaagaagctgcacagggcgttcacgctccgggacttcttatcctgatgtccaacgcagaccagtttgaggcacacgttacagaactggagtcccttttcccgggagtcccgagcattggctgtatcggcatgagttacagtaccagggtcgtcgaaaagggagtcggtctggttgctttttatgacaatgtcaccgctgttgccaacgttttggagcaggcatccaccatgccggtcaaatatatcgaacgcatggaacaggatttaaaaaacgtccacgcaagttctaaagataccgtctgtattgacctgtgtaccggaaatgacgcctgtgtgctgaccacgatccacagcattctcggcaaggctggaattccgcttgtcggcggcaccggggacggtggaaaagtctctgtcaacggaacggtctatgaagacgccgatgtctacgcttttgtgaaaaacaacggaggaaaagttgctgtctacaaggagaatctctacaaaccgatgccaggctaccgcttcatcgcttccaataccgaccgcagcagatactatgtcggcgagttaaacggcagatcttccaagcaggcttatatggatgccttacatatcagcgagagcaatatcatcaaccagaccttccacaatccgctcggcaaaatgaacggacaggacatctgtattatttccttaaaggaagtatccgggaacggtctctgctgttacagacaggtcaatgattccgatgtgctcgttcttctggaagaacaggattacaacgagattctggatgagacgctgcagcgcatccgccgcgatttcaaccatatttccggcgttttctccatcaactgtgttttccgttaccttctgttctcacaggaacaccatatggaagattatctgaaaaccatgtccacactcggtgatcacgccggtctgatcggattcggagaacattataatcagcagttcgtcaaccagaccatgacctgtgtcgtatttgaataatctgtgatagaaagaggaggatttccatgttttcattaaaagcaccaaagaatgcagcggctgcaccagccacgtccaccagccgcttagatcttcatcccgttgcgcatattgcggactgcctgttagattaccagaagcagctctccaccagcgaagtgcactctttagatgaactgcagtccatcacacaggcattccaactcgttctggacgaaaatgccgcactccgcgaaaagctggattcctttcatgagctgttcggcgatgtggacagggcttccggtgaatttgcttccgtcaaatctgacattgccagctctgtcggtcttgcacagcagcgtgttgacggattgaaagacagctccaaagaagtgcaggagcgctttttagaaatgcagaacaccttttccgatttccaggtttccgttcagaagatcaaggactgcatggcacagatcatctcgattgccaaccagacaaacatgcttgccctgaatgcttcgattgaggctgcccgcgccggagagcagggaaaaggctttgcggtcgttgccgaggaggtcaaaaatcttgcgagtgagatcaagagtcttgtcagcacggtagatatcagcatcggcgacgtcgagcagggcaccgccaacctgaataccagtatttccacctcgcaggacgccttgaaccagagtatggaaaatgttgattccacgtatgaagtgtttgatcagatcacaaccgctgccggcggtgcagacaccgtacaccagcagattacaaccgccatgtccgccgcagagcagaagctggatgaagtcagccagtctttcagccttgaggaacggcagtttgacgctgttatggagcatatcaatcacgccaatgatctcggaaccaccaagagttccctcttcgaggacatgaccaatctgctctcacagattgcgccgctcacagaagaactggagaagaacacaatcgtacttgacaattccaaatagaatcgttatagtaaagttcgttataataatatcgaatatgaaaacgctaggggtgcagattctgctgagagatgatcgttcatcgacccttattacttgaaccggataataccggcgtaaggaagctttttgcaataacgcagacaaatcctcctggctacatattcaccaaggaggatttttttatgaataacttttttgctacaccggaaggcggctggggtgacggttccgtccatctgactaccgtcggtattgcaatcgtcatcgcagtcatcgcccttcttctgattgttgccgctatcgtgcgccacaagaacgccacgcacaagtccgcactgaccacaaagcagctcgtctactctgctgttgcgatcgcgctggccgttgtgtgttcgatgatcaagctgttcgacatgccaatgggtggttccgtcactctgctgtccatgcttttcatcgttctgatcgcttactggtatggtccgtatgtcggcattatgaccgcagtggcttacggtctggtacagttcgtgctggagccgattttctacacaatcccgcagatgctcttggactacccgctggcattcggtgctctgggtcttgccggtttcttcaataagaaaaagtggggacttcagatcggctatatcgccggcgtcatcggacgttttgtatttgcaacgatctccggcgttgtatttttcgcagcatacgcaccggaaggcatgagcccgctggcatattctgccggctatcaggcatcctaccttgttccggaggcaatcatcaccttgattatcatctgcattccaccagtatcacatgcacttgcggaagtccgcaaacgcgccgtggaagcgtaggatacaggaagcagactgccgccagcacgctcctggtaaataaaacgggctacgttttattataagaattttgagaatatgaagttccagaatgcaaccagaggcggcaattctttgaagcaaaatgcggggatttcttccgtgccgcgtcggacatcgaattctgtgtctttccacgtttggacagtccccgtggtgtgtccggcaaagccacagacaatgagcggactttctggtgcccctagtggcaccgcttcacagacaatataaaaccgcgcgaaccgaaactcgttatcatctgctattgaaaacaaggcagatgataactcagacatcggcttcgcgcggttatgttttgttcagtggtgccacgaagggggcacacacaaaagtccttaaattgtctgcggtttgcggacacgccacgtggaatgttccaaacttggaaaaacacagattatcaagaatgttcgacgcggcatggttagaaataccggattttgcgcttagaattgccgcctccggttgcatctggaacgttacatatctctctgcttcccataataaaatgtatcccgtttatagtgcagtgcacgcgggcgacagcccattttaatctaagagcatctctacgcagccatacattccggcatcgtttccgagtcccgcaagtacaaactttgtgttggcgcatgcgtggaatgaagtggcaacaaagtgcttcttcactgcatccgtgagaataccaccggctttggagacgcctccaccgattacgatgacctccggattcacaacacatgcgatattggaaagtgttgctcctaaaatgccacatacctcatcgacaacttcaagcgccactttatcacccgctttggcttcgtcaaatacgtcctttgcggtcagatctgcatggtttctaagcgcggtatcttcggacgtcttctcgagggtacgcttcgccacacgcacaactccggttgcagacgcatactgctccagacagccgtactgtccgcagttgcactgctccttctcgtgtgcattcactgtaatatgaccaatctcgccaccggctccgtcaaatccggctacaacttttccgtcgacaataatgccgccgccgactccggttcccagcgttaccatgatgacatctctgcagccttttgccgcaccctgccacatctcgccgagtgccgccacgtttgcatcatttcctgccttcaccttcagtccggtcagatctcccagttctttttctacatttacaacaccccagccgacgttcacacagcggtgtaccacaccgtcattttttaccggtcccggcacgccgacgccgataccctgcacatcgtccctggagattcccttttctgtcagctttccctcaatcgcctgcgccacatccgacagaatcgatgctccgccgttttccttgttcgtcttgatctcccatttgtcaatgagctttccatccgtctcaaaaaatccgatcttgcaggtggttccccctacgtcaactccaaatgcatattttttcatgcttccattctcctgttccctatttgtatccttgcatcgttttctggccgttatgtactctgccgatgcctttacccatgcttatgataacgtttccagtcttatctgtcaatgttaaggtgtattctcttaaggtgccccgggcgctgtctcctgcggcgtatccgaagcattctccccggatggctgcgctgtattttcctgcgatacgtcggatgcattttcctgtgacgttcctgttgtattctgctgcggagcgtctgacggctgttcctgtgtggcatccggcgtatccgatatcccctgcccgttttcctgtgaggatgccggaacatccgtcgtacttccctgcggcgtgtccgttgtatccgtcacattctcctgcagcatgtctccgttctccgccggtgtctcctcctgtgcgcttccctcatccgttgctgcatcctctgcgtctgtccccccggaagaagcatccggaatctgcgtatagggcagaaaatccagccattccagtccttcatgtgcctgctccataaaggtctgccagatttttcctgggtaggtattgcccatcaggctgtccatctcttttggcatatcatatccaacccacacgctggtcgtgtaatatctcgtatagccgaccagccagccgtctttgtggtcgttggtggttcccgtctttccggcgcacggcatatccgacagtccaagtccgcgccccgtaccgttggtaaaaactccctttagtacatccgtcatcatccgcgccgcattctgccggtagacttcctgctcctcctgcgctgcaagataaacatccgccccgtcatcgccggtgatccgcataatacaggtcggctcgcggtacaccccgtcattggcgagcgccgcatatccggccgccatctccagaggcgacacaccgttggtaaagccgcccagcgccgtcgccggtacataatccgccgcatccagcctggaaaaatgcatgttctcaagataggacagaccggcctgcggtgtcagttcttcatagagcttccacgcaatggtattgattgacttttcgactgcggtgcgcaccgtcacatttccaaggtaggtaccgttcgcatttttcggtccgtctttcaccggttcatccacaacaatgctctccggcgtataattccgctcgaacgacggcgtgtataccgtgagcggcttaatcgcacttcccggctgacggtagctctggtaggcgcggtttaacgtgtatccgtcaaaatcctgctccctgccgcccaccatcgcgcgcacgtagccgttatcgttgtcaatgcagactgccgccccctgcagatcataaacaccctcgtcatttttctccgtaaaaccggataaggtatcgtcaactgccgcctgcagttcctcctgaagctgcaggtcaaaggacgtataaatctgatagccctccgtgtacagctgcttctggcactcgctgtaggattcgctgtaagcctgctcgtatgcctccctctcgtcctccgttgcaaactgatatcggaacacaaacccttcctgctccatcagagcacgggtcgcacagtaataggcgtacgtttccacgtaattatttttttccatcgcctccggccgctttaaggtaatgttctccgctaccgccgccgcatatgccatctgtgtaatcttgccgtcatcccgcattttgcccagaatccggtcgcgccgctcgactgcatgatccatatgggtaaccggatcatacacggtaggattattgggaaccgcacataaaaatgcgatctgcgagagatccagcttcccgacctcactgtcaaaatagcctctgcctgccgccccgattccataatagccgttgccatagtaaatattattcagatagaattccaagatctgatccttggtatattttttctccagattctgtgcgataaaaatctcttccaccttgcgctgccaggttttttcctgcgtcagaaatacatttctggcaagctgcattgtaatcgtgcttcccccctgcgtgatcttccggttttcaagcagtgattttgccgcgcgcacaagcgctctgaaatccacgcctctgtgctggtaaaaacgctgatcctccatacagaccaccgcatcgatcacggactgcggtatctcgtcgcgctttagataataggacgctccctggtcattgagcctggatatcacactgccgtcagccgcatacacaacgcttgtgcggtacctccggaacgtctcctccgtcgaattccgtaccagactgtccgcttccttgcggatgctgctcacctctgaggcatatccgccaaggacatagtagcccagcccgccgagcaccagcagggaaaggacaaactgtactttgacaaatatccagaatccccgatattttttcttctttttctttgcagccaccgtattcctccctgcccttttctcgcgtgtcacgctgtgccgtcctgcccctctttgcctacaacgtaaacggtactataactctatcatgtgatatgcgattcccagttcctccaacagcttctgctcccgtctctggcaggtaaacaggatcgtctgcgtcccgtccgccgccagcagccgcagcgtctgccgcagacggtcatcgtcatacattgcaaaggtttcatccagaagcagcggcagcggttcttcctgtgtcacaatgcttccgactgccatgcggaacgcaaaatagaactgttccagcgttcctctgctgagcgcctccggcaaaacctctcttccttccgtctgcacgcggagctttcccgtttcatccacttccgccagatcgtattttccctctgtaatcgcagagacatatctggataccacactgttgatctcatctctccgctcgtccccgtattcccttgacaggcggatgatctcattttttgccatctcgacggcatcaagttccagctggagttctctctcccgtgcgcccgctccgctgcatacttccagctgttctgccagattgcatcgtctcgtttccttctccgcgagtgtttcctccaaccctgcaagcaggcgtctgctctgcttttccgactccgcaagccggatgcgcaccgcgttctccgctgccgcgctctctggcgcctccgccgtctccttcccattttctcctgcacgcgcctgccccgcgctcctatggcgcagtatgcctgccactccgatgccgagcagaatggcaaggacgccttccgccgccacaaacagctccggcgcataacccacgcggtgatgccaccatgcatttcctgccagtcccactgctgccgccagtcccagaaaaaggcttctcacaggaaaaccgtttccgtcagttctcctttccctgtctggcgcagtccccgcattttccgcagttcgggcatcttccggtcgctgtccgtccctcacctgcgggtgcatcctggcatacgcccgcatatccgctgccgcctcctcgatctgcccacgaagcctgccgcagtcctcctcgagcatgcgccgctccacagtaagctgctgcagctgttgttcccgcttctcctgttcacttttgatctgcgactgcaggcttctctttttctgctccagtttttccactgcacgcgtcacgcggattcccgcattgcccccgtccgacatatcggaaagatactctgccagaagtccggtcaactctgctcccgtcaccgcccggcactgcggaatatcacaggtgttctcatacgcctcccgggtgactccgcctaaaagcattccaagatctccgtacgcgacggacagttcctccccgtccgccagattgcagaggcgtgctctcggttctttatggtaaaaattgcgttccagataaaacggtctgcctccgacgctaaactgcagcgcaccgctgtaatacgacggtgcatgccacggctcatagcgcagatagccctccgtcccctttgcccgtccccggcctttttccagcccgaacagcatcgcggtcagaaacgcgtgcagcgtcgtcttaccggcttcgttttttccatatacaatgttgatccccggggcaaaatccacggttctatctgccagctttccaaagcgaaaaattgcggctctgtcaatctgcatgtctgtcccatcctttgctctttgtcatacttcaggcattccgtcagcagtcatagccgagcagcgcattcacaccgtactccagtgcctttgcggtgcagacgcccggttctttttttcgcatactgcgtatgtattccccaagtatcgaatccgcgtgctcctccagcagcttcccgtaatcgtaatccggcaccgtctggtctgtaatatccacaatccggtcgagcttcccgatctcctgcacatcaaaggaatactccggatcttttttccctttgatatacagacggaaatactgatactccggtctctgctccaacagctcctttgcccagtcccacagcatacggtctgtcgtgttccggtctgcctgatacatctcatgacaatattcgcaatggcgcagcgggtaaaaatatacatctgcccccgctgcccctaacgttcccatccagtatccatgcggcccggtgtcgttgcagtctgtcggctccaggcttcccgccattaccgccttgtgcggcatgagccagccgctcctgtgaatgtgtcccgccgcaatataatcaaatccgttctgtaatatccgctccgccgaaaacggaatatggcgctcatcgccgccatgcgccagcaggatgttgcatctgctgcggtttacagggcgcagttcatcatacaatctgtcgtggatctccctgtgccagtagctcagtccatatatggtcgtgttgtattccggaaaatcgactgcttccgcttcctctttcttaaatactgtcacgttgtccggccacaaatccgcgaggtaatacgacttttccctgagataatcatgattgccggcaatcaaaaggacctgtgtgtccggaatctccccaaaaaggcggctgacctcccgcacctcctttttgagcggctgtgcgtggaaaagatcccccgtcacaaacagaaactccggtttttctctttttgccaccccgatcacatctgcaaaagaatcccagatctgccgcgcccgcagctcactccacggctttccctgatccggctttaccccgagatgtacatctgcgatatgtataaatttcaaactgcatcttctccgttctgcgttaattacctctattgtacactgtcgcggcatgtttcacaagtttatccggcatgtaccctctcccaaaaataactgccggatttctgaagcatagaacggcatatgttttatatggagagagagagaaaacgataagttccagatgcagccggcagcggcattctttggagtaaaatccgagtatttcttccgtgccgcgtcggacatcgaattctgtgtctttccacgtttggacagttcacggggggtgtccgacaaaccgcagacaatgagcggactttctggtgcccctagtggcaccgcttcacagacaatataaaaccgcgcgaaccgaactcgctgtcatctgctattgaagttatggcagatgacaactcagacagcggcttcgcgcggttatgttttgttcagtggtgccacgaaggggcacacacaaaagtcctaaaattgtctgcggattgcggacaccccccgtggaatgttccaaacttggaaaaacacagatcatcgaggatgttcgacgcggcatggttagaaataccggattttgcgatcagaatgccgctgccggctgtattctggaacttcgtattttctgacatctccatcataaaacatcttccattccggcttcagaaatccggcagttatttttcgtctgaggagtccagcagaagtttcatgctgccgtacatgccggcatcatttcccagacgtgccagttcaaacggaatgtctgcacctgccggcagtacatcgggtctgtaatacttctgtacgatacgcaggatgatctctcccgccccggcgattcctccaccgatcacaaagacctctggatctatcacttccgccacggctgcgagcgcgcttcccagcgcttttcccagaacctccacagcatccagtgccagacggtcgcctctctttgccgcatccagaatctgttttgccgacagttccggcgtgtcgacgagtatcgtgtagggatcctttttctccaataattgtctcgttatgcggatcagtccctttgcggaagcgtactgctccacacacccgtattttccgcaggcacaccgctcaatctccttgtggaacacggtcatatgcccgatctcgcccgcgattccatgggcgcctgcgagcacttttccattcaggatgaccgctccgcccacgcctgttccaagcgttaccatcaccatatcgcggtaccccctgccgccgccctgccacagttctccgagagccgccgcatttgcgtcgttgcagacacagacctttttctgcaggcgcatctttaactgctcctgcaccggacatgcctcccatcccagattcacagcgcctctgacaactccatcccgcccggcaattcccggtgtgtcaatgccgacgcctatgatctgctcatccgcaagcccccgctctctctgtctgctttccagtgaggctgccacatgttctataatatgttctccctgttcactggtatccgttggaatctcccatttttccatcagtttcccgctgtctgtaaacagaccaagtttgcagctcgtgcccccgacatctacgccaaaaccatacttctccatgttttccccctgcccgcagcatctgatcgtcttctcccccgtcagacgccgccttttttcttttttctttgtcctcattataggacagatccatactgtggaacaattacacatcttggctttattttgccatatttgttcttctctgtatctttccaatctccgtgcaccgtaatacagtctcatctccactcacacgcccgactgctgtcacatctctctccgggatactggtattcttatccccgtcttgcggttacctgatgtggcttgtgatgattgttccaaccgtacgcaaaataaattttctcagatctgcttcagacatgttgcccacatctattctgtcgccgctcattttttcaaattgaacctccccactgatcgaaatcacaaggtttatatcatgctcaccattatcaatcaaaaactcatagcccccttcttcccctgctgctttacctgtcagttccagcatggaatgctcaccctccaaatcctctgcgagcaattccagattctgcattctgtattctcctcccttgaacagcaggcggaatgccgtatcagaattttccgcctccgcaacaaccgctgccagtttattctgatacacgtagacttttacattgatatcccccatactgcatgctctatctctgagctgcgaaaagtcatcccccagcttcagcttcaatgcatctgctgctccaccgtaatacgcatcgtatacctccttcactccatccattacctgcagaagttcatcctctgtgacggtaaattcatacccgttacattttctgacgctgccgtccactatgagttcttctttttctgctttttttatatcgagcgtcttgtactcatcgtatattacggacaggatctcctgcgccgctctgttctgttcttctttcgaggtaagttcacgaagtgccgcatcgatcgatgcaaccccatccgctcccagaagatccactatgtagccgtctttctcttctttgtaattgtataccagcagatcatctgtaagcatcgggatgcttgcgcagagctgctcatcatccaggtttgccagaaaatccagattctccctaccgaaaagtgaaatcgttccccctgcctgcagctgtgtatctttgtatttaaacgttccatcaaagtcttttcccctgacagccccttttacaccaatcgtatattttccggatgctataatatctgcaacattcctattctcaacaaccgtgggcagatcttttatggtatttcttgccgcaagcagaatcctgttacttctgctcaaaaatgctccgctgcaaattccaatgatcaaaataattaccgccacagccactgcgccgatcgtccatataatttttttcggcaccttcctgccagacgttccatttgttttggtcatttcccccatcgtcacgtcaggtttttcgttcatatgtttccacctttctaactttccataaaactcatttgcttttgagattatcatgtctcccggcttctttcaaggcgaatatcgaaaaaaagcacctgaaacacactgttttcagatgccctttctctatctttcttctattgttccatctgtctgcccagaaagcctgccgccgccgcgacaagtttgctctctgtctctcccattttctcccgttcttcccgggagcagaggatcactgcgccaatcgcatccccctcgcagataatcgtgctgattgcctgctgtctgtactcgccggcatcgtccgccgtcagttttacaaatgtcttttcgtcgtcagaagctaccagacttttccgctcaccgatgatctcctccaactgtccgctgatgggcttgccctcaaaatctctcttgccactgccggacgccgcgaccacatgatccccgtccgtgatcagcaccagatatcccgtcgtgtgcgccagactctcggcatattccccggcaaactggctcaattctccgatgggcgaatatttttttaaaataatctctccctcacggtcggtaaatatctcaagcggatctccctcacgtatgcggagcgttctgcggatttctttgggcaccacaattctgcccagatcatctattctacgcacgattcccgttgctttcataaattttcctccaatgttttattttcgcaagagcgctttgtctgtttccatctctgtggataaagcctctcttatttgctatatattagcttgggagttagtatatgggaaaactgaaaatttattcgggaaactgtccgttacccattgcattatttcaaacatgatactgctgtttttatcaatttatctttcattcctgtcgatctgcagatttttataatattgcattggagtaacaccatactctttcttaaatgccctgaaaaaatgattgtatccgccaaatcctccaagttcataaacctcgcggatactttttccctgctctatatagtgtctgcacagatccagtctgctctttacaatatatgaatgtggcgtttcgcctgtcatcttcttgaattctctcacaatatgatagcggcttacataaaactcgttttccaggcgctccaatgatatatcttctgtcaggtgttctcttatatatatgaaaatatcatccattacaacatgctttttcttatttaattttagctgtacgtcctccttgacagacgaccgcaacgcaagtaccagaagcattgtcagcaggcttttctcatacaatgtgtgtgcaaatttaggagattccttaagcattgaatacagctttttggaaatattctttataagcatggcagattcactctcagaatgaactgtcttaacctgaaagggaacgatatcaaatgcctcgtcaagtcttgtattttcatctgataagctctgcaataactctgttcccacatagagcacatatagttctaacggatatttgttttttcgatattcaatcttcactttattgccaggcttaataaatattaagtcctccatggtacagaccgccttttcattttcctgacgtaaatatcccataccacctgtcacaaaaataattgtatggtttttcttctgtccaaaactgcgctgtccgctatcttctatttttatatattccatctcataactctgttttttcatatgttaattttgcacattccagcatccatatttttgttcattttgtcaatttatacaatacatcaattttccatagtttgcaagcaatttttgtatatgtttatctctctaatccccatataatgaacatgtagctaccaaaacaacacaaaaacgagaggtattttattatgaaagaaacaagaccattttccatgaaggacaaaatcggttacactcttggcgatttgggatgttgctgtacagaacagttccgagccatgtatcttgctattttttataccctggtgctgaaggtcaacccggtgcacgtaggaatccttatgcttatcacaaagctttgggatgccataaacgatccattaatcggtgcacttgttgacagtcaccagaacaagggcaagggtaaattcattccgtggattaaattctttgctttcccaaccgcagtcctttgtatcttaggcttcgtcaacgtaagcaattttgcttatggcgcccgtattgcttacatgttcatcacatatgttgtatatgaaattatgtacacatgtgtaagcgtaccatttggaagtctttcaagtgttatgacagatgatgtaaaccaacggaccgacctttcacgcttcagaagtcttggcggcacaatctttatgaccgtcatcgttattgccggtccattattcttatacaaagacaaccagcctgtaccaagccacttccttattatggcagccatctgtgctgttgttggtttgatctgccttatgtttacatcacactggtgcaaggagcgtattatcaccgagccagttgccaaagaaaaagagaagcttaactatttagacgtgctgaaagccatctccaaaaacaaagctttacttggtgttatgttatccagctttatcggtatcgttggtgccggtatggtaaacggcttaaatacctacttattccgtgactatttcggaaatgtcgccattatggcagtttcaggcatgttaagcgttatctggtcgcttatcgcattcattgggacaaaatttgttgcaaagaaatttggaaagaaagaatggattatgtatagtgcaactttctcagttgttgtttatgctattttattctttttccctcttgagaacccaatgctctttattattatcaacggaatctgttatcttggtgtcagcggtttccaggtattagtctgggcccttgtaaatgacgcaattgactatcaggaacttcagaccggaaaacgtaacgaaggtatcgtgtactctgcatatacatttttccgtaagcttgctaatgccgtatccggaagtatgagcagctttgctcttgcaatcgcaggctttaacgtaaatgaggccgttcagagcgaagcattctccggacgtctctggaaaacatataccggattatatgtagccgggtacttattagctgtacttgtattaaagtttgtataccctcttacaaaagagaaaacagctgaaatgttacagaatttatcagacaaacgaaatgctgcaaacgcagaataacttcagaaaccgaggtatcttgcattgacaaaacaagttgaaataacaaaccgctcaggtcatgtcttacgcggaattgtaaatattccggatgaaggctcgcgcttccccgccatcattaacgtacacggatttaccggaaataaaagcggatacaaaaatatctatacccacacagccagatttctggctgaaaacggatttgccagcgtccgctttgatttatacggaaatggcgaaagcgacggtgagttcgaggacatgacattcaccggtatcttacatgatatcgaagatattataaactggacaaaacagcaggattttgccaatcctgataaaattattttatcaggccagagcatgggcggctatgcagctgccactgctgcgcctatcgttaatccacatgctctcatactcatgtgcccgggagccggcatgtggtttggatgtaaagaccgcgccgaggcaatggaagcacagggaatcacaaaagcagatatagaagggctttgcttccctacttcttttaaccatgatttatatcagtatgaaccgttttcatccgcagcgggatatacaggtgctgttcttcttatcagaggaacggcagacgatctggtagatgatgctacctgtcatcgatatgaagcactctataatggcaaatgcagttacaaaacaattgaaggcgcaaatcacaactttgcaagcggttctgcaagagctgaattagacaggctcatattagagtttttaacaccattgaaataagataatcactttgaaaggatgtgtgcacaatgaaattattagagcccattaaagttggaaacattgaatttaaaaaccgtattatgtttcccccacttacaacaggatacgaagaaaaagatggatctatcggcgaacagagttttcgtttctatgagcgccttgcaaaaggtggtgttggatacattgtcattggagacgttgctcctctttcaacattctctcctacaccaaaactttactctcctcaacaggcagaaggcttccagcggcttgccgatgcatgtcataaatacggtgcaaagcttggaatccagctgttccatccagactataacgtcgcagctttaaacgaaatgtttcaccagggaaaaatgcaggaggcaagagccaaacttcaccatgatatgcagcactttgtaaatgaagtaactgcggaagaactggatgaaattattaagcacatggaaaattgtgctgttttagcccacaaagcaggcgttgactgtatcgaagtacatggagaccgccttgtcggatcgctctgctcccctattttaaatcacagaacagatgaatatggcggagaccttgcaaaccgtacacgtttcgccttaactcttgtacggcgtttaaaagcaattgtcccagatatggttatcgactacaagcttccaatcgtaactcctcttggagataacggctttcggggaaaaggtggtcttccacttgatgaggcctgcatttttgcaaaagaattagaagctgccggtgttgacacattgcatgtcgcgcaggctaaccacaccggaaatatgggggataccattcctgctatggggacacagccatatggttttatggtttcatactctaaaaaaatcaaggaactcgtttccattcccgtatccgtggttggtcgtattgtaacaccggaagctgctgaagccgttattacaaatggctctgctgacatcgttgcactcgggcgttcactgcttaccgatcctgattttgcaaacaagtgtgccgatggacactgctgcgatgtcagaacatgtatgatgtgtaataaaggatgtacagacaatatccaaaaccgtgcattcctaagctgtgtattaaatgccgagaatggttatgagacaagccgtcagattactcctgcagtcacagcaaagcgaattgcaattatcggtgcaggaattgcaggacttgaagcagcacgtgtcgccgctctgagaggccatcaggtaactatatttgaaaagtcactccagatcggtggtcagcttcttattgccagcgttccaccccgaaaagaagaaatgatgagaagcattaactactatcttaacgtgcttcccgaattatcagtgacattccgtcttggtcaggaatttaccggaaaagactatgattcgtttgatgaagtaattgttgcaacaggtgcaacgaatgcaatcattcccgttccgggcaaagatcttccaaccgttacaagtgcatgggatattcttgctaaaaaagaaattgtattcggcaacgtatctgtcatcggcggtggtcttgtaggtgttgaaactgcggaataccttgctgcccgcggatgtaacgttacaattattgaaatgatggatcagattgcaaaggaagaaagcagcacgattctcccaactttgatgagtgaattagagcattccaatgtccagatccttacctctgcaaaactatcagagatcaatgaccatgcagttattgttgagaaaacagaaaatgaaaaaacctcggtcttagagatcagatcggatttcgttgtaatggctgttggcgcaagaaagaatcttccggatctttcggcttgtccgctcccgcttcattatattggcgattgtgccggagagcgtccgagcaatatcgatcatgccattaaatcagcatatgatgccgcatgtgaaatataaaaggttttttccctattcgtacccagctatatattcacattcgcagaatatctgcagacatgaaattacggacgtgtcagtttctgacacgcccgctttcattctcatcttatcatttgtattcttgccgcagtcttcctacaaccggaaatgctccatgctgtctgcaagcactttcatgtcgccctccagcttctcgatcattccgctggagcgctccaccgttccctccagctcggttgtcatactggaagtctcctccgtggatgccgcattatctgtcgcaagatgcgtcagcacctcgatgctctgtgtaactttctcacgctcctcattcgcagtgcggatcatatccgtcaccacgcggatggaattcgtacacgcctccagtgccttctgcatatccagaaacatctcgctggtatgattcagcgcctctacctgctgcttcgacgcatcattcatctgtaccataatgcccatcgacttctcggaattctctgtcagctctccgataatgtcgttaatctcatgcgctgtatctgccgactgtgtcgcaagacttccgatctcttccgcaactaccgcaaatccgcgtccggcttcacccgcgcgcgccgcctcgatcgaggcattcagtgaaagcagattcgtctgatccgcgatctcactgatcagcgtcgccgccttgctgatcttattgacggatgcattggtactctccgtctgtgtatacatcgactcgatatccgcttctgtcttattgttcgtatcgatcagttcacgaagcttagcgagcgacttattggaatactcctgcatctgattggcattgccgaccagttcttccatctcgctggagatcttctcgatgccttccgcgatcgtcatgataccgttggacgcttccgtcgtggatcctgcctgcgtcgtgctgttttccgcaatctcattgacggcaaccgcaacgtttccgatggactcctgcatcgaggagaaattaccagtaaacgactgcagtgcattccgcagatctgttgatgccgtgctgatgcttcctatcagggaaacaatctgcttctgcgcggcattgagtgcctctgccgtgtctcccagctcgttcttctcccttacgttcacggtcgttgtcagatctccgtcggaaagtctggatgccagcccctggatctccaccagcggcttgcagagcttcgccgcatagattctcgcccacacgaacgccatcacaagcataacagccatcattatcactatcacaatgcagagaacctcgaacttctggttgatgcgtccttccacacccgtcatctctgcctgcatgtcatcgacgtagttaccggtggagactgcccatccccacggtgcaaacaactcggaatatgctaccttcggcgcaaccgtcacaccgtccgccttcgtaaagtaaaattcattgaatccgcctccgtcggcactgttacagaccttcataatctcctggatgatcatgacaccattctgatcctccagatcgtagcggttatttccttcctgctccgccagaatcggatgcattaccagattgtaatccgtatcatcaatccagaaatatccgcttccgtcatcgcggtaacgcatggcgcggacgatctccttcgcttctgctttcgcttcttcctctgtcagttcccctgcctggctcttatcatattctgcctgcagcacagcaatcaccgtctggacctcagacttgatctctgtgttgtaaccggaatccatcgcactttcatattccgtcagcgccatattggtcgtattccggatactgaaaatggaagttgccccaagcaacagggatgccagtaataccagcatcagacaggtcatcgttaacgtatgtttcacacttcttctgttcataccatgccgccttccttgttgtgattccgcacaactcttctgtgtttctcattatttttattgtactttatgtacaaaaatcatgcaatggtacttccttaccaaaagtgaaacatttctcaacagacctatgcattcaggaaatctctgatctcctccggttcgcggacaaaatgatctgcaccatgttcttttaagaacgcttcctctcggaatccccacaggacggaaatgcacggcagaccggaatttttcgctgtcatcacatccacctcggaatctccgacatacacggcgccctcctttggcatgccaagctcctttaatgccgcatagaccgtatccggcgccggttttttcgccactccggcactctcgccgattgccactttcacaattccctcaaaataaatctccgccagttccttcactgcagaatccggcttgttcgacacgatcgcaagcgcatatccgtccgccttcagttcccggagcagatcaatcactccgtcataggcttttgtattgtcattgcagtgaatatcataatactcccggaaaatcgcaagcgtctgctcaaagacttccggtgccgttccctccggaaccgccagctcgatcaggcgcgccacaccgtttccgacaaaccggcgcacatcatccagtgtgcgctccggcatattcatcctgcgcagcgcatagtttgtcgcttttgtcagatcctccagtgtatacaaaagtgttccatccagatcaaaaatgactgtctcgtatttcttcattctcccactcctcttcgcctcacgtatgcattacgcgcattgcatgtcgttctgcatatctgcacatctcttattttacgctgacttctcccgccagtacccgcttgtaatcttcgtaattcttcgcaagcagtgccggtgtgtccagtccgtacggacatttgctcttgcatttgttacagtgcaggcagccctcaatttttttcatcttcgcctgcatctccggcgtcagctgtgcctccgacggcgcgcggcgcagcatcagggacattctcgcacagttgttgatctcaattccggcaggacatggcatgcagtaaccgcagccacggcagaattcgcccgagagttcttttctgtcatgctcgatcaccgctgcgatctcctccgtcatgaccggtggatgttcaatgtaggaaatgaactcgtccagttcccgctctctctgcacgccccagattggcagcacattctcatactgtgcctcaaacgcgtacgctgcagccgaattgttgatcaatcctcccgagagcgctttcattgcaataaatcccattcccgcctgcttacacttctccaccagctcgatgtccttctctgtcgccagatagcagaacgggaactgaagcgtctcataaagtcctgactcgatcgcctcatctgccacggcaagccggtggttcgtgataccgatgtggcggatttttccctgtgccttcgcttccagcatcgcctcgtaaagtccggttccgtcgcccggcttcggacagaaggatggattgtggaactgatagatgtcaatgtaatccgtgcgcagattgtgcagggaaatgccaagctgctcccagaattcatccgcattggcagccgccgtcttcgtcgcaatatagactttttcccgcatgccctcaaacgcttcgccaagcttctcctcgctgtccgtgtagaaccgcgcggtatcaaaaaaagtgataccggcatcatatgcctttcgtgccagcttcacggcgtcttccgtgctgatccgctggatcggaagtgcgccaaacccgttcttattgacagtaatccctgtttttccaagtgtcactctctccatttctttcctccacattcttcttacacacattgtccactgcaaatctgtatctctgttgctttcctgatactactccagataaggaaagaatacttcactcttttcctttttgtcaaacatgttattgtactgcaaaatattatagttccggatccaggccgcctcctcgcctgtcgcttcctcgatatgcaaaaatcctccggcagacttggaataatagcctctggaattgattgccggaatcgtctccatcagatccgccagaaactgattgtacgccggaagttctattcctgcccgctccagtgccagcgtcgagagataattgatgctggtgaccggcagttccacctccgtgctctcatagttcgtccagataaaaaacggtatcgtatacagatcttccagttcatcctcggtcagtcccgaaagtcccttgccgtttaagttcggataaaagctggacgaaaggctcggctggtgatcgccgaaaaatacaatctccaccggatcctccacattttgaaaataggagatcagatactccaacgccgaatcgctctcatgcaccagagagagatactgattgacgtccggatagtttaatcccagcaggcgtaccttctcatcaaaattatcgtacttttccgtataaccgccatggttctgcatggaaatgctcatgatgaacagatcctcattcgccgcacggctctcatagcggtcaatgattttctcatacagttcccggtcggtaatatattcccgcagaagcttcgtctggtcaaaatcgtcgataaaatgtgtctcatcaaacccgagatccggatacactgcattgcggctccatccggtctcatagtacggatgcattgccacacaggtataaccgtcgttctttaagttggacacaatcgaggtcggcgtcttggaaatatactgctggtataccacggaaccgctcggcagaaatgccatggagttcccggtcataaactcccactccgaattcggtgtcttcgcaccgaacacggaagacagcgcatatccgtgaatggcattctccttcagggagtggaaataaggcgccacatcaatattcgtggaaaaatctcccaccaccgaaagatccgcatacgactcgctcatgaccacgataatggtcggcttttctcccggatcagccgccacatccgcatatgccgaggcagcgtctttctctccctgcttcttcccgccgctatcaccgccagaatactgctcttccagcgctttcaccgcctcactggaatacccgtcgggcgcagcgataaaacagtctcttatactcagcacaaaattcagaatatatccgttgcggtagcttcctttctgctcccaggtctctgtcactatgtactccgtcttatgaccgatatacacgccgctcagcacggcaagagagatacagatgatcgccatcggcactctctttttaaaggaaacgtgaagcttgcggatcagcgccacatagagcgtggaaatcagaatcacatagcccgcccggtcatccatcacgaactcataattacccgccaccgaaagtccggtctggatggatttcaggtcgctgaaaataaattcgttcccgcggaacagatatacaaaatagttgattcccgccaatgacaccagaaaaatgtgggaaatcatgcaggtaagtcccgtattattggtaaaaacctgtaccgccagaaataccaccagacagcacaagatattgagcagcatcttcggctgtgtgatcttggcgcgaagctctgcatccagcagcagatactgcacatgatacgccgtgaaaatactgctggcgccgatcatcagtccggtccagacccacgggatcttctctgacagttccacctccaggctcttaaataggaagtagcacgctccgaataccggcagcgcccacaccgaaaagccgattttccagaacaataccgcggcaaagatcatcgccaccgcaagtctgcccaaattacccttgtcaaaatataattttattttcatatgtttccttatttacgctttctttacatattttttgcatgccaacgttaattttatcatgacttgtgcgtttgtcaatttcccaaaccttaaacttttcaaaagaggcgcaaaatgaggctcgcacacagggcggagaatagattgccggtcacaataaaatgtaagatgcaataaagttccagatagaaacagtgcataggatattcgttggaacaaaatgcgagaatttcttctctgccgctttttatatccaattccgtgtctttccacgttttgacaatccgcgggatgtgtccgacacgccgcagacaatgagcggactttttagtgttcctaacatcaccgcttcacagacaatataaaaccgcgcgaaccgaaactcgttggcatctgctattgaaaataaggcagatgccaattcagacatcggcttcgcgcggttatgttttgttcattggtgatgtaaggaacacacaaaagtccttaaattgtctgtcggcctgcggacacacccgcggagtgctcaaaacttggaaaaacacggatcatcacagatgtaaaaagcggcagagttagaaattccgtattttgcgatccgaattcctacgcactgtttctattctggaactctgctgtacttactgttatcgtatcactgccagtctattctccgccctgtgtaccagcctcatatcacagctggcgctatcgtttggcttgtcccgtttttttgaggtagatgcggcgtatgatgaccacaaccgcccccaccagaaacgggaatacgaaggtaccgaagcggtacagaagcgacgcggagcctgccagtccggttccgacaattccggaaaagagtgccgtaaagacgaactcggtagagccgattcccgccggtgacggaatgactgccgcaagcatgacagaaagcgatgtgaccgccatcgtctgcgggagcgtaatctccccctgccccagaaagatcagatacgggatggaataccagaatgcgaacttgatgaggttcaatcccactgcacccgcaaccagccgcttctctcccatcagctgtctggatgcatcctccaacatctggcactggtcatgaagcattgctgcctgcggatcaaaccgccctttcgtctttccattgaagaaatccaccacccaaagcagcatgcggtgaaactgcctggaacagctgaacagaattaaaaccacggtgatgatcagcgttacaagatatcccgccagcagcagccacatatactccccaaaatgtacccgcatataattccagttcagtgcgaacagaatcattgagaaaaacgcgatactgatcttatgaaacgcgtactgcagcatatacattccgaagctcttggaatactctataccgtgctcacccagatagacaatcgcggcaacccctgctccgctgccaagtgtcgccacgcggtaaaaagagcacaaaaaggcattggtaatacccatgcctaatgtgaattcacgattgtattgttttgcaagcagcgtggtaatcacgccctcgacacagtgatacacgacagtcattgcacagatgcctgcaatgaccgccggtgtcgttttttctaattgttctaagatcggtcctgctgaatcccggaatgtataaacaatgattccgatgatgacaagtaccaatgcccattttaagatctgttttttcgccttgctgataacgatcgccccttattttttcttaaagttggtgtagcccttctgctggtacggatgctctgcccacagcttatctgctgtctctttccactggcatgcatactccatacattttccgcaaagatgctctaccggctccgcctcctcaacatccgttgagtgtgcaccgctctcgtgtaccatcttctggagcagctccggattctctaacattggacatggacgaagcatgttctcattgaacggctgaccgtctctgtacgccatgaacagcggctgctgtaaacactctaacagagacttctcacggatatttgctcctgaatagtgaataaatacacacggctcaacatcacccttcgggttgatgtggcagtagtttcttcctccggcgatacatccgccaacatactctccatcgttctggaagtccataacgaagatctctttaccgcctgtaaatccacgtacctcacggattctgtggtaaatatattctctctgttctctggtcggcatcagttccggtgaagccttcatacctaccggcatcagatggaagtaccatgcgaaacggcttccgtgctcgatcagaagatcaaagaactcatccgatgtaacggcatccatgttcttgctggtgtagcatacgctgttaccgaagatcagcccgttctcatgaagcagatccattgcatgaagaaccttgtcaaatacaccttcgccgcggcggaaatcattggcctcctcaaatccctcaaggctgatggataaggacaggttgccgacacgcttcatctcgtcacagaatgcctggtctacgagagttccgtttgtgtagcagtgaaatgcacactcgttgtgcttctcacagagcttaatgatatcgtcttttctgactaacggctcaccaccggtcatcatataaaagtaaataccaagctccttaccctgtgtcacgatattgtcaagctcatcaaacgtaagattgagcttgtgtccgtactcagcagcccagcagccggtgcagcgcaggttacatgcactggtcggatccattaagatcagccacgggatgttacagttatgtacttccctcatcttacgaatcgtcttcgttcccacaaatgctgcctgatatcccagatttaatgctgtcatctttgctacatggggatcggtctcatccagaagacgatttacataatgcatccatttattgtccggatcctgaatcatctttctggctccgtcatacgcttccttacggaagttatcgcccatgaacttttctgcaagatcaacaatctgaagcaggcctttttcacgatccttattcagatgcttcaatgctgcatcaatcgccacgctgaatgcctttctctctactgactgtgctaaatttgccatcacttaatcctccgttttcttccatacacactaattcttttctaagatgaaagtataaggaatactgctctttttttacatatgcaatgcattttaagtgttgccacccgatatacattttccttgttttgtctatcatcttatgacaatctgactgttttgattatcaccgaactatattatatagtttccattactacgtgatagtataacactctttttttgattgtcaatctatttgttttattacatttttcttaaatcttccattcctcacttaacaccttcctgtaaaatggttatactcatgatgaacgaaaggaggaattcccatgccaggttttgttacacattatctgtttggcgaagaaatctatcaccagttaaaatgtaatttccagaaaaaaaatctgttttataaccgcagcgcttatgcgttcggactgcagggaccggatctgtttttctattatcttccgtcctatgccctgcaccgccacaatctcggtgccctcgcacacaccacggagccgcgtgcctttttccgcggactgctggaaagttacgggcgtctttcgtccgccgcagaccggggcattgccgaagcctacatctccggtttcctggggcactatctgctcgacaccacatgccatccctatatctatgccatgacgcattaccatgacaagaaggagaaaagctatttttccagacatgcctatctcgagacagagatcgacaccgaactgcttgccagaaagcgccacaagacaccctgtgaattccacgccgccgatacgatccagctgacttttgcccagaaacgcgtgattgccgggctcctgtacgatgcctatcattacgcattccccgaactttccattcatcgcagcaccatgtggatgggaatcatctcgcttccgctcggcatgcggattcttcacgatgaaaccggacaaaaaaaggttcttttccggttcatggagaagcattttctgggatacccgttattttccccgttgataccgagcgacacactgtttttccgcacggatccttttaacctgaggcatgcctcctggaagaatccctgggatgccacacgcgtctccacagaaagcttttttgatctgtacgaaaaaagcagtgcgcgctgccttaccatgatgcgaaagcttcacacattactgcatacagaaccaaaaagtgagctgcagaaacagctcactctggaatttctaaaagaatacggcaatctgtccttccacagcggtctggatgcgcagattccaagctgatgcgcccccaaataggcgcattcttttacagatggaaaaattcccggatctgtccctcaatgatcttcatcagacgcgtgcgtgcctcaatgcttgcccatgcgatatgcggcgtaatcatcagcttatcactgtccttgatctcacgcagcggattgtctgcccgcatcggctccgccgagagcacatccagtcctgctgcagcgatcgtaccgctctttaacgcctccgcgagatctttctccaccacaatcggtcctcttccaagattcaggaaaatcgcagattttttcatttttgcaaacgctccggcgttcataagcccttccgtattggcatccagcggcgcatgcaccgacacgatgtccgactccgcgagcaacgtatcaaaatctactctctcgtatcccggctgatcgtgttttccggaggtggaatagtagagcacccggcacccgaacatgcccgcaatgtccgccactcttctgccgatcgcgccaaggccgatgacgccccatgtcttcccgctcagctcatgaaacacattgtcaaaatgtgtaaaggaaacatcccccacatatttttctgattttacatattcatcataataatgtaacttttccagcagatagaacaataatgcaaacgtatgctgtgccactgtctccgtggagtatcccgccacgttgcgccatgcaatcccgcgctgatccagatattccttgtcaagattgttggttcccgtcgccgtcacacataccagctttaagtgctccgcctcaccgatggactgctcgttgatcacaaccttgttgagaacgatcacatccgcgtctttggtgcgttctctcgcctcctcgggtgtggaaaatccgtattttacaacctcgcccagcgcgtcataaccggacagatcgatgtcatcaccgatcgtctttgcatccaaaaatacgatcttcatcgtttgtttcctctctttcttatcccagatatgcacgcagttcctgcatgcgcttttctgtcagttcataaccctcgtcgtaaagccttcggagcttgatgacgtccgtggtcgtccgtcccaccccataggtggattctggagcgatgacaaagatttttccctcctgctcaagttcctgcagtctggccatacattcattgtagcgctccgcccgggaatccatgctctccac

SEQ ID NO: 11705 - DNA, 13338 bp, Unknown
  gut microbiota DNA sequence
aatagaccctactacagattctttcttttgtgcaccataagctactaccaccacctcatccaattggcctacatcctctaccatttgtacattaacaacctttcggttatcaacaatttcctctttaggcacaaagccaatataacggaaagaaagtactgactttctcgtaggaaccataatgctataattaccattcatatccgttaatgaatgcactgtagaatcattcttcaaaatgattgttacaccaattagcggctctcctttttcatctgaaacgttacctgttaccttaatacccttttgttgtgtagtttgttgtactttaggagcttctgggaccgaaatcgtaatttgccttcccaacatcttataattcagccctgtctctgaaaacaattctttcaacacagcatctattttcttattggaaactgaaatggagactttattattcagatttttttgaacattcgctgaataaataaaaatgtacttactatgtttttcgatataatctaagatatctttaactgtggtattctcatattgtaccgagaacaaatcttcttcggaattccatcggatagaattagtaccgaacgaagaactaggaatcataaaaaagacgtttataatacaaaaaagcttaagtcttttttttaagtgtaaaaaaatacttttctttaccataaaaatttctttttaggttaacaattttggatttattgatttaactaaggaattactatcgggtaaatacggcaatatttatccgattttttgtgtcatgatgataatctgttcttcataggcaagcatatttaaaagattaattaaaaagttattatttattcaagtatatactagtatctcttttttctatcgtaaatggcaatgtttgctgaatacattcaatcacctcatctatatcatctttcaaatctagttttccatagaccttctcactacctaccaatggatcacactgtatggatacaccataataaatgcttagcttctgaataatctgcgataaagtattgccattcaacagcataattccatctatccaactaatatattcagctacatccacttgcttctgacagacaattgaaccatctgctatattcaataaatcatgtggagccaattgtgccttcttctcattcttatcagttacttctactgatccttctaccaatacaatattggtcgcacttccccgataattggaaatattaaactttgtaccaagtacccgtaatttaaaatcctcagattcaacaataaaaggatgtttcttatcatgagcaacctctagaaaaacttccccttgagtatatatcttacgaatgtcacctttaaaacgacgaggataaacaactttagactgggagtttaccactagacgagtcccatctgacagctctattctagccctcttacctgagggaacaatcaactgattatattcttgttcatcttttaccttttcttctttaataacctgagaattaaccgcaacttttccttcctttgaatacttaataaaggcatcttcatctaagttcaattgttctttagcagttatcagagttacttcatcaacagtctggctatctagaccttctgcaatagcttgtaagtctaaatcgacaacagtttctagattcataaaataaatagttgacatacaaatcagaatagaagcagcaatagaagcggaagttatcaacaaatagttccgtttgcgcttcttttcgcttttttgtatcttcatacgagttctctctataatggaagaagcatcaattttctcttgttcgcagctttcccaaaagaacctcagcgtctcaccttcaggcatagtggtaaaatcatcctcaagtttttcctgagaattcaacttaccaaataaatttgcaaggcgaaagtattctttcaagttcataatcttttttaatgttgttctataattaaagacgcaattaaaaaaagaatctcctagttaaaaatgaacttttttctcatttcatataaaaaaatatataagacagattttttcacgaataggctattgataatcaaataaataaggcaagaataaaaatattattctcaaaagcgaatatttagtttcttagcaatttcttccaatgcaaaagctatatgattatttatagtcttcacggatatatctaataatgccgcaatatctttataaggtaggccttctattttcgccaagaaaaaaacatgtttacatttcggtggtaactgttgaatagcattgtttattttctccatttcttctctgctaatcatagcctcatccggtgattggattggggcaaatataaaatctcctatatcatcaagcaataaatctgcctttcccttctcttttctcagataagaaagagccttccgataggttattgtttgtatccaagcattcatattttctatgccagccaaagttcttctatttttccaaacttcaaagaaaacatcacttacaacctcttcagatggctccttttggccaatcaaagcataaacatagtgatataaacgtgaggaataatattccataaaacggcaaaaagccgcttcatcactgtttacaattctgtctatgtcattactttcaagtttcacggaagtgttttacagattacttctaattaacaaaattgtgccaaatatagtagtatattaggaaatataaaaataaaaaccgaattaaaagttatcaattatagaaaagtatatacaataaatattacaaaagtcttttactcaaatatcgcaccggataccatacagaaagaaagccgaccgttagaaccgtcacaaagataagtagcacatcccaagcgtgaacactcacaggataggcatccacaacaaaagtaccaccgccaccacctaatgagataattccgaattcctgttggatgaaacacaaaagcaaccctaaaacaatcccggaaacggcaccgaaaagagaaataagacgaccttcgaataaaaagatacgggagatcagtttatcatccgctcctaagctacgtaatgttacaacatcatccttcttgtccaaaatcaacatagaaagagaaccgattacattgaagcaagcaatcatcaagataaaagtaaggaataaataagagatcaatttctcgatctccatgatacggaaaacatccgcttgctgctgatagcggttctgaacgataaaatcattacctagtattttctcaattttggcttgtacagatgaaacatttgcaccaggcttcaatttcaattctatagcggaaacctctgttgtataatccagcagttgacgaagaaaatcaagagaggtaagaatatactttccgtcatattcctgctgattgacaacgaagacaactccgggagaataaagataatcacgattaaaggaagcacccggatttgccatatttactttagcattccgtttgggtaaatacacttgaagaggatcaacaaattgaagtcccgtacccaaggttgccaccaactctccccccatcacaccgtaattcacaatagaatcatgaagaagaaaatcaccggctccatagagaatactatcaatggctgtcaattcttcaaaattatcctctaccccctttagaacaaccatagcttgacggtctttatattgtaccatcgcattctcttcgagagtttctgtaaatacatctacttcaggaagcaggcaaactacgccaatccgtttgtcctgaccatcaaagactttcccctcacgaacagtaatttttaattgcgggtcgaatgctgtaaaaaagctggctaccatatcctgaaatccattaaaaacagaaagcgtgcagaccaatgcaagcgtagcaagagctactccgcacacagaaatgccggatatgatattaatggcattatgtttcttcttcgaaaaaagataacgccgggctatataaaaaggaaaattcaactctgcaacaaattatttcatttcagcaaagaatcaatcttctcaatataatccaatgaatcatccacaaaaaacttcagctccgggataatacgtaactgatggcgtacacgggttccaagctcatagcgaatggtcttcatattatcattgacattcttcactatttcttctgccttctcggacggaaagacactaagataaacacgggctatactcatatccgggctgatacgaacagcacttacagataccaaaacacccggcattgcttttgtctgaagcagaaatatctcactaagctctttttgcaacagtcgagatatcttattctgtctagttgtttccataaatctactcctttatttctttcttataatcgttaacccatcacgtaagggcaatatcactttctccacccgctcatcttttgctacgaaatcattgaatgccttaatcccgatcgtctgagtatcagcactacgaggctgttccaacacatgaccatcccacaatgtattatcggcaatgatatatcctccttgtgagagatgcgccagcgtcatttcgtaatattcaatatacttgcgtttatctccatctataaaagccatatcaaaaataatccccaaatcgggaaccaggctcaacgcatcacctatataaaaacggattttatccgcaaacggtgattcctcaagccacggacgagtaaaatcttcttgctcatcatttatctcaaacgtatgtaacattccgcccttctgaagcccttcagccaagcaaagggcggaatacccgctatacgttccaatttccaatatctggcgaggccgaatcatttccacaaacattttcaacatccgcccttgcaaatgcccggaagccatacggggacggagtaattttacgtgcgtatcccgatagagtgctttcagatagtcattctcgggatcaatatgctgcaaaatatattcgtctatagattcagtctcttgcatatagctttttacaaatagcggttattattcggcaaaacagtctcttccgcatgcttcaaagcatcttccaccacattgatttcgaggaatgaagtctgcgtaccttctttaccactactcaaatatcctaccatgtcggaaggttgcaagcgaccttccttcaacagacggcgtaaagcagcgaaatagtattcctgcccatttgccaattccggcatatagatcgcctctactccataagaaagagccagatgacgcatggtcttttccttataacatatagccaataccggatatttaccacggaaggcagccaaattacgagcagtacgtccactgtaactgtccgtaatgatagcacgtattttcagtttagatgtagccttaacagcttgtttagcaagaaatgccgtaacatcattactattttcatccaaaggaatgcgaatatcgttttcctccaacttatccttctcagcctgagctgcaatcttagccatcgttttcacagcttctaccggatacttgccataagcagtctccccactcaacatcaaagcatccgtacgataatagatagcattggcaatatccgtaacctccgcacgagtcggacgaggattattgatcatcgtatgaagcatctgagtcgcaacaattaccggtttcttagccaaaatacatttacgaatcaacacacgctgaatacccggaatacgttcctgaggcacttctatacctaagtcaccacgagcaaccataacgccgtcagccacttccagaatttcgtcgatattatccactccctcctgattttctatcttagcgataattctgatatcgctattgtgagcatccagaatttcacgaatatcaagcacatcctgacggttacgcacaaaagagtgggctataaaatcgatatctttttcaatagcataaagaatattgttgcggtctttctccgtcaaagaaggaagattgatacggacacccggtacattcacactcttgcgacttcctaaagtagcttcatttttcacctcacaaagcagataatcggcagtcttatcaataacctccaattccaggtcaccatcatcaatcagaatggtaccaccgatattcaagtcatgcacaaaattgggataagagacagcaatacattcgcgggtcgtttcaagttccggattaccaactattttcactttctcccctatcttatatggaatcggttccgcattagcagtcgtgcgaacctccggtcctttagtatccatcagaatcgcaatacggttggacaccgcacgcacatttgcaatcaaagcttcaaaaccttcacggctggcatgcgcagtattcatacgcaccacattcattccggcatcaaataattgtttgataaaatccacatcacaacgtctatccgaaatggaagctacaattttagtctgtttcaataacatagtctttctacctatttatatattataatctttatttattctctaataatgcctccaaagccaaacgatacgagttcaatccgaaaccacaaataacccctctacaggcacaagcaatcatagatacatgccggaattcctcacggctatgcacattagaaatatgcacttcaatcacgggagatgtcacagaacgaattgcatcctgcaaagcaatagaagtatgcgtatatgcaccggcattcaatataataccatccacgtcaaatccgacctgctggatgcagtctatcatttctccctcaatgttcgattgaaaatagtcgatctccaagtcagcatatcttttgcgaagctcagcaagataatcttcaaatgtaacgcttccataaatagaaggttcacgcttacccaacagattaatattcgggccattaataatttgtatcttcatcgcacaatcctgtttttttatacctttgtatccaaagaacaatatttcaaggtgcaaagatagagaaaagaaatggaaatcaacgaaaaaaaacagaagaaggaacaacaagcactgattatcagaaagtatcagcagtatcttaaattggaaaagtccttatctcctaacacactggaagcttatcttacagatttggacaagctattaagtttcctgaccttagaagggattaatatcttggatgtatgtctggctgacctccaacgttttgcggcaggcctgcacgacatcggcattcatccacgctcacaagcacgcattctgtcgggtatcaaatcatttttccgctttctgatcatggcagactatctggaagcagatcccagcgagctgttggaaagccctaatataggcctcaaactcccggaagtactgacagtagaggaaattgaccggatcattgccactgtagaccgcagcaaagccgaaggacagcggaacagagctattctggaaaccctatatagctgcgggctccgcgtttcggaacttgtcaatcttaaactatccgacctttattttgatgaagggttcatcaaggtagaaggaaaaggaaacaaacaacgtcttattccgatttcccccagagccattaatgagataaagctctattttacagaccggaatcagatagaagtcaagagcggacatgaagattttgtttttatcagcctacgaagaggtaaaagactctcgcgaattatgattttccacatgataaaagaactagcacagcaagcaagtattaccaaaaacatcagcccgcacaccttccgccattcttttgcgactcatttactagaaggcggcgccaatttacgggcaatccaatgtatgctcggacatgaatcaatcgcaacaactgaaatctacacccacatcgaccgcaatgtgcttcgcagtgagattattgaacatcatccccgaaatattaagtatcggaaagaaaaagagtcattatttcattaaattatgataaaatcgcccccttatccatatatttatattaagaattaatatctttgcgttactttttctacgtaaagtagaagaagatttgtgaatagacgatatttcaattacaaacatttaatttatacctaaaatgactaagaagttgtacttgcctttactcatggcaatggttgttgcattattctcttcttgcagcaaaaaaatgggtccgctgtcagctgattacttcactgttactccgcaagtgctggaagcagtaagtggtaaagttcctgctaccatcaatggtaaattccctgaaaagtatttcaacaagaaagcggttgtagaagttactccggtattgaaatggaatggcggtgaagctaaaggccaaccggctactttccaaggtgaaaaggtggaaggtaacaaccaatctatctcttataagatgggtggtagctacacaatgaaaacctcttttgactatgttccggaaatggctaagtccgagttatacctcgaattcaaagctactatcggtaaaaaagaagttactattcctgctgtgaaaatagctgatggtgtaatttctacttcagaattagttaacaatactttaggtaatgctaatcctgcattgggcgaagacgctttccaacgtatcatcaaagaaaagcacgatgctaacatcatgttcttgatccaacaagctaacatccgttcaagcgagttgaagactgctaaagaattcaacaaagaagttgctaacgtaaacgaagcagctaacaagaagatcagcaacatcgaagtatctgcatacgcttctccagatggtggtgtaagcttgaatactacactggctgaaaaccgtgagaacaacactactaagatgttgaacaaagacctgaagaaagcaaaaatcgatgctccgatcgatgcaaaatatactgcacaggactgggaaggtttccaagaactggtttctaagtctaacattcaagacaaagagttgatcctccgcgtattgtctatgtatcaagatcctgcacaaagagaacaagaaatcaaaaacatttcttctgtttacaaaactttggctgacgaaatcctgcctcagttacgtcgttctcgtttgactttgaactacgaaatcatcggtaagtctgacgaagaaatcgctaagctggcttcttccaatccttctgaattgaatatcgaagaattgctgtacgcagctacactgactaacgatcctgctaaacaagaagctatctatactcaagctacaaaacaattcccgaacgattaccgtgcttacaataacttgggtaaattagcttatcaagctggcaacatcgataaagctgaatcttatttcaagaaagcagccaacgtaaacgcttctcctgaagtaaacatgaacttaggtttggtttctttgatgaagggtgacaaagcagctgcagaagcttacttcggtaaagctgccggtactaaagaacttggcgaatctatgggtaacctgtacatcgctcaaggtcaatatgaaagagctgtaaactcattcggtgactctaagactaatagtgccgcattggctcagatcttggcaaaagactacaacaaagctaaaaatactttggctaacgtagaaagaccggatgcttacacagactacttgatggctgttttaggcgctagaactaataattcttctatggtaacaagcagcttgaaaagcgcagttgctaaagattcttcattggctaagaaagcagctacagacttggaatttgcaaaatacttcacaaatgcagatttcatgaacatcgttaaataatagaattaccactctattttaaatattaagaattgcctgtcattacaaatgacgggcaattcttttttttatctgcaaaaaaccgtactttcgcagaaaagaaataaaagcaatgaaaaagagtagcattttaatcctcatagccatctgtctattcggttgcagcaagtcttctaaggaagtaaacataaccggagaaatcgaaggattgggaacagatacactttatctatacggtatggacgaattgcacgaccaaatagatactattttcaccaaagacgacaagttctcttattcaaccccaatagacactattacctccgcttttctgctcattaaaaatcagatagaataccctattttccttgataaagggaataaaatcaaaataaagggagataccggcaatttgaaagtcctaaccatcgacggcaatatatacaatgaagagtttacagccttccaaaaagaactgaacggcttaaacagcccgtccgaaaaggatttagaacaaaaagcagaagaattcatacagcaacatcattcatctttcgtaagcctctatctactagataaatattttgtccaaaaagaatctccggacttcaataagataaaaaaactaattgaagtcatgacaggaatattgcaagataaattatatattgagaagttgaacgaaaccatatcccaagccgaaaaaaccgaaatagggaaatatgcccccttctttagtttgcctaataccaaaggagaaaaaattacccgcacatcagaagacttcaaaaagaaaaaccttttaatcaacttctgggcttcttggggagatagtatttccaaccgtcgcaacaacaatgaactaaaggaactttataagaagtacaaaaagagtaaatatataggtatgctcggtatctctttcgacgtggacaagaaagaatggaaagacgcaataaaacgtgacacgttggattgggagcaagtctgtgatttcagcggacttaattcagagattgccaaacaatataccatcaagcaaattcccgcaaacattcttctgtcggcagacggaaaaatcctggctaaaaatctcagtggagaagatttgaagaagaaaatcgaagaagtcgtttccgcagcagaagagaaagataaaaaagacaacaaaaagaaaaaataatcagtaaccaaacgtgttaatcaaagtattcggagcggctgttcaaggaattggtgcaacactcatcacaatcgaagtaaacagctcacgtggctgtatgttctatctggtcggccttccggattctgcggtcaaagaaagccatcaacgcataatctccgctcttcaagttaacggttataagataccgaccagtaacctgatagtcaacatggcaccggcagatattcgcaaagaaggttcagcctacgatttaccccttgccatcggccttctgggagccaacggaactatatcttccgagaaattctctcgctacttgctaatgggagaactgagtcttgatggaagcatacagcccatcaaaggagcgctccctattgccatcaaagcaagagaagacggatttgacggattgattatcccacagcagaatgcacgggaagctgccgtagtcaatcaactgaaagtttatggcgtcagcaatattaaagaagtcatcgaattcttcaataatgagcgagaattagaaccaaccatagtcaatactcgagaagagttctacgcccaacaaagtaactttgaatttgatttcgccgatgtaaaagggcaggagaatgtaaaaagggcattggaagtagcggcagccggcggtcacaacctgattatgataggtgcgcccggaagcgggaagtcaatgatggcaaaaagattaccttcgattcttcctcccctctctttaggagaaagcctcgaaacaaccaaaatacactccgtagccggaaagctaaaccgaaattcctcactaataacccaacgccctttccgagacccacaccacactatttcacaaactgccatggtaggaggagggagttttccccagcccggagaaataagcctagcgcacaacgggattttatttcttgacgaactgcccgaattcagcagaaacgtactcgaagtactacgacaaccgttagaagataggcgcatcaccatttcccgcgtaaaaagcagtatagattatcctgccagcttcacattggtagcctccatgaacccttgcccatgtggttattacaatcacccgaccaaagcgtgtgtatgcagtcccggacaggtgcagaaatacctgaataagatttccggtcctttgctcgacaggattgatattcagattgaaatcatcccagtcccttttgacaaaatctccgaccaacgaagaggagagtccagtgccgccattcgtgaacgtgtaatcagagctcgtcagatacaagaaaaacgctatgctgagtatccgggaatctactgcaatgcacagatgagcagcaagctattatccatttatgcgcgaccggatgacaaaggactttccctgctgcgaaatgcaatggaacgcctcaatctttccgcacgcgcatacgaccgtatattgaaagtagcgcgtaccattgccgatctggaaggaagtgaacagattctttccgctcatttggcagaagccatcagttatcggaatctggatagagagaactgggcgggatagagagtcgccttccgctccatcttgtaaaagtaagagactacactatttgtatactataattacctcaattccgaaagataccacacaaaggaaaacgttccatcaaatatcattacagcttagtacataaacgtatgatacatttataataaacttttgagcagtttattataaacggtatccaagtttattataaaatctcaaattgcgaattcgacttttatcgtctattttttacaacaaaaaaggctgcgaattttgtggaattcgcagccttagcctatatcagatattctatttcttggtatagtccaagaagagagagaacaattgtcactatattatactacttctatattcatttttatctaatttttcagttattatcaggcagaaatccatttccttgagctacaaagatacaacattaaaatgcatttgtcaagtccctaacaggtttcagcctgaaaaacaaaagaggaaagtgtccgaaaagggtttcctcttcatcattccgtccatctacactcttatttccagcaaatagactgcaagaaccacgccttattatcgtcattcaaaccttggcgtttcagaacttccggaaaatcattataacttttccagaaatcggaaactaaagaagaaatcttgtccggagcataagtaactgcttcacttaaacttcccatcttaccaaattcttctttaaagcaaatatatgaatcacgatatttcaactgctccatagatttggcaactcgtctcgatgctcccaataaaccgttcatatcagcc

SEQ ID NO: 11706 - DNA, 2523 bp, Unknown
  gut microbiota DNA sequence
ggcaacaaactcctccagttccttccggagttccgtcctgctatcattatacactttccggcaagctttcaacagtttttcccgttccgccaaatgcttctccttctcgccttccgccacataaagacgatgaccgatatcattcagttgcgcctgtaattcttcggtacatcctcttttccattcctcctctttcgtcttccatgaggcgtaatcagcctgcaaattcttcaattttgcaggaatctgcattcgctcagcttccatcagatgttgttcttccaaaatactatgtatttgcttcgaatacttcttctccaaagaagaaacagcttccccctcttcttccgtcagtcgggtgagacggtcggtacagagttgccgggctgcttgttgcctgtcgcgctcctgcttcatttcctcgggagtgcggacagaacgctcgattgctgtcagattgagtgaaacaccgaacaaagtagcttccttattcactaattgaggttgtagttcattgttgtacaacaccagttcctcatccgccaccttgcctatcgtctcctgccaatccggtttgttcttctccagccattcacacaaagaaccttttcgtttctcaatcaaggcatccaatgtttgcaactgttcttcaatcgcgctccgttctttacgaacggtctccatctttgcctgaaattcccatttcaatttttccactttccattcacactcctgcctcaactgctttatttctccttgttgctgacggatgctatgttccagttccttgtcctttttgcgcagttcgttgatgccgtcttcacaatcggacatttccttttgatggggatgttcgtatttcaccttttgaagtttcaggttacactgtgcctgttcatcgcgcaactgccggatacgattatccacagtctgcactttctcttcttgcgttgcccttactttctcttcttccacacgaagttgttgcatcaattcctcctgcttgccggcaatctccgcattccgagcatttatccgtgcttgctggctattctcaaaagtacggaaatcagcttccagtttctcaaacaacaatcggtacttactcaatacatcctcataagctcttgtcagttccgatttcatattccggacttgctccagttcctgaatcagtaattcttcgcaagatacccgtttgatgatttcttcaatctgcatctgctcgtaatgcagacgtttctcacgtatctttttgagcaaatcgtttattatacctatatccctaatcaaaccatcacgctcattggtgtacttttgttgcagttcacccataagccgcagcaaccgttcacgttccgtctccgctttagcctgttcttccttcactaacggaatctcatgcaaagcctgtttctccgcaaagttaagctccgcacgcccttcaccaatctgcttttgagtataaatcaagtcacgataggcgttcattactttctccgccatcttccggacaggcacttctccattcttgttctttgtaaaccaaagcatcacgtccctgtattcctgctcgaattcctttatctggctacgatagaagtccaaatcgacagagatatcctcatcactcatcgaacggataatggtatcttttataaaatcagcatccagtttggaatttaaaaagacgttctgtatcgtacggggaatattctgatattttgcactttccacaatggcaaacttgcggtagggtatcatttcatgcttgcggttattaccgaaaataatgtcccgatacatttcatagctagtcacttgtgcagtaatctgaatcttcgaaccgatatgttcgcggatgcgtccccactcggaatgtaccacattgtgttcgtcaatgaaccagtcctgttggaatggcgcatcaataaaacggaaaaacacccgtccctgggatttggcagctaccacacaatacgccccattctcccgcatcacctcatagataatgtaagaattggcgtatggaaagtaaaaagcatcgaagcttttcttctccttcggaatacccagtcttagtttgtcagcattataaaagaataggatggcacggagcagcgtactcttaccgacaccttgcgtacctataaaatgtacattcccatccaacttcacttccgcatacggaatatgggcactgttcagaaaaataatcttattcaggtatctcatcttgcacctcctctgaaattgtgatacaatcaaccaagtcctccatataatggaaagccgacaatactttatacgtcccgtcaagttcgttttctttctctatcagtcctatactctccagttctttcagcagtttgccgactacttcatcatatttcttcttatccgaaaacagtttggttgccttttctttcagttcgatatcgcatcctatctgaatctcaatatcagcagcacgaaacagaaagcccgggccgaatgccgaatgataggttttcaggaaactca

SEQ ID NO: 11707 - DNA, 989 bp, Unknown
  gut microbiota DNA sequence
gtccgaagctagcacgcccgatcattactgcatctactccatagcggtcaaagcactctttgcagcgttgaggcgtagtcacgtcaccattgccgataatgggaatatgcatccgtggattcttcttcacttcacctatcagtgtccagtcggcttctccggtatacatttgtgcacgggtacggccatgaatagtcaatgcggcaattccgcaatcttgtaactgttccgctaaatctacgataatcttattattggcgtcccatcccaaacgggttttcacagttacgggaatctttactgcatctactacggcacgggtaatctccagcattttcggaatattctgcaacattcctgctcctgccccttttccggccactcttttcactggacatccgaaattgatatccagaatgtcgggctgcgcttcttccacaattttggctgcttctaccattgtctccgtatcttttccgtagatctgaatagcgacagggcgttcttcatcactgatactgagtttttgtgcggccttgctgactgcacgtatcagtgcgtcgcttgatacaaactcggtgtataccatgtctgctccgaacttcttgcacatcaggcggaaagccggatcagtcacgtcttccataggagcgagcaggatagggtatttacccaaatctatgtgagctatcttcatatataagtattactgcttattattcgttttcttattggttgctttatatttttgtttcggatgattgggtactccgggatataaatattcgatagtcctattctttagcattcgtggaattattttattggcaatatagtcaaaggttctgtttgttcttttagcgatttcatctaatgtgatgtagtcttctgcaatggatattattatggattgaagttcttcgaatttgagtctttttgagcttccaaccttcctctccggatcgttgacatgatattttgttcccctt

SEQ ID NO: 11708 - DNA, 373 bp, Unknown
  gut microbiota DNA sequence
tatatgcttgaaaatatgcccgatgtggggttgctcatcattgacggaatccgtgacttgatgtatgacatcaacagccccagcgaatcgactgacctaatcaacctcttgatgcgctggtcaagcggatataacctgcatatccataccgtactgcatttgaacaagggggatgacaacacaagggggcatatcggtacggaactgaacaataaggctgaaaccgtcctgcaaattaccaaaagtacgcaggacggcaacataagcgaggtaaaggcgatgcacatacgtgaccgggagtttgacccgttcgcattccgtatcaacgacagcgcattgcccgaagccgtggacggttatgtattcaagcaac

SEQ ID NO: 11709 - DNA, 5603 bp, Unknown
  gut microbiota DNA sequence
tacctattgatggtggtttcagtgcattcagcggagtttaagcaataaataatagcctgttataaagagaaagactatgatggaaaagacttggagatggtttggcaaaaaggataagataaccttgccgatgctccgacaaataggggtagaaggaattgtcactgccctgcatgatgtaccgaacggtgaaatatggacaatggaagctattaacgatttgaaatcatatatcgaatcttatggtttacgttggtcggtagtggaaagtcttcctgtatgtgaagcaatcaaatacgcaggagcggaacgtgaacagttaattgaaaactacaaaataagccttgccaatttgggtaaatgcggtataaagacagtatgttacaacttcatgcccgttatcgactggatacgtacagacttgcaacacccttggccggatggtaccagttctctgtattacgaccatatccgctttgcttatttcgatatccgaatcttggaacgtgaaggagctgaaaaagattacactgaagaagaacttcagaaagttgccgagttggataaggttatcacagaagcagaaaaagacgctttgattgatacgatcattgtcaagactcaaggttttgttaatggcaatatcaaagaaggagataaaaatccggtttccatcttcaagcggttacttgctttgtacaaagatatagaccgggatgctttgcgtgaaaatatgcgttatttcttatctgcaatcatgcctgtatgcgaagaatatggagttaatatgtgcgtacatccggatgaccctccattccaggtattaggtttaccacgtatcgttaccaatgaaaatgatattgaatggttcctgaatgccgtaaataatcctcataatggattgactttctgtgcaggctctttgagtgcaggcgaacataacgatacacgtgagttggctaagaaatttgcaaaaagaactcatttcgtacatctgcgcagcacagctgccatgcaaggtggaaacttcattgaaagctcccatcttacgggaagaggacatctgattgaccttatccgtatcttcgaaaatgagaatccgggattaccgatgcgtgtagaccacggacgaatgatgctgggagatgaagataaaggctacaacccgggatattctttccacggacgtatgctagctcttgcacaagtagaaggaatgatggctgtagtggatgatgagaaaaaacgacagataatattataatcatcacagtattcacaataataaaggcttcgtgaaaatcaaagctaaaacagccttgatctcatgaagcctttaatttatcattttattaatatctgtttagtcttgccctctctcaaaaccaaaggtttcctttcttctttctgtgcccattgctgaagggcttttatggctaatcgttgaaacattgctaactaacttatttataatcaatacaaagatggcatacttagcgcaaatccaaagcaaaatataagatttttatattcaaatccaaagcaaaaagtattcattctgtgcacaaaaccaaagcaagttgttacaaaagaatatttccaacgcgtgagatgtcctcttattcccctatatctgttctttcaagatatagggctttcttctgtctttatttgattccaaaggaatatctgccggccaaaagccgcaatactaacctaccatcttctattccgacatactctatccctttgcttttctttaaagttctattcccctcaacaatgttcttcactgaagttgcaggaagatgtaacgttgcagttgtatttgccggaactgtacactgataaataactgcatcttcttctactctccaactactttcgatacgtccatacatagaatcataatatcctttggcataagtcatattcccacaggtatccacttccggtttcagcacaaagtgtttaaatccggggaagttttcatcccgttctatacctaaagagtaattgtacatccatgcgccaactgcaccaaaagaataatgattgaaagaattcatacggttatttccaccgaatccatcttcatgggtataggaattcaaccgttcccaaatggtagtggctccttgctccaccgaatacagccacgacggatagttcgtctgctgtaacaacttgtacgccgcctcactgcaaccattatcggacaatgctttactaatccatgccgtcccgataaaaccggtcatcaacgaataaggaggacaccatctgccttgctctgtcctattttctctgacaattgtttccatcagattcttgacaaatttcggtttattctcttcatcaatgatgccgaataccaacgggaggacataagaagtttgtgtatccaccaacgttccctgcttcttcggtacgaaagcggagtgaatggtcttgcaggtttccggttgcaggtaagtgctattgaagaaagcctttctgtcgctgtgcaacttccgatattcttccgcatctgtagtcttacccaagatagtggctatcttgctcattaattcgaggtcataaataaaataggcttcccataagagagatttatcattcctgttatcttcaagaccgagccaatcacacaaatcaccccatgccctgctctgtacaagcagatttgttttcgggtcgatggtcttgtcgaggatataggaaatatatcgtttcatggcgtcatagtgttcagccaagagaactttgtctccgtattgcaggtaacactcccaaggaactgtgattccggcacttccccacagcaaaccaccgaatcctccacccaaaggagcaatgtccggaaagcgaccatcttcccgctgtacatcacgcatagaacgaaggtatcttctcaaaaattgaggtacgtccgccaggtacgtagccgtacgggagaatacggaaatatctcctgcccatcccaaacgttcgttccgttgagggcagtcggtggggatagacataaaattggcaaaggaagaccaagtaatattctcccacaacttatttactttctcgtccgatgtttcgtaacgggaagccagctcgtgaatggagctaagcactactcctttcaccgacgctgcgggaaggggttcatcaataccggttatttccacaaagcgataaccatgataggtgaaacggggaaaaatcgtttcttcacctcctttagcgatatagatgtcctgtgccatggcagcacggatattctctaacataatcattccggtgttacctttatattcgggcaaatccggatatttcacttcagcaaaacgcagacatattcttgttccgggtttcataccggacagttttatcttaggtacaccgaccatattctgtcccatatcataaacaaatacaccggggcgtacttcctccaccgagagggcggtcagctccttttttgcttttactgtctggccgaactgccctatcagttcaaagtcggaataatcatttacccgaggtttatccggatttccttccatactgacgttgccttccaaagctacttcacaggcaggtttccagtctacggcgttataggaagccgtactccatcctttcaccctcgcatcacgcaaagcgtcgtatacttctccctgaaagaagctaccataacagataggacctctattgtaatattgccaggtagagggttcggttattacaaccttctcctgtccatctgcataagtgattaccagttttgccagtaatgactggcggtctccgaaaaagttccaattatctcctgtaaaggttgctcctccgctccaccatccttcggacagtaaagcaccgagtgcattttgaccggaatggatatattctgttacgtcaaatgtctgatataagtgcgttttgttatattgggtgattccgggattgaaataatcattccctatccgtctgccattcagatatacttcatagataccgcgtgaagtaacatataaccgcgccttctttatcttcgcctccgaagaagcaaagagcgttctgagcatgggagccgaatgggattcaggagcaaaagtagtgaaagtgtccgatatcctaccaactatacggcatactgaatcttgcaacgtagtaattacattcgccggacttcgaaagtttgcaatttctacttttgagaaagaagctgcctgaccggcaggaacaaaataccccacatctcctaccaccggaaaagcgataaagtcaccgccctgccctaaaggattcagattgacagagccgatctgcttgtcggtattgtccacataaaactgtgtaaaacctaaattcgagcgaagggtcaccgtgtgccaatcgtatttattatgttcattgaccatctcctgcggaatagcgaaacttttataaggaatgtctttcttatcatccggatggtagcctacacgatatatattcaacaccgcatcttgccccgaaagcaacggagtgatattcaattcaacctttatatatgattcgtcttttttgttttccagctgatagaggttcttataccgttccatcaagcgctcatcattcgctccataaataaatcccgaacaggtggtccttgtcgtttcgtccaaccgcaaggagaagttcaacttaaaaaccggaagataatgggaatagaatgtcctatcctcatcccctgctccaatccatttcgcaccgccccatccctcataggcacgatcactactcatcagcccggtttcgaaccaggaagaagcggatacttttctatgtttcgtatcccatacatgaaccgtccactgatagcgggtagcagcttttaacggaagtccggcatattcaatattcaaagattgatcatcggtgattttctttgaatcccatacttgcacgccagcctcatcgattacaacgatttgacgagctgtctgcaataaacctctttcatcagtatctccctccatttgccaactgaaacgggggttctctacatcaattcccagcggtgtcacagcatattccacttgcagtcttttcaattgaaaaggagaatcagctacacttggtaaattgtttatcaatgtaaggactagaaggtaaatgtatcttttcatttcgtatcagtataagaatagtgcaagaataagagcatttcagctatgggagttaatatgatggcagcatgagagtaactgtttactgccccatacttcatatattaacctttaatcaaacagagaagctcacagcagtgagctcttctatccacaaatgtaagcccaaaagcccactgctgtgagcctgtctattcacacctgtaagctcttgagaaacaagacagcttgcaagaagaatataaggagccatcattacaatactacaggccgacataatatccaacggggtatgagagcaaaagttaccctcatgctaccatcatacttaccctcatagctcaagcaccgatgaataaggggattcaagagactatgagggtatgacagcaaaattgaataaaactttttctgattatccgtttatgcacctgttat

SEQ ID NO: 11710 - DNA, 7793 bp, Unknown
  gut microbiota DNA sequence
tatctgctataatagtaacgttcattacaggatttgatgctccggtattttccatgccgttccattgggcacctttccttatcctgatgttcgtattgattttcccgaccattatcagttatatgttgttgcctgtcggtttgaaatatctgaagacaacggtggttgctatttatggttatctgattctgattgtggcaactattgcctcccttgctttgggacaagaccgttttagctggacgcagacgtttgccattatttttatctgtatcggagtttatttggtagaagttgccgaaagcaaggagcgataaaagtttctcggtgtggaacactttgtttcaaggcatggaacaaaaaaagagcgtccttcacagaacgctcttgcttatttcatcatcatgttttatagagaggagttgattgcttgtgctatcgacttgaattcttcatccgacaatttcaatttcggatttgagaacaacatatccgattccttttggataggaattaaatgaatatgagcgtgaggaacttcgagtccgataactgcttcgcccactttttggcatgggaaagctttttcgatggcacgggctaccttttttgcaaatacgtgcattgcggccaggtcttcatcgctcaaatcgaaaatatagtctacttcctgtttgggcactaccaatgtatgtccctttaccaacggattgatatcgaggaaagcaaaaaacttttcgttttccgccaccttgtagcaggggatttcgcctgcgatgattctgctgaatattgttgccataactttttattgataaaataaggcaagcctcacacggagacttgcctttttgttaaaatgatatgtttactacttccaatgcaattttgccctgtggaactgtaatttctgcaacttcacctaccttcttgccaagcagtccttgtgcaatcggagtgttaacggaaatcttgccttccttcaagttagcttcgctttcagaaacaatggtataagtcattttcataccgtttttcacgttcttcagttccaccttatttaaaatctgtacggaatctgttttgagtttggactcatcaatgatttttgcatctgcgatcaccgttttcaatttgttgatgcgcatttccaacataccttgcgcttctttggcggcatcgtattctgcattttccgataagtctcctttatctctggcttcggctattgccgcagagatcttcgggcgttccactgtttccagctctttaagttccgccattagttttttgtaaccttcttctgacatataagccatgatgttttcctcctttaattgttttttatggtcatataaacaaaaaagaattccaacatgagtcatgttggaaccctctttttcattatttctttgcaaagatagacttttaagtgatacgtgtcaagttaaaaaagctgctatgtaacatatttaaatgaaatatgctaatttataacaactttagagtaatgacttgacggcagcttccaaatctttgatatcttcgccgcgaagtttcagttcgttgttgcgattaatcaggaagatggacggtacttggcgtacattatatacagctacattcgtagaatatactccgttgccatcgcgtacgcatacccacggaaggttggcggccgatgttttccaatagtgctcgtccgcgtcgagagatacctggtaaatttccagaccttgcgaagcgtatgtattatatagttcgcgaagcatcaggttatggggagcacctgctggcgactggaacacggagaagtcaagtaatacgactttacctttcaagtcggtcagcttacgtacatttccttttacgtcacgcaacgcgatatctataattcctgtttctacaattttgtcttgcggaatctccaaagcttttgcttgcggctggcgtgtattcttcatgcctttaataacaatgttataaagattcttggagcgtacggcattggggaatgtgttgttgaggctcgtcgctacggctgcaaaacatttcacgtcatctttattattcaacggatcgaatatcagataattgttcagcttctggaacagtgcgaaataggcggctgccgtgttgggagctgcgaagatatagttcactttcacgtcctctttatatttaccgagcaatgttgccagactgtcctcaaagacatcgtgtcctatcttgttgccgcgcagtgcagccaacaggtcatccgcatttttctgaagacggatttgtttcagcgtcagttcttttatcttgttgctgttttccgaaccttctacggtataatcggtggagaagtccatatacggagctttgatctgaaccgtttcgatagagtctacagaaaagttgattactttgtcgtctatccgcagacggtaaaattcgggagactcgggacgagcttgtttaaagctgaatgtaccttcacctttcaatttcactgaatcgagcggaacaataccttccagaccggaagcttccagataaagcattttgccgtcggctcctgatacatccccggttacctggaatttaggaccggaactacaagctgtaatagtaagtgcggcaagtgctgcaaaagttatctttttcatatagcgtgtgttatttacgagttgcaaatatacttcttttcgagattagtcaaagcattttgttgtgttcttctcctaattttgaaaaaaaaatcggtttgcaactaactttttatctcatttccacctgattaccacgataaatgtatatctttgcaggaattttgaaagaaaaagtatagataaaacaatttttatgattaacccaattgttaagacgatcgagttggcggatggaagaaccattacactcgaaacgggaaagttggcaaaacaggcagacggttctgtaatgctacgcatgggcaacaccatgttattagctactgtttgtgccgctaaagatgcagttcccggaacagatttcatgcctttacaggtagagtacaaagaaaaatttgcggcattcggccgtttcccgggtggtttcaccaagcgagaaggtagagcttctgactatgagattctgacatgccgtctcgttgaccgtgctctccgtcctttattccctgataattatcatgcagaggtatatgtgaacatcatcctcttctcggctgatggtgtagatatgccggatgcattggcaggacttgcagcttctgcagcacttgccgtttccgatattccgttcaacggacctatctctgaagtacgtgtggcacgtatcgacggtcagttcgttatcaacccgacttttgaacaactcgaaaaagcagatatggaccttatggttgccgctacttatgagaacatcatgatggtggaaggcgaaatgcaggaagtgtctgaggctgaattgctggaagccatgaaagtggctcacgaagccatcaagattcattgcaaggctcagatggagttgacagaagcggtaggtaagacggtaaaacgtgaatattgtcacgaagtgaacgacgaagaattgcgtaaggcagttcgtgaggcttgttatgacaaggcttacgccgtagcagcttcaggaaataacaataagcacgagcgttttgacgctttcgaagctatccgtgaagagttcaaggctcagttctctgaagaagagttggaagaaaaaggacctctgatcgaccgttactatcatgatgtggaaaaagaagcaatgcgccgttccatccttgacgaaggcaagcgtttggatggccgtaagactactgaaatccgcccgatctggtgtgaggttggcccgttgcccggtcctcacggatccgctatctttactcgtggagagactcagtcattgacttctgttacgctgggtactaagatggacgaaaagattatcgacgatgttctggaacacggaaaagaacgtttcctgttgcattataacttccctcctttctctacaggtgaagcaaaagcacagcgtggtgtaggccgtcgcgaaatcggccacggtcacctggcttggcgtgctttgaaaggacagattcctgctgactatccgtatgtagtacgtgtagtttccgatatcctcgaatctaacggttcttcttctatggcaaccgtatgtgccggtacattggcattgatggatgcaggtgtgaaaatcaagaagccggtatcaggtatcgctatgggactgattaagaatccgggtgaagaaaaatatgccgtattgtccgatatactcggtgatgaggatcatctcggagatatggacttcaaagtgactggaacaaaggatggtatcactgctactcagatggatatcaaggtagacggtctgtcatacgaaattctggaacgtgctttgaatcaggcaaaagaaggtcgtatgcacatcctgaacaagattaccgaaacaattgccgagccgcgtgctgaactgaaagaacacgctccgcgtatcgagacaatgacgattcctaaagaatttatcggtgcagtgatcggtcctggcggtaagattattcaaggtatgcaggaagagacaggtgctgtgattactatcgaggaaattgatggtatgggacgcatcgaggtttcaggaacaaataagaaatgtattgatgatgcaatgcgtatgatcaaagcgatcgttgctgttcccgaagtaggcgaagtgtataaaggtaaagttcgttctatcatgccttatggtgcgtttgtcgaattcttgccgggcaaggacggtttgctgcacatctccgaaattgattggaaacgtcttgagactgtagaagaagccggaattaaggaaggtgatgagattgacgtgaagttgatcgatatcgatccgaaaaccggtaaattcaaactttctagaaaagttttgttgccaagaccggaaaagaagtaaagagcgaatagctttataatagtaaggatagtccgaaaacttagttttcgggctattttttttatacgatgaatagggaataaggagagagaatcgggctaaaaaagagaatcggaaagtacccccatacttcccgattcgaaacagtcaaaaatcgaccttaatcaatttattaacttaacacgttgcaaatatatgagatttttttcttagaaaggactttttactaaaaaaagtttagactgcgaggataatatgcttttccgtttgttgttgcttgagatgtttgtcggctgttataaaggagtgattttacttggtttttaatgtcgcttttcttgtttttcttatattaatttcgtatcttaagaaattttgtttttgcctgtttgggtggtcactttgcaaagtgatgtttgtcattctataaagtgccatttgtcttcttataaggggacattggtcaccttgtaaggtgacgactacccgtgtgcataaaaaggaactgttttgtgcgcgtcaattccttattctctgtgtggagcaaccttacttatatacttgtatcggcaattctccccgtaatgcgccgagtgcattgagggctaatgcttccaattcatcttctccgggatatacatatacgggagcaatgaatgatatgcgttctttcaatcggctgattacataatcggaatgcgcgataccgcctgtcagtagaatggcgtccgtctttccgtagagcacggtagcggcagctcctatctctttggcgatattgtaaatcatggcatccaatatcagtttggcgtgatggtcgcctgcttcaatggaacgtatgacggtggggatgtcggttgttcccagatgggcagccagtccggcacgtccggaaatacgttttttaagttcgtcgttcgtgaaccggccgctgtggcacaagtcaatcaactgcccggcaggcagtgtgccggcacgttcgggggagaaaggcccggagccgtccaatgcattgttggcgtctatcgctcttccgtgccggtggacggctacggaaatccctccacctaaatggcagacaatcagatctaaatcttcatattttgtgcgctgctctttagcgaagcgtcgggcgatggcccgttggttcaatgcgtgccagatagtgattttcggcatgagtggagagcctgtgatacgggcaacgtcttccagctcgtcaacaacgcccggatctgcgatgaaagcccggcaaccgggaagcaagaggctgagttcggaagctatgagacaacccaaattacaagcgtgattgcgcatggcatggatgatatcgtccaacatgacatcgtttacctcatacactccaccgggaatcggtttcaacagtcctccccgtccgatgatcgcatcaaagtcgaaaggtatcttttcggactccagcgctttcagtaccaggttcttgcggaattcaaactgatcgataatacgtggaaatgcggctaactcttctgtcgtatgttttatgttgcggattagcaatggcgtttcattctcataaacggctattttggtggacgtggagccggggttgataactagaatcttcatggatcgtgaggcttaagtgtgatttagatggatgaacttgcaacttgagtgccctgcttcctgcattcacagtctcccgacacttgcaggcatgccatagcgatactgtaatatttggacaatccggagtcactgcgcgaaggaagaaccaccgggcagataggtccttgcaacaatcccgccatctctgctttggcgaagagggaaacggacttgtaaaaagcattccccgattcgatattcgggaaaatcagtacatctgcctgtccgttgatgggggagacgattcctttgatatccccgcttgcctgttcgcaggaagtacgcacgtccaatggtccgtcaataattacattgccgaactcgccggcttcggcaagctctacgatattcacataatccaatgaatgagggaatttggcactgaccttttcggtgcagtgtattaatgagatgcgcggttgttcgatcccgaaatgacggcaggtgcagatagcataccagatcatttcaatgcgttgctgcaatgtaggacgcggaatgacggctgcatccgagaagaaaagcagcttatcgtacgtcggtatctccatgacggcaagatgagtcaggatttttcctttagggagcaagcctttctccttgtcgaggatggcgtgcaacagattgtccgtattgataatccctttcatcaggatatcggctcccccttcgcggacgatacgcaccgcttcacgcgccgcttcgtcggggtcctctatatgaagggttttcacatattcgggatattgcttgagtgtgggatatttctccagaatggctgaatctccgatcatgagaaactccgcaatgccctcttccaaagcgcgggaaatggcgtactccgtattggggtcgttggcacagactacggcgatacgttttctgcggttcagtactttaagatgggctgtcagttgagcgaaatttcgaataggttccataacgttagatttttagcaaatatctgaaaaatcattgaaaaaataacgattccaaaccgaaaagttgcgcttgtgatgtaacattttgctatattttgtttgttttgtcgggtagatgcgcttagaatcgttttttcgtgtatttttgctgaatgaagttacgaaaagagtgtaatttattggaaatgagcgtaggttaattgctcttgatagtaataggtt

SEQ ID NO: 11711 - DNA, 30418 bp, Unknown
  gut microbiota DNA sequence
cttgataagtaaattctaaaataataatgattagataagagagggcgtatcctacacggggtaatccctcttttatggatattagtacgataaaaacaaaactattttagcgtaaatcaagaagaaatctttcttttttcgtatttttgtcccaatatgcacgtttaatccaagtagataacgaacattagggaaaagaatgaaagtaattgatttaatacataacaacaaaaaaacagctttttctttcgaaatcctgccgccactgaaaggaaccggaatagaaaagctatatcagacagtcgatacacttcgggaattcgatccgaagtatattaatatcacgacccaccgcagcgaatacgtgtacaaagatctcggcaacgggctattccaacgaaaccgcttgagaagacgtccgggcactgttgctgtggctgccgccatccaaaataaatataatatcacagtcgttccgcatatcctatgcagtggtttcacacgcgaagagacggaatatgtactgctcgacctacaatttttgaacatcactgatttgttagtgctacgtggcgacaaggcaaaacacgaatctgttttcacccccgaaggcgacggatatcatcacgcaatcgagttgcaggaacaaatcaacaatttcaataagggtatctttgtggacggttcggaaatgaaagtaaccaacagccccttttcttatggtgtggcatgctacccggagaaacatgaagaagctcccaatattgaatccgacctttattggctaaagaaaaaagtggaagcaggcgcagaatatgccgtaacacaattattctacgataacaaaaaatattttgagtttgtagaacaagccaaagcggcaggtatcaatgttccaatcattccgggaatcaagccgttcaagaaactgtcccaactgagcatgattcccaagacattcaaggtggatttgccggaagaactcgtgaaagaggctttgaaatgcaaaacggatgcggaagccgaacaagtgggtatcgaatggtgtgtaacccaatgcaaggaattgatgtctcacggagtaccaagcatccatttctactccattggagcggtggacagtatcaagaaagtagccaaaatcatttattgatatgtttttcagagacgtaatcggacaggaagaagtcaagcaacggctcattcaggaggtgaatgaaggacgcatcccgcacgcccagctcatttgcggcccggaaggggtgggaaaaataccattggccattgcatacgcacgctatatcagttgctccaaccggagtgaaacggatgcctgcggtgtatgtccgtcctgcgtgaagtttaataagctggtacatccggatgtgcattttgtatttccgatcgtaaacaaggcgaaaagtcccaaagtatcggtctgtgccgattttcttccgcaatggagagaacaactgctcacctccccttacttcaacttgaatcattggttgaacaatattggagcggagaataagcaagcacagatattcgctaacgagagtgatgaaattctgaaaaaactcagtctgaaatccagtgagggaggattcaagattacaatcgtgtggctaccggaaaaattgcatccggtgtgtgccaacaaactgttgaaactgcttgaagagccgcccgaaagaactattttcctgctggtatcggaaaagccggacatgatactgcccaccatccaaagccgcacgcaacgcatgaacgtgcggaaaattgacgaggcaagcatcgatcgggtgctacaaacgaagtacagcattcaacctgccgacagcctttccatcgcccatctggcaaatggaaattttatcaaggcactcgaaacgattcatctgaacgaagagaatcaactgttcttcgatttattcgtcagcctgatgcggttgtcctatcaacggaaaatcagggaaatgaaaatgtggagcgaacaggtggcaggcatgggacgcgaacgccaaaagaattttctggaatattgccaacgcatgattcgggaaaacttcatctttaacctgcaccaacgtgatcttacatatatgacgatcagtgaacagaactttgcaacccgcttcgccccgtttgtaaacgaacgtaatgtaatgggaataatggacgagctaagcgaagcgcaaatacatattgaacagaatgtaaacgctaaaatggtattcttcgacttctcgctgaagatgattgtactgttgaagcaataattaatatataaacactatggaatataaacttcataatgggagcggcggtctttgctgcaaaggatgctcccgacaagataaacaactgaacacctacgattggttggcggatataccgggcaatgcggaagagagtgacatggttgaggtacaatttaagaacacccggaagggatattatcgcaacagtaacaaaatcaaacttgaaaagggcgatgtggtggctgttgaagctgctccgggacatgatataggtgtggtgacgctgaccggcagactggttcccctgcaaatgaagaaagcgaacttcaaggcggacacggaaatcaaacgcatctatcggaaagccaaaccggtggatatggaaaagttcaacgaggcgaaaagcaaggaacatggcactatgatccgtgcacgccagattgcgttaagtctcaatctgaacatgaaaatcggagatgtagagtaccagggagacggcaataaggctatcttctattacattgccgatgagcgcgtggacttccgccaattgatcaaggtattggctgaagcattccgcgtacgtatcgagatgaaacagatcggtgcccgtcaggaagcgggacgtatcggaggcatcggcccttgcggacgtgagctttgctgtgcgacgtggatgaccagctttgtatccgtatctacaagtgccgcacgttatcaggatatttccctgaatccgcaaaagcttgccggacaatgtgccaagctgaaatgttgcctgaactatgaagtagattgctacgtggaagctcaaaaacgtcttccgtccaaagagatagaactggaaacgaaggatggtactttctatttcttcaaagcggatatcttgagcaatcagatctcttattccacagacaagaatttcccggcaaatctagttaccatcagcgggaagcgtgcttttgaagtgatttcgatgaatagaaaaggtatgaaaccggacagtctgttcgaagaagaaagaaagccagaactgaagaaaccgattgatttgctggaacaggaaagcgttacccgctttgaccgtaaccgcaataaagagggtggcaataatgcgaaccggaataataagaagaagaaaaaaggagctaataacgacaaccgtcctcaatcggctgaaaacgctaacagaggagaaagagagaaccgaccgagaaataataataatcggaacagaggacagaatcagggacggaataatgaaaacagacgaccggaaagagggatgaatcaagaaaggccacaagctcaagaaaggccggaaaagccagaaagaccggtcaaagagccgaataaagagaaaccgaaaccgcaaaccaataatgaaaagcctgttcaggaatagtttattttgccttttcactgcttgcctaacggcggcatgcaacgagaataccgtgtatcactcttatcaatcccttcccgacaacgggtggggaaagagtgatacactctccttttttgttcctattacagacagtctccctccgactttgaggctatttgcggaagtccgtaaccgtacggattatccttatcaggaccttcatttatttatcagtcagaatctacaggattccactgtgtggcgcaccgataccatcgctattcacctaactgactctacaggaagatggttcggcaaaggttggggcagtgtctatcagtcggagactttcatacgctcggttcgcccgctacatccaggaaactacacttttaaggtagtatccggtatgaaagacgacatattgcaggggataaatgatgtggggatacggatatcacggtaagcagaaaataagcactcctcacatcctcgtaacattttattagcttccgtattctacaaagccgggtttatagaaacgtggggacgtggtattagcaaaatatgtaacgcttttaaagcgataggaatagaagaacccgtctttaagcaatcagagggcggtatgctagttacgttcaaaagaaattaccctacaatgacaaatgagaaatcacatagtagaacgaatgaccctaaatgacccaataaaattatcatcagttgacataaatgtattacatatattatctacgaatacaaaatcaacctacaatactcttgctgaagccttgtcatcatcaagtgctacagcgaaacgatcattgcagaatttaaaagcttatggatacataacccgtcaagggtccaacaaagcaggttattggcaactcaccgagaaaggaaagatttttataattaaagaacaaaaactataaaatacataagctgggcattgacgggtgaagggacgactattcgcctgcttcttcaccctaccttcgccgtaaacgttattcgaaagataaacaatttgttagagtcttctactccgtcccgcatcaatgcgtaggaaagtgaacaacagtatcgtaaagccccataaagaagaacctccgtagctaaagaaaggtaatgggataccgatgaccggagtaagccccagtaccatgcctatattaataaataggtgaaacaggaaaatgctgaggactgaatagccataaacccgaccgaaggtagagggttgacgctccgacaagaaaatcaagcggaaaatcaagaccaggaaagctatcaagacggctgccgaaccaacaaaaccttgttcctctcccaccgtacagaagatgaaatcagtatcctgttcgggaacatatttcagtttggtctgcgtaccattcaggaaacctttccctgtcaatccaccggaaccgatggcaatcttggattggttgacgttgtatcccgcaccggtcaaatcttcttccaagcccaatactactttgatacggacttgttgatggggctccaatacgctatcgaatacataattgctggaatataaaaatccgatagagccgatggtaaataaagcaattagaaagtaagcacgctgacgctcacttaatgctaaataaatcaaataacctatcgcaacagcacacagtccccactgcacccagaccagactaaagtgtacccaatattccgatatcaaataggcaatcagcaatatccccagacttccaccgataatattgcgggcagctacccacttcttacgatatacccacaccatgccgccggcaaacaataaaatcagcagcaatacaataaactctcccaacggcgtaggggtatccgctataaagacctcgtcaaaacgaataccgaccacaaagtagattaccgcacagacacctgcaaaaagcactactcccggcattccttcacggtaaagaaccaaaaagaaagcaagatataccaatgcagaccctgtttccctctgcccgataatcaataacatcggcaaaagaataatcagtcccaaaactaaagcacacttttccttcttgatactgaacgaataagcattcatatatttagccaacgccaaagccgtagcaaacttggcgaactcggcaggttgcagactgaccggccccatcaccagccaagaacgggaacctttcgtatccggagcaataaagattgtgacaatcaacaaaagaatcatccctatatatataatgtacgcgaacatatcgtacatccggtcttccaacatcagcaacacgaatcccagtccgaaagaacagataatccaaacgaactgcttaccggcacgagtcgagaaatcaagaaaatcacgatcaccatagtcatagctggctccgcacacgctgaaccatcccccaataatcaggagcaggtagatacaaatcgttacccagtccaaagatttccataaactatcgctcctcgttaccatacaatatcactctgttactaatttcttccgcccttatctcattttccggcgacaatttacctttcatatattgttccatcatcaaagcaccgaccggcactccgtatgtagcgccccatcccccattctccacatagacggctattgctattttcggtttattcattggcgcaaagcccataaacaccgaatggtcatgcccgcgattctgtgccgtacctgtttttccgcaagcttccaattccggaaccatcattgacaacatacgacaagttcctcccgtagcggcagcacgcataccttccaccaccgattcataatgtcttttttcaatcgtggtataacgaggagtgcgataaagactgtctatccggttatcttgaatttctttcacaatatgaggtgtgacaaaatatcctctattggcaatcgtcgctcccaaattggctatctgaagaggggtagtcagaatttctccctggccgatggaaatactgatcaccgtcaatccgttccaatgtccgcgataagccttatcatagaactgcgcattcggaatcaagccccgtttttctcccggcaaatcgactcccagtttataaccgaacccttgcgaaaccatgtgatctttccatacggtaatagcattttgcggtgagccatatttacgatcaccgaacatacggaacagtccccagcaaaaataagagttgcacgatgtagcaatggcgggtatcagcggaatcggtgccccatgactatgacaacccaccgtcaacctgccgtaatggaatccgtgcgaacagggaaaagccggactttgctctgtaacaataccttcttgcaagaaagtcagcccttgtgctgttttgaaagtagagcccggaggatagactcccatcaaagcacggttcaacaatggtttcatcttgtcgcgttgcaacatcagatgattcttaccacgctgacgaccgatcatcaaatgcggatcgtagttcggggaagataccagacaaaggatttcgccggtttccggctcgatagctacaatactgccaatcttgttcttcagcaggcgttcgcctaaaatctgcaaatcaatatccagactcaatgtcaggttcttgccgggaacagagggacggtcgtaggccccatccatatagtgtccctgaatacggccatgtgcatcacgaagcaggatttcaatacctttttctccacgcaaatacttctcatacgatttctccacacccaactttccgacataatcaccgcgaatgtagtatccgtcttcatccgcttccatctctttggcagacacctctccaatgtcgcctaacgcatgggcagccgcattgtaagaatattgacggatagtacgccgttggatataaaagccacgaaacttaaacagcttttcctgaaagacaccacattcttccgccgaaagttgcgacataaacaactggttggtatagcgggaataacccggattgcggcgacggtctttcatatcgctcataatcttcaagaattgggcacgggtaatattcaacgactggcacaagtcgagcgtatctagattctcgacttccttcggaacaatcgaaatgtcgtatgcaggctgattgaataccaacaatttcccggtccggtcgtaaatcgctccacgcgaaggatattggattttattcagaaaagcattactgtcagcattcttcttatagtcatctgttgtgatctgcaatacgaaaagccgtaccagataaatcaagacaatagacagggcaatgcctccgataacaaatttacgtttctctaatctataatcttttgccatttttacttccttatgccttcaacagctacaatacaggttacagtcagaatggtgcaaagtaacacccgcagcagcaacagccaaatgctggaaaacgagaagaactcaatggagagtaacgccagactatgtacaaaaacacttgcagtcgtatatttaagaaaaggagtaatccctatcgtcttgaaagatgggatgaagctatccagattatcgcgaggtgtgaacagtcgcagtaaagaaggacggagaaaagcaagcagcaccgttgcagccgcattcattcccggagtatcagcaaatacgtcgatagtcagtccgaaaaagaaagcccacaacatcaactcattccgcgaagtgccggagtcaaactttaggataaaataaatatagagaaaaggagtggcataacccgctatatggacattattcaggataagcacttgaagaagcactaagccgataaaccatccgattctatgtatataggtgataatcattcttttgttaccttattttcaagtttcttctgctcttcctgcccattccgggctatcacacggacatcaccgagctttccgaagtcggtagccagcttgattttcagcaggtaggacaacccgtcattagagtcggacatatcatccaccgtacctaccataataccttccgggaatacggtcgagaatccgctggtcactacggtatcgcccaaattgaattccgcatgacggggcaggtctttcagataagcgtaacgcgaatctccacgttcccatttcagatagccgaaataatcactgccgataatcttgcaacttatattggacttgctgttcagtacagaaatcaccaccgaataagatggagaagtttcatacacgatacctacaattccgttaccgtctatcactcccatctcagagcgaatgccggaggaagaacctttgtcgagcgtgatatagttatcgggcagtgtcagactgttttttatcacatgagccttgaacagctgatagtcactttgaggcatctgccggacactgttaatggtgatagagtccacctggcgttctttcaacgctttctccagattggagatctgctgttcgagcaacatattccggtccagtaaatcctcattgaccgatttcaaatgaaagtaagaggaaatgcctcccgacacatcataaaccgcccccacaaccgtattggcagaagtgaaaaaagcactctgctgataacggttgaaccgaaataacaaaacaaaactggctacctctaataagataaagaggaaccagtaattgtatttcagaaggaagtttattaaattccgcatccctgagttatctcattaaaaaagagaaacgatctacattctttaatgcaactcccgtgcctttagctacagcgtgcaaaggatcttctgcaatgtggaaaggaatattgattttatcagtcagtcgcttatccaacccacgaagcaatgcgccaccaccggaaagatagataccgttgtgcacaatatcagcataaagttcaggaggtgtactttccaacgcactcaagatagctgtttctattttcgagattgatttttccagacagtgagccacttcctgatagcatacaggcacctccatcggaagagccgtgatacggttaggaccgtgaacgatataatcttccggagctccttcacccaattcggttaaggcagcgcccacatttatcttgatacgttccgccatacgttcgctgactttcacgttatgctgacggctcatgtattcacggatgtcttccgtcagatcatcacccgccacacggatggagttgttggaaacaatacctcccaaagagataacggcaatttccgtagaaccaccacctatgtccacaatcatattcccttccggagcctctacatcaatgccgataccaatagccgcagccatcggttcgaagatcagatagacatcccgtccgccggcatgttcggcagagtcacgaacggcacggagttcaacttccgtactacccgaaggaacaccgatcaccatacgaagagagggtgagaataagtgattgcgtgtattcacccgcttaatcaaaccgcgcatcatctgctcgcaagcgtagaagtcggcaatcacaccatctctcaacggacggatagtgcgtatattttcgtgggtcttttcgtgcatcaatttcgccttttcccccacggcaatcatcttatccgtacgacggtccaaagccacaaccgaaggctcatccaccacgattttcccgttcgtgatgatgatggtattggctgtacccaagtccatcgctatttcttgtgtaaaagagaacaatcccattcttaattattattttagtgtttaaaatgacggataccggtagtaaccatcgccatgccatgctcattgcaataagcaaaagacaaatcatcttttaccgagccgcccggttggattactgccgtaataccttccttatccgcaatttccacacaatcggggaaagggaagaaggcatccgaagccatcaccgcgccattcaagtcgaatccgaatgacttagctttttcaattgcttgtttcaatgcatctacacgtgaggtctgtccgacaccgcttgcgagaagctgcttgccttttgccaatacaatagcgtttgacttactgttcttcacaatcttgttagcaaacaacatatcttccacctcttccggagtaggagccttgtctgttacggttttgaggtcggctaccgtttcaatgttagtatctttatcctgcaccaatacaccattcagcaaagcacggaattgcttcttcggcaatttggcttccttgcgaacgaggatgatgcggttctttttctgtccaaggatttcgagtgcgtccacatcataatccggtgcgataatcacttcaaagaaaatcttgttgatttcttcggctgtttctttgtcaacaaccccatttgtaatcaacacgcctccgaaagcggaaacaggatcaccggccaatgcatctttccatgcatccagcatagtagaccgtgaagctagaccgcaagcgttattatgtttcagaatagcgaaagtgaggtcgtcaaattcatcaatcaaatcaacggcagcgttgatatcgagaagattattataagagatttcctttccgtgaatttggtcgaacatcgcttccagatttccgtagaaatagcccttctgatgcgggttctcaccataacgaagttgtttttggctatttaccgagcaacggaaagcagaaccttcgcctgcatcaaaataattgaagatcgctgaatcatagtgggaagaaacggcaaacgcttcttttgccatccaacgacgttcttcgagtgaggaagtggcaccgtgctccatcaacatgtccaacaacggtttgtattgagcctgagaagcaacgataattacatcgttgtagttcttggctgcggcacgaatcagagagattccgcctatatcgattttctcaataatatctgcttcggatgcaccggaagctacagtagcttcaaacggatacaggtcaacaatgactaaatctatttcagggatttcatacttttcaatctgttgcagatcttgctccaacccgcgacgacaaagaatacctccgaatattttcggatgtaatgtctttacccgaccaccgagaatagaagggtaagtggtcaaatcttccactgccttacaaggatatcccaatgattcaataaactgacgagttcctcctgttgacaagaactctactccttcttcatgaagtttggtaataatttcatccaaaccttctttgtggtatacagataccaatgcagtttttattcttttagactctgacattgaattgcttattaagtatttggtgtgcaaagttacgaaatattgtttatcgtacgtaataaataaggtgtgaattaataaaaaaaagcgttgactctcccaaacagaaaatcaacgcttcttcgcaaagtatatttttgttcaaaaactattaccagatggacacccgtttgtctttagccacgaacataggatcctgctcagtaatattgaatgcttcgtaccagtttccaatatgaggaagtgcaccgtctacacgccacttgcctaatgagtgaggatcgagttttgtcaatcggagaatttcttccggacggatatttcctgcccatacattagcataagcaaggaagaaacgttgttcgggagtaaatccgtctactgtttcaagcggtgcattagctgtcgcgttcttgaaagcctggaaagaaacttgcagaccgccatgatcggcaatattttcacccaaagtcaactgaccgttagcatgcacaccaggagctacttcaatactgtcaaaaaagttcaccattacttgggcacgttccttgaacttttcagcatcctcttccgtccaccactctttcaggtttccgtctttgtcatattgacgtccttgatcatcgaatccatgtgtcatctcatgcccgataacgactccgatagcaccgtaattcattgcatcatcggcgttcatatcgaagaatggcggctgcaggatagctgcagggaagcagatctcattggtagtaggattgtaataagcattaacagtctgcggtgtcatcaaccattcatccttatctaccggctgaccggctttggcaatcatttcattgtaatcccattgactggcacgctcgatattcgcccaataagaatcattcttaatctccaaagccgaataatctttccacttgtccggataaccgatctttacatgaaaagcatccagtttctccaatgctttcaccttagtcggttcgctcatccattccagcgccttgatacgttcgcccaaagaagtttgcagattcttcactaaggtaaccatacgctcttttgcagcagccgaaaagtatttttctacatacatctgtcctaccacttcaccgagaacagcgtctaccgtacttaccgaacgcttccaacgaggctgcatttctttcttgccggacatcgtcctactataaaaatcgaagttctgagcttcaaagtcatcgctaagatatgaagcggcagcatctatcaagccccattgcaagtacaatttctgatcgtccaatgatacagtgttaatcacatcggcaacttctttcatagcggcaggctgacctatgttcacttccttcaggtctttcaaacctgaaacagcgaaataagtatcccagtcgaaagtcgggatgttctttttcagcgtttccatatccatcttattataattggcatgaggatcacgcaattccacttgtgaacgggccgctttagccaaacgggtttcaatgttcattacagcttttaccgctttctgtgcagtagcctcatcataacctgccaaccggaacatcttggcgatgtgttcctgatatttgttacggatgttggtagtctgttcgtcttcttccagataataatcgcgttgtcccattccgataccaccctgataggtctgtactatattcatcgaactgttcatatcatccgcaccgacaaacatcgtaaagtaaggccgtatacctttcttctgactttcggcaatgtatgcgtagatttcgttcttgtctttcagcgcatcgatagcggccaattcgtctttaatcggagctactccctcctggttcaacttcacactgtccattgcgatgttgtaaaggtcgccaactttctgagcagcgcttcccggagcattgtccgtctttgcggccagttcggcaatcagggatttcaattgttcacggctgttctcacgcaacatatcgaatgttccgaaacgggaatattcgtcagtcaacgggtgatctttcacccaaccgccacacgcatattgataaaaacttgtacccggcacagccgtggtatccagattagcaaggtcgataccggacgtcagtacggcctctttcttactgttacatcctgttgtcataaggcataccgcaagaattggtaaatacttggttactttcatactcaatataatatattatagaattatcatgttatgcgaaggaaggccctagcctttcacttcttccagttccatcgacacccgttcccactcttcaacgattgtgtccaactgttgtttcagtttctgatggcgttcatatagctgcatatccgaagccccttccggagtcgccatcttctcttccacaatggcaatcgcggcttccgtctcttctatcgaggcttcacagtccgctacctgacgttcgagtttcttaatcttcttattcaactctttctgtgcctcataagaaagtttgttttccgaaggttgcacagcttcctgttctccatttcctttggctgttgccgtaggagaagcagacaatccggcgcctttttgaagttcattcaggctatctatctttttcttttgcagaaattcataaatacctccgagatgctctttcaccattcctccaccgaactcatatactttagtcgcaagtccgtccaaaaaatcacggtcgtgactgacaagaatgactgtgccgtcaaattcacggatcgcttctttcaacacatcctttgaacgcatatccaagtgattggtcggttcgtcaagaatcaggaagtttacaggttcaagaagaagtttgatcattgccaatcgggtacgttctccaccggaaaggactttgactttcttgtccgaagcttcgccgccaaacatgaaggcacccaaaatatcccgtatcttcaaacggatatctcctgttgctacccggtctatggtatcaaacaccgtcagattttcatccaacatctgtgcctgattctgtgcaaaataaccgatctgaacattatgaccgatggtcagtttgccgtcaaagtcaatctcacccattatacatttcaccaatgtagatttaccttcaccgttcttaccgacaaaagctactttctctccccgattgatagtgaggtttacatcatgaaaaacaacatgattaccatacgctttgcgcacgtcttcgcaaatcaccggatagtttccgctacggctggcaggaggaaatttcaagcgaagcgaggagttgtcttcttcatccacttcaatacgctctatcttttccaattgcttgatgcggctttgtacctgcacagctttagttgctttatagcggaagcgttcaatgaaatcttccgtatcctgtatctgtttctgttgattctcgtaagcgcggagctgctgttcgcgacgttccttgcgcaagacaacaaattcgtcatacttcactttgtaatcataaatctgtccacaggtaatttcgatagtacgtgtggttacgttgttcaagaaagcgcggtcatggctgactagtacgacagcattggcacgaattgccaggaaattttccagccattggatactttcgatatcaagatgattggtcggctcgtcgagcagcagcacatccggacggcgcaacaacaattttgccaattcgatacgcatacgccaaccaccggaaaactctgaagtaggacgatcaaaatcctcacggctgaatcccagtccgagaagtgtccgttcgatttccgcctgatagttcgtgccccccatcattaggaagcggtcgttctcatgcgtgaaacggtctatcaactgatggtattcttccgaatcatagtctgtccgttcagccagttcctgattcattcgttccaacttcgcctgaagttcaaaaatatgttcgaatgcctgttctgcttctcccatcaccgtccggttgtcggaaagaatcatgacctgaggcaaatatccgatagttacatctttcggagtagctacaactccatgtgtcggcgattgtaaacctgccaatatcttcaacatggtcgatttgcccgcaccattcttgccgactaacgcaatgcggtctttcttattgataacataactgacatcctcaaaaaggggtgtcgcattaaattctactgataatccttctactgaaatcacttctgtctctgatttataagattttggactgcaaagataatgaataattattgtataaatgtcagtatcatccgttatcaaaaacaaaaaagcagccattctgaacgaatgactgcttcctatcttaatctaagtccctctttagaacaatttagcaggatattcaccggcatctaccaatgcctgaatcttgtctactacgctttggcgatcttccggataagtaacaccgaaccatttgctagtagtatccaacacttcaacagtagcggttccgtcattaatcaatttatccaccatcaatggaatgaagaattcgctcttcagattttccatgttcttcggatcgctcaggaaagttttaaagaactcctcgctgtaagcgaagtaatcgggagtgaaaccccagaaattcatacttaccggagttgtgtcgggggtagcagtccattcaccattatcatcgatatatttcacttcaccgtccaagcgttggatcttcgtacgttctacaacagaagtcagcaatcctttcgcatctgtgctacagattccacgagataccgtaccgctttcgctcaaggtatttcctacgcggaagcctaccattgaataaacatttttcgaaccttcgggaagagcagccagatatttacccatcacctggaaagaatcgcgaccatagaagtcatcacagttaattaccgcaaacggttctttaatcacatcggcacccatcattaccgcatggttagtaccccagggttttgtacggtctgccggacaagtaaaaccttcgggaagagcatccaacgcttgaaatacaagctcgcaaggaatatgaccttcatatttggaaataattttctcacggaaatcctgttcaaagtctttgcggattacaaatacaagtttgccgaatccggcattaatagcgtcatagattgaataatccataatagtttcgccattaggccccagaccgtccaattgtttcaagcctccatagcggctgcccataccggctgccaataagaataaagttggtttcataaattgtgtaatattaaaaggttagtgatgtcaacggcatcagatttcgttgcaaaagtacaaaaatagttgaatccgacaggacaattatcaatcattatttaccaaaatcatacaaaaatcattcattagaagggataaccgatagcaaaatgtattcccaaatttttcataaaagctccggtaacattgtaatacccacttctatccgtatcgtaaggcagatgcaaaggtacaccgaaatcgagacggaacacaagaatatccatatcataacggaaaccgacacctgtacccaaagcaatctgtttcgggaaagtcttcagttcgagttgtgaattcggacgagcctcatctttacgcatcagccagacatttcccgcatccaggaaagtggccccccaaatacttttataaatacggaaacgatattccacatttgcctcaaagcggaatgtacctgtctgatcgaggtaagaataacgactttccgccggatgatatccaccgggacctatgctacgcaccgtaaaagcacggatactgttagcacctccgacataaaactgttcgctataaggagctatcgtagcatttccataagagaaaagtgctcccaatgccacacgggacgctattctgttattcttatcaatattccataaatgacggaattccgtattcaacttcacgaattgtgcaaaaggaacattcagcaatcgtttattttctttattaaaaggctgaccgaaagcacgatagatcactgaggtcagatttccggcagaagtcactgtagattgccaccagataggattctttattctccgcgtcgaagcattgtcatacgtatacgtgtattccataacaggaataaactggtctttcaaactgatatacaatgccggattctcctgagcgatctccttaaactcttccgactgatgttgcaggacgttgaatgtcaatttgaaaggagtgatactatgacggcttatacgtgtcggctggaaatcatatgtcgcatttccaccgaatgacaacaatttataatatctcgcacggttcaactgatcgatatacaaccggaaagttgtggttgccggaaagtcaaattccattttgccccaacgtgggaacaccactctgggaaaagtcagtgatgtggaaagtcccatctcccaactgttcatcaaagaacttttctctccacctccagtctgccactcataagagcctttaagctttacattccagctttctccaccaccgaaaacgttgttacgggtaacaccaaaagcagcaccgggaccggtctgatcgttgctcttagttactacgttcaactccaactcggcatccagtggcttggcaaaagtggcttgtacactcacattcagcgtatcacaaactgctgtcgtgtccttaggagcatattgtatatccaaatagctgaatatacccaactggcttaacttttcctgaacctgctcttgcctgtattgactgtaaagcctagtacgattggaagcacgcatctgtgcattacgtacaaactgttgataattcaaccaacgataaagcatattgggacgaacctgcaacttcttataatagtgaatattcaggttcttatacatcatgctgtcattcggggattctccattctttccaaacagataaacagagccattgcctacataataaggacgttgcgcagcagcaggcaaaccgggtacgggaatcatccggaggctgatatgcccgccgggcactaaagtggtatccgcctgataagtcatatagtcgggacggaaatagaagtatccccggttacgcaacaacgtactgatacgtgtacgctcgtcatccagatccacaacattgaattgttctccgggacttatataggaatacctgcgtccccgctccataatccgcaatgtctgcggagtgaaacgctcataatacaccgtatctatgaaatagggattcttcatatccaccgtgtaaagaataccggctttcaagctatccttcttatccgccaatgtttcgtaagttacttttccattgaaatagccataatcatgcaacagattggtggcgactttgatgcgcacctccggattgacagtagaaataaaaacaggaggattggctgcaaaacggttgaacatccatttcccgaatcctttcttgtacttcacaaaatcattgtacatccacatcttaaaaggaatgggcagaaacagaattttcgtactcggagccttgtcaagcgccgcttctatctcggtcaatgccgtctgacctaccaaagtgttcgatttattctgaataaccgttttattcccggtatagagtatttcgtcttcgggcaaatgcttcgtcaccgaacaccccgaaaacaacatgataccaatcagacagcctgttaatatgttactatatattcctttcattcttacttctttttcttaaagatgaacagttcactgagtttatccagtttcttgcgaagtaccagaccgactccggtctccgtaatctcgccttcgagcacactctcatagttcttatcgtaaaacagacggacatagcgggttcctgtcctatccagacggtattccaaagagatattgtcgataaatgactcggcattattcgtcgcattctcacccgtagataccttaccgccaataacgatctggaaccggttattgaagagacgttgcgagtaacggaagctgtaatccgtacgcttaccaccagtatctgaaagatcatgatcttcgatacccaccgagacacttgcattcttcaaattgcccatcaacgagttaatctgactactcaacacggaattcaaggcagaccccatattcagcttgcctactccaccacctccaccgccaatcggtccggtaccgagataggttttcatcaccatgatataaagcgcctgcttgccacgttcttccgcccccatagctgtaagttcattttgtatggtcgcgtcttcgggagccgacacatcaaatgcaaacgaaagatcatccaaccggttcttgattacaatggaaacatcgaaattaaccgtacgtgttccaccattctctccttcggatacggaagcgcggatacggtcggtcgccttaaagttcaacatcgggtccatcggattgcctgtccattctacgtaactgccgttatctatggcaaactctttggctgcaatcaccggcaaagcatatttcatcaaaccaccgctcaaggtataacgtcctgtcagggtcaagtcaccctgcggagtatatttcatggaaaggtcacctcccccttccagttcgatacgattgtcattgctcgcatccaaatctactttcaaacggacggaaggatcaatatgaaccatcataaccatgtccagaccgcctaaagaaactgtcggcacttcctgacggacaacggtagtagtatcgctaaacgaagtaaaagtgaccaaactacccagacgatcctgtactgtcaacggtgagtctgtcagtatatacgaaacatctgtattacccagcagactgatgtttccccgcatattcaatccatccaaaggtccctttactgttgcacggaaatcggcaaatacctttccataaaccaaactttcacgggtacgcttagcatccagaagtgtataattctgcgcaagcatattcagatttgccatcggacgactcatatcgcggaaatctacatagccatcaatcgtaaacggatttttcgatgtagtgtaaattgcgaatttatcaaataacagacggttattatttatctgcaccggacgattatcgaacataaaacgagcaccatactgtcgggaaagaacagctacactatccaatgacagttctccgttaatcagaggttgttcggtactgcccgttattttcagattaccatccaaatcgcccgataaagtaaccatctgatcgggaacaaacacattagctacccgaagcgggaaatgatccagctccatattcacctccaagctgtctttccccgtcccggtaggtatcaacttaccatccgccagcaatacttccgcttggtcgtgattcaagtacgcattcagatactgctttccctgctcgcccggtagccatgtagcccctagcgtaacatctccaatacgttgccgttcgtatattaactcatcgatagacaactccgcagacagttgaaggtccttttccgtctgtacataatgagcttccgcagagaacagtccggttatctccgggaaatagggaagtacactgctaagctccgctaaacgaattctccggatttcaacatcgatattctgtaaagacacggtatctcccggaacggaatgaatacggaaacccatcccttcatcatcccacatatccacattggcatatacacgcatattcttgtgcagatagatccagttatgcttctcattgaaatggaatttctggaaagcgataatcgggttttccgggattaaggtaaaagcaataccgttgccttttccgtgtccttcaaataaaggacgggcgttgacacccaacagtacgcctgtttctcctttttcgtttttataatcgaccagcaactccgcatcccggtcacgaatttctcccgtaatagcagtcgagaaagagaactgcggattcttcggtccgttaatcactccggcacgcagcttcatggaggtagtatcttgcttgacagtaaagaatatggtatccagttgcaaagtatcgaccttcaatgtatgaatggctgccttaccattaataccccagtccggagcggttccaaacttcatggatgcatcctgataggatatgttctgagtagccaggaaataggctaacggattctctttacctgcagagaaagagagtatagcagtgggcaaggcttcacgcaattcggcatggtccaatgctttttcatcaatttgtctcatcagcacatccacaaaatgagtagactgccgaatcaacggttccaccccagaacgtgcactcaagttgagtttcatatctccggacaccaaatgggtaaacacccgattctggcgggcttccgcagaaaagttaaaagcaagcggatgcttcatcggctgcggcattaatcccaactcatgcaaatccaattgagtgacatccattgtcacttttccatcgggataactgtgtgccaagttatattcggcctcagtcgtcatcttcagcaaaacattgtcactggtcagacgggctgttaccaatgcccctttcaaagctccagtcaaattaacattcgagagatgatattgggcataatgaagctgatctaacgacagattcaatttggcaaaagaacgataggacgtcacatccagtcctcgcccttcagcgtcagccgaaagtgaaagttcataaattgaatctttcggtaggaaattatgcagttgaaggttgtttatttttaagtctgccttgtagacctcggtgagcgtattcaatgccgcgtctatatctatagtaccctgtccttctctcagtttcaaattggccttatatgcaggaccgtttatatcaaccttcgcaaccaggtccatactatcgggaattacaatagtcccattgggagcctcaccggacaaagcagtcaggaagttcagattctgggtagtcatcttcaacccgaccgttcccgagcgcgtgatactgtccgccagattttcaagaagcccaccaccctctaaagaaaatgctcccggcaaatctaccgtaaagcgcgaaatctgcatctctttcagattaccgtccgtacccgcacgaataacaagaggacggaaaggataggcttctttgaaactatccggcagcccacccgtaaacagcataacatcctctttaccgatgtatgcgttgagattggcggacaaacgtcccgtagtagggatgttgacaagttcccaatacgtatgggcagacaaatcaatttcagaatgaggagtctgcagctttaagcccggaacacaaataattgaatcattagaataaaccctgcccgccaacgaggtaatgctcagtcccgaacgttcattcattgaaaattcacggagcacggcattcatattcctacctttatataataaggagtccaaaccgatccggatatcacggaccgcaatatgagaagcatcgaagccttcgaccggtttagcagctccggtatcataattggcagagcctcccgacaacaggaattgtttcaagctataaaactgattcttcagatccgcttgcgcatcatttacagacgcttcgccgatgtaggctgccatacgcatggaatcagccggaagctgcatactgaatgacacatttcccaaattcaactgatgaaggtctactttccaattgacaggagcggaagcggtcgtgtctttaggagcggtcgtggtgtcgttcattaccaattggacatgggtgtctgataaatcgacctgattaataatcgctatttcattggataaatccaccccatgactctgcagaaagaaacgtcccaagacaccttttatcttcattccctctatcagacctgcggaattgactgcaacctgatttagtgtaacttcatcgacttctacttttcctttgataagtggccacgcctgcacccgcacattcaagctctctaaagacaacaaagtatccggctgttgaatgacttctacaccacgaactaacagattgagcggaaaacgaaggtcaatccgttccacctgaatctgcataccggttgcttcagaagcgtatgcggtcacttcccggcgtaaaagattttgtacgggaggaatataaagtaataccatcagtattacaaagagtattattggagtaagcaatatccagcttacccatcgtatccattttcgtttcatgcaaagcgtgtcagtgtaaattgaagacacaaagtaaacaaattattttgagaaaaggtttggataacgataagaaagatactcttttgcctcactaattatatgcggaaccgttgccagcactgtaagtgttgtttgctttatctcgtcaacgaacatctctccacgacaactttccaaatattttaaaggagcaattgtttcggatgcgccaatcagtgtgaaaagcggaagaagtttatgagccatagcagctattccgtccgtatcttcattgtctaaggcttgttgtactatatcaatatttttctcagtttcttcgatgaaagtctcaataatggaacacgccgcctccgggtcgtcctccgaataaactgtcaatgcggagaaattcatcaatccgctccccatatcttctgtgatatgcgcctcatccgcaaccaattgtccttcattgatcgtctgcaacaattcctttaccgtaaatggtttatgcagacatccggcaaatccatgttcgtacaacgccgccttatccatctcactacgagcagtaacagcaatcacggggatcgtttttgcctgtggaatattggaagcacgaagtagtttcaccaaatcaaaaccattgatggccggcatttgtatatcggtcagtaatacatcaaaaacagaagtgcgaagttgttctataagttcctccaattgctcgcaacaaacagcatcaatgccgtgctgtttcagcatagctgccgtcaagctgagttggattttatcgtcatcaatcaaaagaacacggatcaccttcatcggaagaatggtagctggctcttggatagattcccctttatcactttccgagagttcaccctccgttaccgatttccccaccggataaagaggaagaatcaccgtaaagcaacttccttctcccggtgtgctttgcacatcaatttctccttcgagtaaagttaccagtttcttcacgatggacaatccgagcccgaacccctcttcaccttgtgcaccggacaaacgagtaaattcctgaaagatgcgttcccggtctgacggagccatcccttttccggtatctgcgatggctattgtcaactttgaagagtcgtatgtagccgtcaatgttatcttacctttttgagtgaacttaacggcattggataaaaggttgttcacaatctgacggagacgcaaagggtcactaataaatctcccattcaaatcggaagcgacattactttgtaaagtcaatcctttggcggcagtcaaaggctcaaaactaatataaatttcatcaaatagctgcgaaggattaaaggtgacgcgattcacctccgctttattaaggtcgagccgatgaaaatcgagcaggtcactgactaacttcaagagatgttccgaagaactcttcatattttcaagatagaaacgctgccgttcatcccgagtcaaccgggatagcagttcggtataccccataatagagcctaacggcgctttaaagtcatgagtaatggcaagcattaacttttcacgggcgacaagcaaatcctccgcccgcttgttggcttcctccagttgtcgacgatagcggttgctccgagatatatcgcgtatgatcaatatcaagaaaaaggcagacagaaacaccgccccaatagcgattcccgaaatagtacgtgccgaacgcatccttactgcttgttgctgctccgcatcctggagtgcacgctgagtcatttcttcctcataaccctttatcaagctatccattcttgcagtcaactgtgtattcatccgctgatacttcgtactggtacgccggatggtctttttccgttgcaaacgtttttcctccgtagccatacggattttttgctgcaaggaatccttagaagtggcaggttccagaatcgtatccgtagctacctccaaagaagtgttgacaagtacggcactatcctgtttggaagggacaaatacttccgctaacctcttgaagaaacctttcttcttcggagcagtcagcagagaatcgcgtttggttatgacacgatgttgtacccgttggtaggtaatgacggaatcctgttcggaaataatttccttaatctccgatgcagaaagaaggctatcgttcgcttcgctcagcactcgtaacatttgaattgtattccggtctttctcatggagaagggccaacaagctatccgtacgcaaattctgctggttgtccgcagccgataacgcttccatctcacgatgcacaaacaccaacgagaaaagaagaatagccaatagcaaagtgtaaccaatggttattttgagttttgtagaacggtaggaagccataggaacaacgaattacaagttattgtcggagggcaggctgtttcgtcatgtagtggaaacgccaccaaagcatcagccctgcacttgtcagtccaaaagggaacgccatccatacgcctacaacaccccatcccatcacgaaaccgcaaaaatagcctacgggcaacgagataatgaaataagcgataaaagcgatgaccatcatcagttttacgtctgcaattccacgcaaagcgttggcaaaagtgatctgcaagccgtcgccaaactggtagataaggaaaggaaatattaacgaagtaaccatagcggcaacttcagaactgtcggtaaaccaacctcccagataattccgacaaagaaaaacaatgaaagacaacacgacacccaatgccatcatcagatggaaaccggcataggcggaacgacgcacattcaccatatcatcctgaccattgaagttactgacccggacagcaacggcagctcccatcccgtagtacatcataaaagtaaattgtgaaattgccaacatgacttgatgggaagctaacgcaatcgtccccaaccagccaatcatgatggcactcagactgaaggaagccgtctccattcccatctgaaaggcaaccggccatcctaatccgttcaaacggctgaaaacagcacgcgaccatcccaaacggaaaaagccgaccttataacgaatgaagcgcggactacgcataaagatgattacaaagacaacgaccatcactatacgtgaaaacagagtactgatacctgctcccaacaatcccaattcaggaaagccgagctttccataaatcagaatatagtttccgatgatgttcaatacatttccgccaagcaagatccacatggctgttttagtatctgtaattccatccgtaaattgcttgaagccattgaaaagcataacaaacaccaaagaagcaagtaaaaccagataataaggtttaatcagaggaatcaattcctccggttgaccgagacgctctatattcaggaataacagcgtcatacatatagtcagcagaagcgcaaccatcagattggccagcaaactattgcgcaatgcctgtccggcaggggcaaattggtgagttccatacagccctcccacgataggtgtcaacccgtacgagaatcccgtactgaaaataatagccagattaaacacattattcacgaaagaagccgcgcccaactctatcgtgctatggtgaccgatcatcaacgtatctgcgaatccaagtatgatcactcctatctgtccgatgacaataggaagtccaaggtagaataatgccttgtaatgctctctgtatgttctataaatatttctcatttacttttataatagagtataaccccgttctcccgccggaaagccgattgggctacagcctgcaactgtcccgcagtgacggaacgataacgttccacctcccgctccatgctttccgcccgtccgagcagttcgaaccaggcaagattagtcgctacattcaaataattaatattaccgaatatctgagtagactcaaatttgttctttactttttccaactcctgctcactgacaagttcctgttgcaggcgatccaattcttcccgaacggcagcttccgcctgttccagtgccacgcctgccgacggctttccggcaatatggaacaaacccgcgtctacactgccggatatataagcgtcaatacttgaaaataactgcctttcttgtacgagacgctggttcaggcggctggaacgcccgttgcttaatatatccgaaaggatatcaaaggcatagtaatcagggtgatgatggtcacacatatgatatcccatgaacaacgcatcaagaggaacattccgctctaccgttaatcgtcgttcttccgtctgttccggttcctgcggcaagttccgttgaggaacctcccgatggggaatagggccgaaccatttctctgtcagtgtcactgcctcctcgaaagagatgttgccggtgacagccagtatcgcattattcggagcataaaatcggaaaaagaatgctttcacctcctccaacgttgcattggcgatatgcgacagttccttaccgatggtaggccattggtaagggtgcgaccggtaagccaatggcctcaggagatgccctacatctccataaggctgattcaggcaacgctgcttaaactcttccattaccactccccgttgcacttccagactccgttcactgaaatcgaggctcagcatacggtctgactccagccaaaagccggtttccacattctggcggggaacagtgaggtaatagttggtaatatcattattcgtccaggcattattctccccacccgccaattggagcggcatatcataatcgggaatgttgaccgagccgccgaacatcaaatgttcaaacaaatgcgcgaaaccggtatgttcgggatgctcatcacgagctcccaccttatataatatattaagggctaccatctgcgtactttcatcctgcgaatgcaccagacgcaatccattgtcaagaatatgcctgttgattttcatatcatttagtcaagtatggtcgcttttattatcttcacatcttcttcaggacggtcgctacggtcggtttttacctgctggattttgtctactacatccatcccttccactacttcgccgaatacggtatactcaccatccagatgcggggtaccgcctaccgtagtatatgcttcaatctgctccggagtgaaatgaaattccggttgcttggcagctatctcctgtgcttctgcaaacagtttttcctgcaagtcataaagcccgtcttcatcgtttgctttccgcatcttataaatttctttcatgtgcttctgcgccaatgtattgaaaataacattaatcttattctcattcatctggctctccatacttaacaacgtagaatcattgtagacttttcctgtcacgatatagaactgacagccggaagactctttcttcgggttcacattatctccttgacgggccgccgaaagagcgcctttcttatggaagaatttcggatatacaaattctgccggaatggtgtaacctacatcaccggcacccaacatcttgcccttcggagcattcttcgaatccgggtcacccgcctgaatcataaaatctttgataacgcgatgaaacagtgtaccttcatacattccgtctttcaccaatttaataaaattatcacgatgtttgggagtctcattatacaacttcactttgatgtctcccgcagttgtctcaatctttaccaatgtttctttatccatgtcttctccttttttagttccggtcttgcaggcaataagtccgcaaaacgatatggttaataatatcaatacaatctttttcataacgcttttatttaatttaagtttgcaaatataccactttcgcctaaatcctcttacctttgtgacttaaaagaatcaaaacctgacatgatgagatccatattgatcgttgaagatgatataacttttggaatgatgctcaaaacctggctaggcaaaaaaggatttgaagtatcatcagtaagtaccattgcacgtgcccggaagcatatcgaaagccaaactgtagatttaatattatcagatctgcggttgcccgatcatgaaggcatcgatttactgaaatggatgaatgaacagggaaaagccattcctctgatcattatgactggttatgcggatatccagtccgctgtactggcaatgaaactcggagcacgggattatattgccaaacccgtgaatccgggagaattactgaagaagatatctgaagctttacagtccggagaggattctgttattcataataca

SEQ ID NO: 11712 - DNA, 455 bp, Unknown
  gut microbiota DNA sequence
ctgaataggcaggatgcggacaccatccgcaagctggcaggggaagccaacaacatcaaccaactggcgcaccgagcgaatgccggaggtttcgcactggtggcggtggaactggtgaaactcaaaaacaggattgtcgaaattataaatcagttgtcggatgattggaaaaataaaaaagggaagcgggtttaagggctgtgtgaactatgtgcttggtaaggagcaggcggttttgcttcatgcggacggggttctgactgaaagccggggcgatataatccgcagcttctgtatgcagaccgggatgaatcccgatttgaagaagcctgtcggacatattgcgttaagttattcggcagtggatgcacccaaattgacagacgagaagatggtacagcttgcgcaggagtatatgcgtgaaatgaaaatcaccgatacgcagtatatcatcg

SEQ ID NO: 11713 - DNA, 37865 bp, Unknown
  gut microbiota DNA sequence
aatccttgcttataccgatattcctttctatctgctcaggtgttacacgtctctgaccagcaggtaaagtgatgattagcttttccaattcccccgtcagtcggctcaaatcagaacctacaaaatcagccaacatggctgttgccttaggttccatatccacacctttacgcttcatataagaagatatgaaagcaggaagttgggcctcttttatttttttcgattcaaacaatacgcccaccttttcaatttcggctgctaacttctttctacgatccaacgtaccatgcttatggcatattaccagaatagtagacaggagtggtttttgaagataataagacaactcttccatattgcggattacctgcgcctcctttaccactaccacctgatgttcagacatcatcggataacgctttgctgcatttatgacagtagccacatctgcatcggcaccatataccacggttagattgaactccttctccgtttcattcaacacattatttgttatataatccgcaatcaggtcgatataatacgattcttcccccatcaaataatagacaggacgatattgtttagcacccaactccttgagaatatcatcacacgtcagttcttgttttgccataatatctttcaagaccgggaattaccagtcaaatttcaagtgttttacagttttcttttcatcaataatcatgcgcaaagaggcaatacctatttccacatgttcttccacataatttttggtaaccaggctatcgctcttgtctgttttcaccccatccggagtcatcggttgatcggaaaccaacagcaatgcaccggtaggaatatgattggcaaagccacaactaaacaatgttgccgtttccatatcaactgccattgcgcgagtctttttcagatactccttgaatgtatcatcatgttcccaaatacgacgattcgtagtataaacagttcctgtccaatagtcacgtccatagtcacgaatcgatgaagaaacggcacgctgcaacataaatgcaggcaacgccggaacctcaggtggaaaatagtcattggaagttccctcgccacgaattgccgcaatgggaagaatcaaatctccaagatgattcttcttgtcgataccaccgcatttaccaagaaacagacaggccttcgggcggatagcacccagcaaatccataataatggcggcattaggactccccatgccaaaattaatcattgtaattcctccggcactggcagaaatcatattagcatccctacccaatattggaacatcaaattgattggcgaaaatctctacatacttgttgaagttagtcaacagtatatactctccaaaatcctccaagttacgttttgtgtaacgtggcagccaattagctacgatttcttcttttgttttcataatttcattaaatttgcggttccaaataaaggaacccgttatttaacttacaaaaataataaatgttatcgttaaacctaccagtattcgacactaaaataaacgtacgaaacggaaaaaatgtaatttttgacgtaattcgcaaacgatatgtcgcccttactcccgaagaatgggtacggcaacactttgtacactttcttattgcacacaaaggatacccatccgctctattagctaacgaagtaatggtaaagctgaacggtacaactaaaagatgcgatacagtactctaccggagagacctctccgcccggatgattgtggagtataaagctccccatgtagaaatcacgcaagccgttttcgatcagattacccgatacaatatggtactgaaagtagattacctgattgtcagcaacggaatgcagcactattgctgccgcatggattatgaaaatcagagctatacttttctgagagatattccggactatgcttctttataaatcgatcattacatgaaacctacgggatgattatatcatcccgccaccttctttttcccaccgaatttttcttgcaatttctgcatcagctcatagaaattaggtacataaaccgtagccagcaacgtattcattgccataccgaataccactgcagcccccagtgcgatacgactttccgcacctgcaccggtagcaaacagcaacggcattactcccaaaacgaaagcaaatgatgtcattaagatcggtcgcagacgaacatgtcccgcttcaaatgccgcatcacggatcgaattcccctcagcgcggaaatcacgggcaaactccacaatcagaattccgttctttgccgaaagcgcaatcaacaggataataccaatctgcgtataaatacttaccggagtccccattatcagacaaccgatcatcgctcccaacaatgctaccggcaaaccaataaccgccgctaccggactggtccaactttcgtactgcgcagccaacactagaaatgcgacaatcaaagccatgaccagaacaatggtcgttgtattcccagcctgcgtttcctggtatgcaacagaagtccattcatacccgaattcatcacctaactgttccttgaacaaagcctccatctcttgaatagcctgccccgtactgcttcccggagccacattgcaggtcaaagccgcagtagaatacatattataccggttaatctgatcttgccccaactgttcttctactttagtaaaagaagagaaaggtaccatctctcccgcagaattcggcacactcaatttcagcacatcatcgatcaccctttgcgcctgatcacgcgcctcgatcttcacctgatagatacgtccgaactctacaaaatcattcacatacgccgctcccatataatatcctaacgtagaaaagacatcattcaaggcaatacccataaattgaactttatcccgatcgatattcaaaaaatactgcggtacatttgcttgatactggctggatatagaagccagagcaggtttggtatggtaagaagccaataaagcatcgatagcctgctgcatctccgtagatcccaggtttttcctatcctctacctgaagctgcagacctcccgaagcccctaatcctggaatagccggtggaaccatagcaaacacctgcccggcttggattgtcatatacgcctcaccgttgaaacggttgactacagcggcagccgtgtgctccttccctttcctttcgttccagtttttcagtacgacaaaataagtagccgaattactctgctcaccacctcccataacggaaaaaccagtaatacctatatagttctgtacctcaggatacgaatcaagtatggcattaatttgatttccaaccgcttgtgtacgctccagactggcagcaggaggcaattgaaccacagcaatgaaatatccgtcatcttcatcgggaacgaacgtagaaggccagcgcataaatagaagaacagcaataactgtcaaaatggcataagaaataaaactaaatcccggtcgtttaagcagccatttaacgattccgtcatatactccctgcgttttatcataagccttattgaatccccgatagataaaaaatttggaaggtttgctcttttcgagaaaaagcgcgcaaagcgcaggtgtcaacgtcaatgaattaaaaccgctcaacacggtcgaagcagcaatagtcaacgcaaactgcttatatagctgaccggaaattccactaatcaacatagtaggaacaaatacggcaagcaacacaagaaccacaccgacaataggaccggtaatctctcccatcgcttttgtcactgcttcgcgaggcgaatattgtccggtttccagtaacctcgaagcgttctccaccaccactatcgcatcatccaccacaatggcgattgccaaaatcaatccgaacaacgtcaatgtattgatagagaagccaaatgccgccatcacagcaagagtaccaatcaaagagaccggaatggtgagacaaggaataataaccgccctccaattctgaaggaacaagaaaataacaagcaccaccagcaaagtagtctcaaagaacgtcaccatcacctcatcaatggaagcatgaatcacatccgttgtatccaacgtaacgttataagtaacacctgacggaaagttcgctcccaattcctccattttggctttcacccctttcgatacatccaatgagttggatcccggttgctgataaatagcaatggcagccgtaggtttcccattcagccgggataccactccataagaagcagaacccagatcaattcgtgcaatatctttcaggtgaagcattgctccgtccttttccgtacggatgatgatattgccaaactgttccggtgaggtaagtctcccctgcacattcaacgtatactgaaacgcattcttattatcctgtccgataggttgaccgatatacccggcagaaacctctacgttctgcgcctgaatggcctgatagacttgctgcggtgaaatattgcgaatccgcatagcttcaggatccagccagacacgcatagaataatctccggctcccatgacatttaccgcaccgactcccggcacacgggttaactggtcgacaagatttaatttcgcatagttggtaaggtacaaactgttatagacagaatcctgcgaagccattgtcaagaacataacgatgttcgaagattgtttctgtacagtcactccttgcaccaccaccggttccggaagtgatgattgcgcgatactcaccctgttttgcacttgcacagttgccatgtcaatatccgttccaacggcaaaagtgatagtcagagagtatgctcccgaagatgaagagttggaagacatataaagcataccatctactccattcacctgctgttcgataggaatacctaccgtttgggctaccgtctcggcatttgcacccggataaacggccgatacttgtaccgtcggtggtgtaatctccggaaattgcgctaccggcaatatatttagtgtcaccagaccggctaccacaataagcagtgcaagcaccgtagcgaagatcggtcggtttatgaaaaatttagaaaacatagatctataagtttaggattaatacttgaaatgaaagaactactctttaaggtacaggctttaccttcattccatctctgactttcatcagagcttccgtgacataccgctcttgaggagaaatgccctccaatacctgacgcagggtatcacccattaactgccccacctcaatatgacggtaacgaactacgttcgagtcatttacgacatacagaaatttacctaactgatccgttcctatagaagcttccttcaccaatacagcatttgaggcttcgccataaggaagagttatactcacatacaacccgcttttcagaagccctttcggattatcaaaattagcgcgtaccatcaatgttcccgtactcatatccacattcggggataaataatccaacacggcaggataagactccgttccatccttacccaattgtaccataatcttttgcggcaggttctttgccgattgattgtcattcatcgccatgcccaaccactgattgtccgctacattaaaatacgcatacatctgattatccttatagatagtagccaaagtaacgggctgtaaagatccgcccacataactccctatgtccacagtcgatttcgtgatagtcccgtcaaacggagcacgcacataacaatatcccagattcgtatgcgccgtactcaaagcggcttccgcattattcacagccgcgatcccttctgtcacattggcttccgactgtagcagttgtatctgactcaccgcatcacttttgatagcctctttcatacggctgtaattactgcgtgcgtactccagctgcgcctgagctgtttgcagatccgctttcgcctgttccaccttatccttatataatgtaggctcgatgacaaaaagtaactgtcctttctttacccttcctcccggagtataggaggtggactgcaaagtcccgtttactctggccacaagatttaccgtttgctccgttgtcaggtatcccgggtaatctttcgtcagagtaatgtccttcactaccggtttagtcacgctaatttcaggagtaggcattcctcccattgctcctgtgcttttcttctccttgcatcctgtcaatatgggcagcgcaagaaagatatacattagttttttcatatccgttcggttatatttttttatagattcttttttattctctccagcctccgcccaatgctttataaagggttatcagttgcaataatgaactgccttccgcttgcaccagctgattctcataagatagcagagaacgttgggcgtcgagcacattctggaacggtgaaagcccctgtttataaagttctaaagaaagtttcaacgtctccacaccttgattgcgcacctccctcaacgccacaatctgcttgatggaattacgataagcattcatcgcattatccgtttcctgtacagcagtcagaaccgtttgattaaattgattgatcgtttcgtccaattgaacttttgccagtctggtggcatttaccaattgtcctccactgaagattgtccaactcaatgccggagcaatctcataagtcatacttttactcttcaccagatcctttaaatcgcgggcagcatagccaaacgaacctttcagaaaaactttcggcaaccagtcggccttagaagctccgagtaatgctgcctgcgcattcacattccgttccgcactccgcacatcgggtcttctcaataataaatcgacaggcatacccactccgatcggttccatataatcgggtaaaatccccaccgtttccagcactgggcgaatctcctgaggatacattccaagcaaaacggccagtgtcgtgatatattggttgatacctgcttccaattgtggaatggaagctctcgtgctatacaaaaccgacttagcctgtgccacgtccaacttagccacaagtccggtgttataacgtacttccgtgattttcagcacttcttcctgcgaggcgacattcttcttcaccacctcaagctgctgctgaaattcccgtagattgatataagctgaggccacctcggccgccatagaaatcatcacccccgtatactcctctttacttgcagcaaaattctctttctgcgctttcacacgcttacggatactgccgaatacatccacttcccaactcatactgagtgatgcgccataataatgttccgtagattgaggagcggcactgatattaccgcttgtctcctcgcgagtccatccggcattcaatccgacagaagggaaaaagttactgcgctccatccagagattggcacgggcagcagatatgcggttaatagccatcgcaacagagaaattgcggtctaccgccaaagtgatcagagaatccagcttggtgtctcggaaagatttccaccaataatcatccacaggaagcgtctgttgaaatacttgtccactctcctcccattcatcaggaagaggcgccttcaggtaacagtttgcagtttgcccaaccgcagatacagtagaaagaaacataaagagcgatatgccccacattcgtatattcatatcagttcaggtttttatgaaatgatatgataacaaccaaaggtttggtttgtttattttgggtatgttaagaaagggagataaaaaaagccccgcatgatgcggagctttgaaatatataatcaaaaagcggtagattattctgcactttttcttctgatcgctcttttggttgttggtgcgggagcttcttcagccttatgttcaatctgtacaccagccaattccgggtcaatcatgatacgtccgcaatattcgcaaacgatcaccttcttacgagagcgaatatccaattgtctctgaggcggaatcttgttaaagcaaccaccgcacgcgtcacgttgtacatatacgatacccagtccgttacgagaatttttacgtatacgtttgaatgactgcaatagacgcggctcaattttagtttccagatctttggctttgtctctcaacttttcttcttcctgcttggtttcagagataatctcatccaactcgcccttcttctgttcaaggtctttttttctttcatccaagacctgttcgtttttcacaacttcaccctctttctcttctttgtctgcagaatactccttgattctcttctcacaaagctcgatctccaacgtctggaattcaatttcttttgtcaagaagtcatattcacggttgttgcgaacattgtcttgctgtgacttatatttttcaaccgaagccttagccgtttcaatctctaccttcttaccggcaatagcagctttcaattcatctacttcagctttaatcttatcgatacgagtactcaaaccggcaatctcatcttcaaggtcttgcacttccaacggaagttcacctctcaatgttttgatctcgtcaatcttagacaacatagtttgcagctggaacagtgtcttcagtttctgttctaccgtcaactcattcggatctttttttgcttctctagccattttacttataaatattttatgggattcgtatttattttactcgattggagtgcaaaatttggaaataaatcccggattatagaataaaaaatttcttttgtatattgttcgctttcataatgaccgatttccgccatcagaatatcgccctcatgaccaaaataatcatgatatttaatttcacccgtgataaagacatccgcacctgcccgaatggcctgtggaagcaaaaaagctcctgcgccaccacacaacgctactttctgtatctccctgcctgtcagtctattatgacggacacagcctacctcaaaagttttctttatacgtttcaggaattcaagctctgtttcaggttcatccaattcgcccacaatacccgcacctgcctgcgtcaagtcgtcttgcaggctgttctctttcggttcgagcacttgcagattcttcaaacctattttttcagctatcttatagttaactcccccgtatgcattatccagattagtatgcgctgaatagatcacaatatcattctttattgccttcagtatgcaacgttccacataatctttgcccgtaatggatttatagcctttgaaaatgagcggatgatgtgatataacgagattgtaccccaatgcgatagcttcatccagcactgcttcggtaacgtcaagacacaacaaagcccctgttgcttccacttctgtcaatccgatttgcaggccggcattatcaaatccgtcttgcaatggcagaggcgcgaatcgttcaagggcgcttactatttccttaattttcattattgatagaaaatttggtcgcaaagataataaattaaatagttatgcgcataacttcctcatcgtttttttcgtgtgactgtcatttcttggattctttagtcacttccaacagttttccgtacgcatcgaacgaacgtcgtgaagccaatgagatagtaatcatcaacgacaacatggatgcggcgaaagtaatcaccataatcatcatttgatatttgatagcgacattcgggctgcttccccccagaatctgcccgatcatcgtaccgggaaaagcaaccagccccatgaccgcgatattcgcaatcaaaggactgaaagatttaataatggcctgccggataaatggagcttgggcttcctgccttgtagccccattccccaataaataccgatacaattgttgttcacgtttcagcccgctataataggtattcaaagcgataacattgcttgacaacatattccccatcagaatgccgaatatcggaataaaatattgggcgctaaaaatattatccaattgaaggacaaccccgataaagtaaagccctattaacacaacactacagaaaaagccgaccgtaacggggattaacagaatacttcgtttcaactgggtacgtaccaatgcggtttgtccggctacaaatatcataacgaccacccaaaggaaattaataaaaggattattccataaaaagaggtatttcagatacataccgataagaaacagttggataatcatccgtaatgtgccaatcacagcaggttttagcagtcctgtcttgaatttccacagataaaagaatggaatggcaagcagaagcaaacctacaagaagattataatatgatatgtcaatcgttcccactatatagtttagtattccatctggttcttaattatagttctattacataatgacatcccgctgcaaagtctttgtcgtgagataccgccaacactgccgcccctctttctgcctgccgccgaaaaaaagacaatactttatcagtcgcccccgcatccaatgcagacgtcggttcgtcaatgataatcaacggtttattaagcattgcagccacagccaatgttatacgctggcgctgtccgccggatacctcattcactctctttacatataattcgtgttccaagcccaattcgtcaaaacaagcgtataatctctcctccgaaaagggaacggaacgattcactttcagctcaaacggaagggtaaccatatctttcacccactcaaacggaagtgccaattcttggggaatccatgcaatctgtcgccggacgacatctatggtcgatatatccagcaacgtccctcccacttgaatggtcccttctcttaacggcacaaatcccatcaccgcattcaacaatgaagtttttccgcaaccggactgccccacgatacaagcggtttctccctgttccagattcagattaaaaccggagaaaagcacttctgccccaaaagcaatacaggcattattgatatgcaacatgactcatctttctaaaattctcatcaaaagtacataaaaaaacacgacttatgaatataaaaccccaataatatcgctagttatatattttgctgtctatagaagtaggtttactataccattattatcacatttctcagccattccggaaagcaataagagttgaagcgcacacaccttacatttcatacaaaagctaacggtaattcatgtatctattagcatacaatatattgtatatcaaccagtttgtcacattatcaaataaacattcaaaccgttctactctagtgaacagatctgtttactagagtagacagcactgttcactagagtgcacgaaaccgttcactatagtggaacgattgaaatgcaagctaaataatccatcaatgatggctaaataatccgtcaatggcggctagataatccaacaatataagtagcttcacctataaacaaccgttagattgtaatgagagatatatgagaaatgcatgagagatgcatgaaaacaaaacatctctcattgcagtatattgctgataatatgaacattacatcaaatttatgagagatatgagagatgaaaaaatagatctctagtagtgcagaattccctaggattcatcaaatccaaaatgcgacactatttccttttatatcagtggctttttcaataacctctattatttaaacaaagcacttatacatctcttcgaataaaatattatctttgcctgactaattaattctagaaaagttatgatactaaacgaaagagacgctcgccatgagcacatactgcaagcagcacgccagataatgaccgccgcacgcactgcccccaaaggaaaagggatagatattattgaagtggcgctaattactgatgaagaaatcaagcaattatcggacactatgataaagatggtggaagaacatggaatgaaattttttctacgggatgcagacaacatactaaatgccgaatgcgttatattaataggaacgcgcgagcaagcacagggactgaattgcggtcattgcggattctcaacttgtgccggacgtacagaaggtgttccatgtgccctgaatagtattgacgtgggtattgcgataggttctgcctgcgcaacagcagccgatctgcgtgtagacacacgggtaatgttctctgccggacttgcagcacaacgtctgaactggctgaaagactgcaaaatggtaatggcaattccggtaagcgcatcatcaaaaaatccgttcttcgaccggaagccaaaacaggagaacaaagattgatatcatactcgcaaaaaagaaatggatataaataactaaatagaaaagtctgatgggaatcatggttggattgcccagccctagcggctcggagaaagatttgcaattaaacttcggtaaaaatatgaccgtacaggtagaaatgagagcaccttatctgcctgccgaatggcatacgcaaagcggcatacaactgacgtggccgcacgctggtacggattgggcatatatgctggaagaagtacagcaatgtttcataaatatcgcccaagaaatagcaaaacgggaactgttactaatcgtcacccccgaacctgaaaaggtgaagcaacaaataactgctaccgtcaatatgaacaatgtacgctttctgcaatgtgccaccaacgacacttgggcacgtgaccacggagctataaccatgattgacacaggtactccctcattgctagacttcgcatttaacggctggggactaaaatatgcttccgaactggacaatcaaatcactaggcaagctgtagaaaccggagctttaaacggccaatacgtcaaccggcttgatttcatactcgagggcggctctatcgagagcgatggaatgggcacactgctcaccacttccgaatgtctgctctcttccaaccgtaatgagcgtcttaaccaagtagagatagaagattatttaaaatcggttttccatctccagcaagtcctttggttggatcacggctacctcgcaggcgacgatactgacagtcatattgatactttagcccgtttctgctctaccgacaccatcgcctacgtgaaatgtgaagacaaagaggacgagcattatggagcgctacacgctatggaagaacaattaaaaacattccgcacattggccggagctccctatcgtctgttagctttacctatggcggacaagatagaagaagatggagagcgtcttcccgccacatacgctaattttctgattttaaatgacgccatcctctacccgacttacaatcagccgcaaaatgacaagaaagcaggtgaagtgttgcaacaagcatttccgggacggcaaatagtcggaatagattgtcgagccctaatcaaacagcatggttctttgcattgcgtcaccatgcaatatccaacaggagttataaaataaataattattcatcatgagaaaaataaaagtcggacttatccaacagtctaacacttcggacattcgtgtcaatctaatgaatctcgccaaaagcatagaagcgtgtgctgcgcacggcgcacagttaatcgtgcttcaggaattgcacaattcgctttacttctgccagacagaaaatacaaacctattcgacctagcagaaacgattcccggaccttccaccggattttactcggaattggcggcagccaataaggtagttcttgtaacttccctcttcgagaaacgcgcaccgggactttatcacaatacagccgttgtcttcgatcgtgacggaagcatcgccggtaaatatcggaaaatgcacattcccgacgatcctgcatattacgaaaagttttattttactcccggagatataggtttcgaaccgatccagacttctttaggaaaactgggagtcttggtatgctgggatcaatggtatccggaagctgcccgcctgatgacactgaaaggcgccgaacttctaatctatcctacagctatcggctgggaaagtagcgacacggatgacgagaaagcgcgtcaactcaacgcctggattatctcacaacgtgctcatgccgttgctaacggtcttcctgttatttccgtcaatcgtgtaggtcatgagcccgatccttccggacagacaaatggtatcttattttggggaaacagtttcgttgcgggtccgcaaggggaatttctcgcacaggccggaaatgaccgcccggagaatatggtagtggaaattgatatggaacgttctgagaatgtacgtcgctggtggccattcctgcgcgatcgtcgcatcgacgaatacgagggactgactaagcgattttattgaaaagtcagtttcttattagccatgaagttgacacctccgtaaataaacaatcccaagaattgtgcgaggtattcattcacgtctaatccttcaaccaataaaacaagaaacaggaattgtgccgtgtaggccagaccaaaagcagaacaaaagagcagtatctgtttccagatactgttctttttgttttctatagggaatatccagtatttacaccaaacgaagttatggatttgagcaatcagatacgctgttatattagccactatatagtcaccgttgaatgatatttccttcatcatcaaccatacaaccaatgccattatcaaggcattcatcgtaccgattaccataaaacgaaatatacgtaccgattctttcactcccaccctttgcttcactctttgatatcaacaatcaaattcagttcgtcaagttgagtctggtcaattgcagatggcgcatccagcatcacatcacgtccggaattgttcttcgggaacgcgatacagtcacggatagagtccagaccggcaaataaagacacccaacgatcaagcccgtatgcaagaccaccgtgaggcggtgcaccatacttaaaggcattcatcaggaagccgaactgcgcttccgccttttccggagtaaagcccagaatctcaaacatcttggcttgtagtttcgcatcgtgaatacggatagaacctccacctacttcgacaccattgactaccatatcgtatgcatcagcacgcactgcggccgggtcagtatccaacaatggaatatcttcatctttcggatgtgtgaaaggatgatgcattgccatcagacgaccttcttcctcgctccattcaaacatcgggaagtcaatcacccaaagacaaacgaatttattcttgtcacgcaagcccaattgagaacccatttccaaacgaagttcacaaagttgcttacgggttttcatggcatcgtcaccggaaagaattaaaatcaagtcacccggcttagctccgaacgcttccttcattttctgaagtacctcttgcgtatagaacttgtctacgcttgatttcaccgtaccatccgcttctatacgggcatagaccataccttttgcgccgatctgaggtttctttacaaactcagtcaacgcatccaactgtttacgggtataagtcgcagcaccttccgcacagataccaccgatatatgcagcattatcaaatacggagaatccatgtcctttcatgatgtccatcaattcgacgaacttcatgccgaaacgcaaatccggtttatcgctaccataatatttcatggcatcagcccaagccattctagggaacggttcggtcagttccacaccgcgaagagtcttaaacagatgtttagccatcccttcgaaagtagtaataatatcttcttgctcaacaaagctcatttcacagtcaatctgcgtaaactccggttgacggtcggcgcgcagatcttcatcgcggaaacatttcgcaatctggaaataacggtcgaacccggataccatcaacaattgcttcaatgtctgcggagattgcggaagtgcatagaattgtcccggattcatacgtgaaggaacaacaaagtcacgcgctccttccggagtagaaccgatcagaaccggtgtttccacttcgataaaaccaaggctatcaagatatttgcggacttcgatagtcattttatgacgtaattccaaattggaacgaacggcattacgacgcaaatccaaatagcggtatttcatacggatatcatcaccgccatccgtattgtcttcaatagtgaacggaggagtcatggccgtgttcagcacattcagttcggaaacaatgatttcaatgtctccggtaggaatatttgcattcttgctgaaacgttcattcaccgttccggtgatttgaataacgaactcacgtcccaacttattggcacgctcacagagttctgcattgatttcttcgttaaatactaattgagtaattccataacggtcgcggaggtcgatgaaggtcattcctcccattttgcgactacgctgtacccatccggacagcgtcacttgcttatttgcatcagagattctcagttctccacatgtgtgtgttctgaacatatattttttttattaaacgattatccactcgcgtttttattttggctgaaccaaaactccgcaaaagtacgcaataatttgtaattcgtaattagttatccattattttatcagactttcttcgtcagctttttcaagattttcttgtttttgtctgttatattgtcaacaatagcttcattcatcaatttaattccattcatatattcttgtgctctctgaagtacattggccgcatccttctccgatgcgcgtggcactactacgcgcaatcctctttgaatcaacctgatatccacatcagcgtccgtctccataggatctccgtcaaaatgcaccactccgggagtagcccgacgaatacacagccgcctacatcggaaagtcttgatgcggctattctggtcaatcgtcttattaaacagttgaaaagcaagcgaaggcacgtccaatacggtaaacggctcgagaatggtcacatccagcaaaccatccgtcagcgtggcttgcggagcaatgtaggcattgtttccatattgcgacgcatttccacaggcaataagaaaggctttatatttggatactccattttcagtttccagttcgtatgtctccggctggtatttaaggctttcttgcagcgtcttttccaaataagtcagcaacccacgcttaccggcatgtgcaaacttcagactgacaaacgcatcgaatccgacaccacaggtacagaaaaaatccgttccgttgatcttaccataatctataatatccgtgcagccttcattgagcacttccaatgccttcttcggttccataggtatatgcaagtgacgtgcaagtccgtttcctgacccacaaggaataattcccaaagcagtatcagtatgcactaatgaacgagctatttcattgattgtcccgtctcctccgatagctaccaccatatccgttttttcttccgcagcttgggcagctatctctaccgcatgaccggctctctccgtatacactacttcccaagagtatttcgtcttgtctattttttcatccaacaaactaagaatcaattctttactttgtgttcccgaaataggattgacgacgaattttatttttttcatattatcgttcatgctattcttgtcgattgtagacgacaaaagtaatataaatatctcaaattttaatctattagaggtttcgaatcgcataggagcaacttttttctcttaaaaagaacatatgaaagcaaaaattgttatctttgccccctgttttaaacacttgttaagataaaagtatatttgatcgtcagtgaacgatctgagtatgagcataataaattataattcaatgggattattacaagagaagttagctaagtacgacttgccacaacaatttatggcaaagggcgtttacccatatttccgtgagattgaaggaaaacagggtacagaggtagaaatgggcggacacgaagtgctgatgttcggttccaatgcatacactggccttacgggagatgaaagagtgattgaagccggtatcaaagctatgcacaaatatggttccggttgcgcagggtcacgctttctgaacggtacacttgacctgcatgttcaattggagaaagagttggccgcttttgtcggaaaggacgaagctctctgtttttctaccggttttacagtaaactcaggtgttattccggctttgaccgaccgtaacgattatatcatctgtgacgaccgcgaccacgcctctatcgtagatggccgtcgcctctccttctcacagcaattgaaatacaaacacaatgatatggcggatttggaaaaacaacttcaaaagtgtaatccggattcagtgaagctgattatagtggacggtgtgttctctatggaaggcgacttggcaaacctgcccgaaatcgtacgtttgaaacataaatacaatgcgaccatcatggtagacgaagcacatggcttgggagtattcggaaaacagggacgtggtgtttgtgaccatttcggtctgactcacgaagttgacctaatcatgggtactttcagtaaatcattggcttctatcggtggattcatcgctgctgactcctctattattaattggttacgccataacgcacgtacatatatattcagtgcatccaacactccggccgctaccgcgtccgctttggaggctctccacatcatccagaatgaaccggaaagactcgaagccttgtgggaagctaccaattatgctttgaaacgtttccgtgaagccggttttgagattggcgcaacagagtcacctatcatccctctttacgtacgcgatacggaaaagacattcatggtaaccaaactggctttcgacgaaggtgtatttatcaatccggttattccgcccgcatgtgctccacaagacacattggtacgtgtggctttgatggctacccatacaaaagaacagattgaccgtgctgtagagaaattagtaaaagcattcaaggctttagacctcttataatcagcactcgaaatcataaataaaaagcagaggatgaactcatcctctgcttcccaagctgttcgtatcaggatttaattccctgacagcatcttttaccaccctttgagtcggattcctataagtttctgtctgttgtacaggaacaatctcattcagcattctctcatatcccttctgttccaacaaaggcatttctttctcatctaccttcttttgatttttagtcttcatatatctccttatttttatttcttatcttaagaacagaaaatgataaaagatagttcattgttacaccaaattatatcactctataatatctctgatttctaacaagaaaaaaagtacaggtacaagagtatgatattcaatgaattgagaattaatcaataaaaaacattcgtttgcctattgttaattaaaaaatactccctatctttgcaccgcttttgaaaagaacaacccttcaaaaagtagcggggtgtagcgcagtccggttagcgcacctgctttgggagcagggggtcgtgggttcgaatcccgctaccccgacgaaagagacaaatcgaagattataaaatgaggctaatacaataaatattagcctcatttgttttacatcttcaaataatactccctagtcaacattatatattcctcgctatatttgtgacgtgctatttctgtcaacagctcttcgaccacacactcccgattatcaaaagaaaaagcgatcaacactctttttggaacacctccgggcttagttatcacattcagttggcgggctgcatacagattccacatagaagctataccctttaccctatctgccacatctgccggaatcacaaccgtaaaagtcccatcctcagccaataatccggcaactcctttcaatagttcctcataagtcaaagaagtggcatgacgcgcggcattcctttgtacatccggacatttaagtgagcctacaaaataaggaggatttgagacaatcacatcaaatttaccggaagaatgatactgattaaaatctgcctgaaccacttctatctgttctttccaaaaagaacgagctacattttctttagcctgctccacagctgccgtatctacttccaatgctacaatttttacatctgccggactgcgttgagccaacatcagagcaaccaatcctgttcctgtacctacatccaatacccgacgcgctccttgaaccgaagtccaggcacctaaaagtactccatccgtgccaactttcatagcacatttgtcatgccacactgtaaactgcttaaattgaaaataaggattcgacattttattattcgctgatcttaaaacccgttttattccactaatttattatgtaccgccaaaaataaataattattatggaagttaccctttattaccctacattttggcattgtttttgtgtttttattcaaacctgtgcttcattattaaagagaatcaattaactttgcaaacgatttatgcatatttgcatggcataaactaaattaaaacgaaaagatgaaagaaagatacttattggaagatgtcagtgacaacggtttctcgttaattaccgactatgatggtaacgatgaacatgcatttgatgtaaacataaaatctggtgaaattcttccggttctccccctccgtaatatggtattatttcccggagtattcctgcctatcacggctggccgaaagtcttcattaaagctcatacgtgatgctgagaaaaagcataaagacatagcagtagtgtgtcaaagagctgcgcatacggaagaccccaaattggaagatttgcacaacataggtactgtaggacgaattgtccgggtattggaaatgccggatcaaacgacaaccgtcatacttcaaggtatgaagcgtctaagtttgaaaagtattaccgatacacatccatatctcaaaggcgaggttgagattttggaagaagaaattcctggtaaggacgataaggagttccaagctttggttgaaacatgcaaagacctgacaatgcgttacatcaagtcgtcagatgcaatgcatcaggattctgcgtttgccattaaaaatatcaatagtccgatgttcctgatcaactttatctgctcgaatctcccgtttaaaaaagacgaaaagatagatttattaagtatcaagtctttgcgcgaacgtacttatcacttattggagcttctgaatcgcgaagtgcagttagccgaaataaaagcctccatccaaatgcgtgctcgcgaagatattgaccagcagcagcgtgaatatttcttgcaacagcagatcaaaaccattcaagacgaattaggtggcggcggtcaagagcaggaaattgaagaaatgcgcaataaagcggagaaaatgcattggaatatggaagttaaagagactttcctgaaagagctggctaaattggaacgcacccatccgcagtcaccggactacagcgtacaacttaactatctgcagacaatgcttaacctcccatggggcatttatacaaccgacaatctgaatcttaagaatgcagagaagacgttgaataaagaccattacggattggagaaggtaaaagaacgtattctggaacatctggctgtgctgaagctaaaagacgacatgaagtcaccgattatctgcttatatggccctccgggagttggtaagacatcactcggaaagtccatcgcatccgcccttaaacgaaaatacgtgcgtatgtctttaggaggagtgcatgacgaagcggaaatacgtggacatcgtaagacatatatcggtgctatgccgggacggattatcaagagccttattaaagcaggagcctctaatccggtattcatcttggatgaaatagataaagtcagtgcagaccgccaaggagatccttcatctgcattattggaagttctcgacccggaacaaaacacttcgttccatgacaacttcctagatgtggactatgatctctcaaaggtattgttcattgcaacagctaataacctgaatacaattcccggtccattgctcgaccgtatggaactgattgaagtcagcggatatatcacagaagagaaaattgaaattgcccgtaaacatctagtcccgaaagaactggaagccaccgggcttaaaaagacagatataaaacttcccaaagatacgctggaagccattatcgaatcgtacactcgtgaaagcggtgttcgtgaattagagaagaaaataggtaagattctccgtaaatcagcccgtcaatatgcaaccgacggatattttgctaaaacggaaattaaaccggctgacctatacgatttcttgggagcaccggaatatacacgagacaagtatcaaggcaatgagtatgccggtgtagttaccggactggcatggacagccgtaggaggtgaaattctatttgttgagacgagcttgagtcgtggtaaaggtggacgtcttacattgaccggtaatctgggagatgtgatgaaagaatctgccatgctggcacttgaatacatcaaggcacacgcttctatccttgacttggacgaagacatttttgaaaactggaacatccatattcatgttccggaaggggcgattccgaaagacggtccgtcggcaggtatcactatggccacttctttagcttccgctctgacacaacgaaaggtaaaagccaacctggctatgacaggagaaatcacccttcgcggcaaggttcttccggttggcggaatcaaggaaaagattcttgctgccaaacgtgccggaataaaagaaatcattatgagcgccgagaataaaaagaacatagatgaaattcaggatctgtatttgaagggattgactttccactatgtgaatgatataaaagaagtattcgccattgcattaaccaatgaaaaagtagcggatgccattgatttatctgtaaagaaacccagccaggaatgacatttgagttacaatatacagacactaaaagtaatgcccgtgccggtctgataaccactgaccacgggcagatacaaacccctatcttcatgccggtgggaacattgggcactgtcaaaggggtgcatctgacagaattgaaagaagacatccaggcacagatcattctagggaatacttatcatctctatttacgtccgggattggatgttatcgagaaagccggcggcttgcatcgcttcaacggttttgatcgccccatgctgacagacagtggtggttttcaagtattttcgctagccggaatccggaaactccgtgaagaaggagccgagttccgttcacatattgatggcagcaagcatatcttcactccggaaaaagtgatggatatagaacgtaccatcggagcggacatcatgatggctttcgatgaatgccctcccggagattcagactatgcgtatgctaaaaagtcgttagggctgacccacagatggctcgaccgctgcatacaacgttttaatgaaaccgaacctaagtatggctacaatcagtcgctattccctattgtgcaaggatgtgtttaccccgatctgcgcaaacaatctgcggagtttgtggcttccaaaggagcggacggaaatgctatcggcggattggcagtaggcgaacccgtcgataagatgtatgagatgatcgaaattgtcaacgagattctgcctaaagacaaaccccgttatttgatgggcgtcggtactcctgtcaatatccttgaagggatagaacgcggcgtagatatgttcgactgcgtaatgcctacacgcaacggacgaaatggaatgctgtttaccaaagacggtatcatcaatatgcgaaacaaaaaatgggaaacggatttctcccccattgaggcggacggtgcttcctatgtagacacactgtacagcaaagcgtatttgcgccatcttttccatgcacaagaactgttggccatgcaaattgcttctatacataatctggcattttatttatggctggcaggcgaagcacgaaaacatattatcgccggagatttctcaacctggaaaccgatgatggtcagaaaagtatcaactagattataaggaatgaaaagcaatcgattcataaagcggctggactggtatatcatcaagaaattcttgggaacatacgtatttgctattgcattgatcatttctattgcagtagtattcgactttaacgagaagatggataaactgatggaacatgaagcgccatggagcaaaatcattttcgaatactacatgaactttatcccctacttctccaatctgttcagtccgttgttcgtgttcattgccgtcattttctttacttcaaaactagcggagaactcagagattatcgccatgttctccaccggaatgagtttcaagagaatgatgcgtccttatatgatttctgcggccattatcgcattaacgacctttatgctaagttcgtacgtaatccctaaaggaagcgtcacccgcctgaactttgaagaccggtatatcaaacccaagaaacagaatacggcacgcaacgtacaactggaagtggatagcggtgtcattgcatacattgacaattataataatgccatgaaaacaggcaaccgtttctcgttggataaattcgtcgacaagaaactggtttctcacttgacagcacgtcgtgtaacgtatgatacaaccaccgttcataaatggacaattcatgactacatgatacgcgagttggacggcttgaaagaaaaaatcaccaaaggagaccggatagactcgattatcaatatggaaccgtccgacttccttatcatgaagaatcaacaggaaatgctcaccagccctcaattgagtgactatattgagaaacaaaaacgaagaggatttgccaatatcaaagagtttgaaattgaatatcataaacgaatcgccatgtcgttcgcctctttcatcctgacaattatcggtgtttctctttcgtcacgaaagaccaaaggaggtatgggtctccacttgggtatcggactgggactgagcttctcatatatcttattccagacaattacttctacatttgccatcaacggtaatgtacctcctgtgattgcagtctggattcccaatattctttatgcaggtatcgccttcttcctgtatcaaaaggcaccgaagtagatgacaagattctcttaatagaagttccgcctattcttaccaaacagcaagtataggcggaacttttttgttgtatccatttcctcttttgtctattctacattgtcaaccaatctcctttacataagcagaaagatctgcagcagagatgtttttggctataattacaccatttccatccaataaatagttagtgaacccccggttcaaacggtatttcttaaataatccggagtcctcgccttctgtttccacgaaacaagtgggcgtaactatttggtcctgacgaacggtttccttaaaaattgactgatattcgtcaaacgaaatagaaaccatttccacattatgagaagaacgaagcgcattgcttaaacttacgttttgcatccgggattgcgcgtcataacttgcccaaaaacttagcaacacatactttcctttcaaatttcccaacttaaaggcaggttgctcttccgatgtagattcgattttaaaatctggggctacatcaccctcactcaaacctccggtaggtttgtctttctcaacgaaagcggtcaaggaacaaattagtaatacaacaaaaatccactttacatacttcatgtaactcggttttagttaatactatccgggactgtccttaaacagtggtttcttcccgaaacgttgtcttttcaggcatcaggcgaagaggaatccgctgattatcagagcctttatttttgaaaccgggtgcaaaggtaagtaattatcaaattaacttccaaaagaataagcaaaaatctcacttttcaggtataactttttatgttatttagcataaaaacgaacttttttctctacttttgcaggataaaagtctatttcttatgcaaccatcaagtacagaattgattctgattcgagttaccggtgaagatcgtccggggcttacctcatccgtgaccgaaatattagctaaatacgatgctactatcctcgatatcgggcaggcggatattcataatacactatcactaggtattcttttcaaaagtgaagaaagacattccggatttatcatgaaggaattattattcaaagcttcctctttgggagtaaccatccggttcgaaccaattacaaccgagcaatacgacaattgggtaggtatgcaaggcaagaaccgttatatcttgacggtgcttggccgtaaactgtctgcgcgtcaaatatcggcagccaccagcgtattggcagagcaaggaatgaatatcgatgcaatcaagcgcctgacgggtagaatccctttggatgaatgcgatacggatgcacgcacacgcgcttgcatagaattctcagtgagaggtactcccaaagaccgcatctccatgcaagaaagcctgatgaagttagccagcgaactggagatggacttttcttttcagttggataatatgtatcgacgtatgcgccgtctgatctgctttgatatggattccacacttattgaaaccgaagttattgatgagctcgccatccgcgccggcgtaggcgatgaggtaaaggccattacggaaagcgccatgcgtggcgaaatagactttaccgaaagctttacccgccgcgtagccctattgaaaggactcgatgaatccgtcatgcaggagattgcagaaaacttgcctatcacagaaggagtagacagactaatgtatgtattgaaaaagtatggctacaaaatagcaattctgtcgggaggtttcacctatttcggccaacacctgcaaaagaagtatggtatagactatgtatatgcgaatgagctggaaattattgatggaaagctcaccggacgttatttgggagatgtggtagacggaaaacgcaaagccgaactactccgtttaattgcccaagtagaaaaagtagatattgcgcaaaccattgccgtaggtgacggagccaatgacctccccatgctgggaattgccggattgggaatagcattccatgccaaacccaaagtagtagcaaatgccaaacagtctatcaataccatcggacttgatggggtgctctattttcttggattcaaagattcttatttgaatatgtaattagaccgaaaaataaattatctttgcggacaaataaaataacagaatgaagttttccgaactacaattaaacgcgaatgtgcttgaggcgcttgacgccatgcgatttgacgaatgcacacctattcaggaacaagcaattccaattatacttgaaggtaaagatctgatagcagtagcgcagacaggtacgggtaaaaccgcagcttttctgctccctgtattaaataaactatccgaaggaaaccatccggaagatgcgatcaactgcattatcatgtcccctacccgggaactggctcagcagatcgaccaacagatggaaggattctcctattttatgccggtatcaagcgtcgctgtatatggcggtaatgacggcattctgttcgaacaacagaaaaaaggacttacattaggagctgatgttgttattgcgactccgggacgtctgatcgcccatctgagtctcggatatgtagacctctccaaagtttcttatttcattttggacgaagcagaccgaatgctcgacatgggattctatgacgacatcatgcaaatagtgaaatacctgcctaaagaacggcagactgtcatgttctctgcaactatgcctgccaaaatacagcaattggcaaatacaatcctgaataatccgtcagaaataaaattggctgtctcaaaaccggccgaaaagattatccaggctgcttacgtttgctacgaaaaccaaaaattgggaattatacgtagccttttcgccgacgaggttcccgaacgtgtcatcatcttcgcatcttcaaaaatcaaagttaaagaagtcgctaaggctttgatggcgatgaaattgaatgtaggagaaatgcactcggatcttgagcaggcccaacgggaaacagtaatgcacgaatttaaagccgggcgagttaatatactggtagcgacagatattgtggcacgcggcattgacattgatgatattcgtctggttatcaacttcgacgtccctcacgacagtgaagattatgtgcaccgcatcgggcgtacggcacgtgccaataacgatggagtagcgcttacatttgtcagcgaaaaagagcagagtaatttcaagagcattgagaatttcctggaaaaagatatttataaaattcccatcccggcagaattaggggaagctccggaatacaagccacgctctttcagcaaaagcaggtacggcagcaaccctaaaagaagaaattttcgggggaaaaacggcaataacaacaaaagtaagaaccgcccctctcccagacaacaaaattagaacagcattttttatttagtggaagtgatagtcagtttaccatcgaaacccacttctatctccgcaatgctatatacagaactttccggaatggctaaaactgcttgataatgaaaaccattccggtctacttttacaaacttcgtatcagatagaatagcctgcgacaggaaatcagcaggaataacctgagcaaacatctgcttggtcacatcactggcaaacaaacttttcttgccttcgtacacacaaatgtgcatcacattgtcgtaatacacattgtccatgctaatcccgtcttcggaataagtcgtcttgacaactctaattttggtaggattaatatatacataagcgcgatagcgagtgccattgtatgtcaccacactatcccgttttgtcacttccgtataagtcggtataaccacttcacgacgaacaaatgacaacgaatcattcggatcctcagatttatgcagtttgattatgttgtccgtaatggaatgaaaccagaatatatgttccgcctgcttatctatcttgtagtaagccgtatcatttccatacgtgtaaagcgtatcccgcataaccttaaatgtaatcggagcactttggctatctgcataatagatcgtatccccctctacccgcatcaacggactctccgtttcatcgtccagccaaattccctgcaacagttccttagcagctatatcctcttcctccagttcaagaaaatttggatttttattgccgccacatgacgcagaaaaaatcaccatcaacgatagcactacatatttcatcatttgttccagttttgcataaagatactcttattttttcatttaccaatgcaatagtaaacgaatccgagttcttccatctctttcttatcgtaaatgttacgtccgtccaatacaacctgctgtgccatcgttttctttatgacagcccatgagggtagacggaattccttccattcggtaaccaacatcagcgcatccgcatcaagcaccgcatcatacatatcgcaagcataatagactgtatctccgatcctacgcttgcactcctgcatggcagcagaatcgtacgcacgtacctgacagccagccttcaacagcttatcaatcaggatcaaagccggagcttcacgcatatcatcagtctccggtttgaaagccagtccccacaaagcaaccgtttttcctttcaggtcaccattaaaatgcttcaccaacttttcaaacagaacacttttctgttgctcgtttacctcttccacagcactgagcacccgcattttatatccattctgttctgccgttttgataagggctttcacatctttcgggaaacaagaaccgccatagccgattcccggatacaagaatttacgtccgatgcgcgtatccgaaccgattccgctacgtaccatattcacatcggcacccacaatctcgcacaagtttgctatgtcattcataaaactgatgcgggttgccaacattgaatttgccgcatatttagtcatctccgctgacgggatatccataaagataacgcggaagttatttagcaagaacggtttatacagcttcgacatcagtttctgcgcacgttccgactccactcccactactacacggtccggactcataaagtcgctgatcgcatttccttcctttagaaattccggatttgaagccacatcaaaatggatattcacccctctcttatccaactcctcttgaataaccgcacgaaccttgccggcagtacccaccggaaccgtactcttggtaacaaccaatttatattgtttcatattgcgaccgatagtccgggctacctccaacacatatttcagatcagcgctgccgtcctcatccggaggcgtaccgacagcactgaatactacttccacatcatcgaggcaactctccagtgaggtagtaaacttcaatcgtttcgctttcatattgcgaagtaccatctcttccaatccattttcataaataggaatgataccctttttcaaagattcgattttctcactgttagtatctacgcaagtcacatccacgccaatttcagcaaagcatgtacctgtcaccagacctacatatccggttcctacaattgctattttcatatctttatttattgtctatacagaagttattcaaaatacaccgcatctttgaaagccattccctccttgtctttaggagatagcaacatctgcgactcggcaagcggccaatctatacccaatgtcgcatcattatatataatggaagcctcactttgcggagcatacttattatctaccttatatgtaaaaatagcttcgtcactcaatacggcaaatccatgcgcaaaaccacgtggaataaaaaactgtctcttattctcttcactcaacaaaacacacacatgctttccgaacgtaggcgatgatctgcgcaaatccacagcaacatccaacacttctcctttgataacacgaaccagtttagcctggctatgttcacctttctgataatgcaatccgcgtaataccccaaaggaagacttggattcattatcctgtacaaaatcaacaggaccgatattagcctcaaactcctctttcttaaaagcttccataaagtagccacgttcgtcggagaaaactttaggctctatcagccatactccgtctatttctgtctgtatatagttcattgtcgatggttataaataaaacgatgcaaaagtagtgattttttcgtagttttctgggatatattcaatttatctcttaattttgcacacatgattgaattagcacaacatatagaggttttattgctggaaaacgactgcgtcatcgttccgggatttggtggattcgttgcacattacgcacctgcaactcatgtaaaagaagaaagtcttttcttacctcctacccgtacgataggattcaatccgcaactgaaactaaatgacggagtgttggtgcaatcatatatggccgtttacgacactagtttcgctgacgccagccgcatagtagaaaaagaggtaaacgaattcatctcccttcttcatgaagaaggcaaagcccatctggagaatatcggtgaaatccattataatatttatggcaattacgagttcattccgtacgattataagctaaccactccttctttatacggattggattcttttgagatgcacgagcttgccgccttgccacaaaaggaaagagtgttaataccactcaatccggagaaagaaaagaaaacttatgaaatcagtatcaaccgtacattcctccgcaatgcagcagctatgattgccgccattgtgttgttcttcgctttttccactccggtagagaatacctacgttcagaagaacaattacgcacagttgttacctaacgagctttttgaacaaatagaagaacagtcggttgcaatgactcctgttccggtaaagaacgatgtgaaaccacagagagccaagaaagctaaaacatcaaagcccattgctgtgaaagaagttaaagtggcgaaaccgcaaacagttcctgcgccatcggtaaagccacaagctaatacgaatcacccttaccatattatagtagcgggaggtatcagccttaaagatgcggaagctatggcaaaccggttaaatgccaaaggatttgcggaagcaaaagcgctgaataccgatggtaaagtacgtgtcagtatccgctcattcagcaaccgtgaagaagcgacgaaacagttgttggagcttagaaaaaacgaaacttacaagaatgcctggttactggcaaaataaaaatcccttttaaaaagcatgaaacgagttctttgtcccaaatgtgagaattacctttattttgatgaaaccaagtatagtgaaggtcagtcacttgtatttgtatgcgagcattgcggcaagcaattcagtatccggcttggaaaaagtaaagtcaaagctctccggaaagaagagaatctggaagaagaggcagaatcccataaagaagaattcggatatatcacagtaattgagaatatattcggattcaaacaagtacttccactacaagagggtgacaacgtgataggacggcgttgtgtaggaacagtcatcaatactcccatcgaaagcggagacatgagcatggaccgccgccactgcattatcaatatcaagcgcaataagcaaggaaaactaatctatacacttcgagatgcccccagtcttacgggcacattccttatgaatgaaatcttgggagataaagaccgtatccgtatcgaagatggtgctatcgtgactattggagctactacctttatcttgcacactgccgaataaatttatattcattttggtacatatttttgcatcgtccggtaaaaacaattgccgtgccgctttgataaataaagggtcagtagatttttagtggggatatacataaattttgacgattctattatagcccttgcttttcatcagccacttttagttcaataccatccatgagttttcattttatatgtttatgatcataagataatcagatataaggatacaggtgacagatgtttttccaaaatagtaccgggtagagcggagttgacggcaataaaaaagtgaaaggcgtcaaacccatattgttgcagacaagaatggcttccttattgcagtgatggttacagtagccaatattcatgacagcaaggctgcttaaatatttacacaaataaacaggcaaaaagcaaagggtatcccaatagccataagactatcaagacaccctcttgaatgaaaaaccaaactcagttaaattcaactattcggcctatctccgatatctaaatcaaagaatacccttcacagtttcaagcattcccttttcttgaatagaatccaaatcagcttttacagcttccgtcaatcccgaaattttattcaaatcttcaccccagataaattctgcgcccagaacaccttcggctactttctttgtgcaaccagtagcccacagttctttcagcagattcatgatttcaggagcgtcgttcggcacaatctcagcgccatccgcacgtacgccacccttataataagtaatgatagctgccaaaccaagtacaagtcctttcggaagctcacctttacgttccagataagttttcaatcccggcagatcacgagtctcatatttcgggaaagaattcagcataatgcttgttaccgcatggtctacaaacggattattgaaacgctccaatacatcatttgcaaatttctccaattcatctttcggcaggttcaaagtttccattaactcgtcaaacatcaccttatggacatattttccaattacttcatgctggcaagcgtcacgaacaatattcacaccggacaaataagcaaccggagaaagaacggtatgcggcccattcagcaaagtaaccttacgttcatggtatggagcttccgacggtacaaacaatacgttcaagcctgccttgtcagctgggaattctttggcaatctcctgcggagcctcaataacccacaaatggaagatttcagcctgaaccaccaagttatcgtcatattgcagtttttctttgatagctgcaatatccttgcgggggaatcccggaactatacggtctaccaacgtagcatatacaccacaggcttcttcaaaccaagtcttaaattcttcgcccaaattccacaactcaatgtattgatagatcgtttctttcagtttgtgaccattcaagaaaataagttcgcaagggaagataatcaggccttttgtcttgtcgccattgaatgtcttaaaacgatgatataacaactgagtcagtttacccggataagaagaagcgggagcatcctctagtttgcaagtcggatcaaaggcaataccggcttctgtagtatttgaaataacgaaacgcatttccggttgttccgccagtttcatgaattcgtcattttgagtataagggttcaatgcacggctgattacatcaatcattgtcaagctgttaaccacttctcctttatccaatccttgaagattgacatgataaagatcgtcctgcgtattcaacatatcgaccatacctttgtcaatgggctgaactactacaacactactgttgaaatctgttttctggttcatgttatagataatccaatctacaaaagcacgtaaaaagttaccttcaccaaattgaataatacgctccggacgttgtgccttaggagcagtttctttgtttaatactttcatgttagttgtaatttataaagttgatattatactaattcaaaataaaaatcgatgttttctttaatcaggatatcaataggcatatatttcacaggatcgatatttttcttgaacacgacatgatcacacaaagctttcacaccacaataaccttgcaatcccggccgctgtccgatcaaataatgtacatcccccgatttcagcaactctacatttgctttcaggaggtcatatcctatcaatcctttcatgctacgccctgcatgacggagatattctcccaactgatatactctggaattgaacacaactccgagtacagctttcgggtatgtctcaaagaaccggtccagtgtccgacagttattttcctgattggacttattcaatactacttcatgaatcaccagactatcgtattcctcagtgatatactgcataaaaccttccagacggcgctgcatctgtatttcagcagggttatccttgttattacttaaaaacagtaccagttcctgtccttctcccaccgaataattacgcatcaatatcttagccgcaatgtatccgctcttatacgaatcttgtccgatataggttaatgcattcatttcttccatattgaaatcgacgaaagcatacgctatcccattctctcgcagatagcccgtcaatgataaggtttcttcccggaaattgggagcaatcaacaccgcatccacattgctttccttgatagaacgacaggcttcctgatagctggcttcatctccgtgatggtaacacagataatccacgctcacattgaaaggacgcaactcttgccgggcacgctcaatgccacccactacggaatgccaataatcgtgctctatataataaggaattaagcaaacgaaagaatatttctttttagcagccagtccgatagcaaaaacattgggctgataatgaatttcatccagcaccttctgaaccttagctttgctcttaggagatacgtcaccgcgattgtgcaataccctgtccaccgttccggcagaaacgcctgccatacgggctatgtctttaatcgtataattctggtcctccatagtgttaaaacttaaatattataaataatcgctgcaaatatacgaattattttgttactccaagtaaaatttctatttttgtgttcgataacggttaataaaactaaaacaagatttacacctagtagctttaaaatcaatactatataggtataaatacagaaagtaataattttatatacttaaaacacagtaataatgaagaatttcatggacgagaacttcttactgcaaacagaaactgcacagaagttgtatcacgagcatgcggctaaaatgccgattatcgactatcactgtcatttaattccacaaatggtagccgatgactacaagtttaaatcactgactgaaatctggttgggaggcgaccattacaaatggcgcgctatgcgtacaaacggtgtagacgaacgtttctgcacaggaaaggacaccacagactgggaaaaatttgagaaatgggcagaaaccgtaccctatactttccgcaatccgttataccattggactcatctggaactgaaaacagctttcggcatcgataagatattaaatccgaaaaccgcacgtgagatatacgatgaatgtaacgagaaattagctcaaccagaatattccgctcgcggaatgatacgtcgctaccacgtagaaaccgtatgtactaccgacgatccgatagactcgttggaatatcacatcaagacatgcgaaagcggatttgaaatcaaaatgttgccgacttggcgtccggacaaagctatggcagtagaagttccggcagatttccgcgcttatgtagaaaaattggcagaagtaagcgacaccaacatttccagctttgacgatatgattgccgctttgcgcaaacgtcacgatttcttcgcagcacaaggatgtcgcctgtccgatcacggcatcgaagaattctacgcagaagattatagtgatgcggaaatcaaagccatatttaataaggtatatggcggtactgaactgacgaaggaagaaatcctgaagttcaaatcggcgatgctcgtaatcttcggagaaatggattgggaaaagggatggactcaacagttccattacggcgcaatccgcaacaacaacaccaagatgtttaaattgttaggtcccgacacaggtttcgactctatcggtgaatttacaacagcaaaagcaatggctaaattcctcgaccgcttgaacacaaacggtaaattgacgaagacaatcctctacaacctgaatccatgtgcaaacgaggtgattgcaactatgctgggtaacttccaggatggatctgttgcaggaaaaatccagtttggttctggatggtggttcttggatcagaaagatggtatggaaaaacaaatgaatgccttatcggtactcggtcttttgagccgcttcgtaggtatgttgactgactcccgttcattcctatcctacccgcgtcacgaatatttccgccgtacattgtgtaatctggtaggacgtgacgtagagaacggagaaatcccagcatccgaaatggaacgtgtaaatcaaatgattgaagacatcagctataacaacgctaagaacttcttcaagttctaagtagtatatcaaagttataaatgccgctgcctgaatccaacaatcagacaacggcatttttataacgggtcaatgtaaaaacctgaggggtaaat

SEQ ID NO: 11714 - DNA, 10684 bp, Unknown
  gut microbiota DNA sequence
agaggatggcttttagaaaagaaaataagacgaaaagtaatttctcgaagatctcaattggtctggcttctccggaagaaatccttgagaattcgagtggtgaagttttgaagcctgaaaccattaattaccgtacgtacaaacccgaacgtgatggcttgttttgcgagcgcattttcggtcctatcaaggattatgaatgtcattgcggtaaatacaagcgtatccgttataaaggtatcgtctgcgaccgttgtggtgtggaagttactgagaagaaagtacgccgtgaacgtatgggacatatccagttggttgtgccggtggctcatatctggtatttccgttcgctccctaataaaatcggttatctgctcggattgccgacaaagaaactggattcgattatatactacgaacgttacgttgttattcagccgggtgtaaaagctgaagacggtgtagctgaatatgatttgctttctgaagaagaatatctggatattctggatacacttccaaaagacaatcaatatcttgaagatactgatccgaacaagtttgttgcaaagatgggtgctgaagctatctatgatttgctggcccgtctggatttggatgctttgtcttacgaattgcgtcaccgtgccggtaacgatgcttcacagcaacgtaagaatgaagctttgaaacgtcttcaggtagtagaatcgttccgtgcatcacgtggacgtaacaaaccggaatggatgattgtacgtatcgtaccagttatcccgcccgaacttcgtccgttggttccgttggatggtggccgttttgctacctctgacttgaatgacctttatcgtcgtgtgattatccgtaataaccgtctgaaacgactgatcgaaatcaaggctccggaagtgatcttgcgtaatgaaaaacgtatgcttcaggaatctgtagattctttgttcgacaactcacgtaagtcaagtgctgtgaagacagatgccaatcgcccgttgaagtcattgtctgacagtttgaaaggtaaacaaggacgtttccgtcagaacttgctgggtaagcgtgttgactactctgcccgttcggtaattgttgttggtccggaattgaagatgggtgaatgcggtattcctaaattgatggctgccgaattgtacaagccgtttattatccgtaaacttatcgagcgcggtatcgttaagactgtgaagtctgccaagaagatcgttgaccgcaaggaaccggtgatttgggatattctggaacatgtaatgaaaggacatccggtactgttgaaccgtgctccgacattgcaccgtctgggtattcaggctttccagcctaagatgatcgaaggtaaagctatccagttgcacccgttggcatgtacggcattcaacgctgactttgacggtgaccagatggctgttcacttgcctttgagtaatgaagcaattctggaagcacaaatgttgatgcttcaatcacataatatattgaacccggcaaacggtgcgcctattactgtgcctgcacaggatatggttcttggtttgtactatattactaagttgcgtgccggtgcgaaaggtgaaggtttgacattctacggaccggaagaggcgttgatcgcttacaatgaaggtaaggtagatatccatgctccggtaaaagttatcgtgaaagacgttgatgaaaatggtaacattgtagacgtaatgcgcgaaacttcagtaggacgtgtgattgttaatgaaatcgttccgcctgaagccggttatatcaatacaatcatctctaagaaatctcttcgtgatattattagtgatgtaatcaaggtatgtggtgtggctaaggctgccgacttcctggatggaatcaagaacttaggttatcagatggcgttcaagggtggtttgtcattcaacttgggtgatattatcattccggaggaaaaagagaccttggtgcagaaaggttacgacgaagtagaacaagtcgtaaacaactataatatgggtttcattaccaataacgaacgttacaatcaggtgatcgatatttggacacatgtaaactctgagttgtctaatatcctgatgaagacaatttcttcggatgatcagggattcaactctgtatatatgatgcttgactcaggtgcccgtggttctaaagagcagattcgtcagttgtcaggtatgcgtggtttgatggcaaaaccgcagaaagcaggtgcagaaggtggtcagatcattgagaacccgatcttgtcgaactttaaagaaggactttcggtgttggagtactttatctctacccacggtgctcgtaaaggtttggcggataccgctttgaaaactgccgatgccggttatctgactcgtcgtctggtagacgtatcacacgatgtgattattacagaagaagactgcggtacacttcgtggattggtttgtacagaccttaagaataacgatgaagttattgctactctgtacgaacgtatcttgggacgtgtttccgtacatgatattattcatcctacaacaggagaactgcttgttgccggtggtgaggaaattacagaagagattgccaagaagattcaggattctccgatcgaaagtgttgaaatccgctcggtactgacttgtgaggctaagaagggtgtttgtgctaaatgttacggacgtaacttggctacgagccgcatggttcagaagggtgaggctgtcggtgtaatcgcagctcagtctatcggtgagccgggtacacagttgacattgcgtacattccacgccggtggtactgctgccaatatcgctgctaatgcaagtatcattgctaaaaacaatgcacgtcttgaatttgaagagttgcgtacggtagatattgtagatgagatgggtgaatctgcaaaagtggtagtaggtcgtttggctgaagttcgttttgtagatgtaaataccggtattgttctttctactcataacgttccttacggttcaacgctgtatgtaggcgatggtgaattggtagaaaaaggcaagatgattgctaagtgggacccgttcaacgctgtaatcattactgaagcaaccggtaagatcgaatttgagggcgtgatagaaaacgttacttataaggttgaatcggatgaagctacaggtcttcgtgaaattattattattgaatccaaagataagacaaaagtaccttcggctcatatcttgacagaagacggtgatctgattcgtacttataacttgccggtaggtggtcacgtgatcatcgaaaatggtcagaaagtgaaggccggtgaggttatcgtgaagattccgcgtgccgtaggtaaggcgggtgatatcacgggtggtcttcctcgtgttactgaattgtttgaagctcgtaacccgtccaatcctgctgtcgtttctgaaatcgacggtgaggtgacaatgggtaagatcaagcgtggtaaccgtgagattatcgtaacttctaagactggtgaggttaagaaatacttagtagcattgtctaagcagatccttgtacaggaaaatgactatgtacgtgcaggtactccgttgtctgacggtgctattactccggcggatatcttggctattaaaggtcctacggctgtacaggaatatatcgtgaatgaagttcaggatgtataccgtctgcaaggtgtgaagatcaatgataagcattttgagattatcgtgcgtcagatgatgcgtaaggtacagattgacgaaccgggtgatactcgtttcttggaacaacaggttgtagataaacttgagtttatggaagaaaacgatcgtatctggggtaagaaagtcgtggttgatgcaggtgattctcagaatatgcaagccggtcagattgtgactgcccgtaagttgcgtgatgagaatagtatgctgaaacgtcgtgacttgaaacctgttgaggttcgtgatgcggtagccgcaacttctactcagattcttcaaggtattacacgtgctgctttgcagacttcaagctttatgtcggctgcttccttccaggaaacaacgaaggtattgaatgaggctgctattaacggcaaggttgataaactggagggtatgaaagagaacgttatttgcggtcacttgattccggcaggtaccggccagcgtgaatttgaaaaacttattgttggttcaaaagaagagtatgaccgtatcttggctaacaagaaaacggtactcgactacaatgaagtagaataatacaattcaattgactagataaaggaggagcgattgcctgatgaggtagttgctccttttttttgatcttgaaggtaattggttgtggagggaaacgtatcagatagtctgattgtacatagagtttttttcattacttttgtacaaagtatataggtatttgattaatccttgaataataatgcgacaatcatgaaaaagttctgtttcttgtttatcaattctttatttctagtctctggtattttggcgagcgaaacagattataccaaagggcaatatattcggtttcactacgccattggaaagtcagaatatgtcttggaacttcaacccgatggcaggcccttggttgactactcatatctgggaatattatgactatacaagggatttgaattttttgaaagagacaggatatgaactgatcaagagtagtgcggattttgaggttgatatgatatgggagaataatcagttgaaagagccacggtacgttccggtgcgggaggaaattgtgtgataaagtatgggaataaaatgttgtcctttaaaaacataaaagggcaaagttatcagctaaaatatgatgtggctaaaggattgatgaaagaaaaatgagagtatagtcttttctgagtgtacggaaaatgaaatcccggcgaaactttgatcgtttcgtcgggattactgtattgagatattgtttattagctcttatttgcacgtttgcgttctatctcgtctagaattactttacgcatacgcattgctttcggagtaacttctacatattcatcctccttgatatattccaatgcttcttcaagagagaattgaactggaggaatcaaacgtgccttttcatcggaaccggaagcacgcatattcgtcaacttcttcgatttggtaacgttgataaccaggtcattgtcgtgagaatgttcgcctaccacttgtccggcatacacttcgtcttgcgggaatatgaagaacttgccgcgatcctgcaatttgtcaattgcataagcaaaagctgttccgctttccatagcgatcatggaaccgttggtacggcgttctatctctcctttgaatggctgatattctttgaaacggtgagccataatcgcttcaccggcagaagcagtcaatacattcgttcgtaagccgatgataccgcgtgagggcatgtcaaactcaagattgatacgttcgccggtattttccatcttgaccatctcacccttacggcgtgtcaccatatcaatgatcttgcttgaatactcttccggtacgttgatagtcaattcttcaatcggttcacatttgacgccgtcaatctctttgaaaataacttgcggctgccccacttggagttcgtatccctcgcggcgcatcgtctcgatcagtacggaaaggtgaagtacaccacgtccggaaacgatccatttaccatcttcctcacttttctttacgcgaagagccaagtttttatctagttctttcatcaagcggtcgtggatatgacgtgaagtcacaaacttaccgtctttgccgaagaacggagaatcgttaatggtgaacaacatactcatggtcggttcatcaatagcgattggcggcaaagcttccggattttcgaagtcgcaaacagtatctccgatctcaaatccgtcgatacctaccaatgcgcaaatatctcccgatgagacttctgtcgttttcacacggcccagaccttcgaaaacatgaagctccttaattttagtcttgaacatatcgccattgcgttttacaagcgttacgttcataccttcttttaaagtaccgcgatgtacacggcctacggcaatacggccggtataggaagaataatccaaagaagtaatcaacatctgcggagtaccttccaactgttgtggagccggaatgttttcaacgatacaatccagcagaggggtgattgtatcggttggcttttgccagtcggtactcatccagttgtttttggcagaaccgtagataacggggaaatccaactggtcttccgtcgcattaagactgaacatcaagtcgaataccatttcgtaaacctcttccggacgacaattaggcttatccaccttattgactacgacaatgggtttcaaacctatttccaatgctttttgcagtacgaaacgggtttgaggcatgggaccttcaaaggcgtctaccaacagaatacagccatcggccatattcaacacacgttctacttcaccaccgaagtcactatgtcccggagtatcaataatattaattttggtaccgttgtagttgatggaaacgtttttagaaagaatcgttataccacgttcacgttccagatcgttgttgtccagtataagttcaccactattttggttgttgcggaacaagtttcccgccaatagcatcttgtcaaccagcgttgttttcccatggtctacatgggcaatgattgcaatgtttcgaatattttgcatataatacctattatttggctgcaaaggtacgaaaataggattagaaatatgtgcaatgatagcaattttttcttgtaaaacgttgtgggatataaagataatacctatctttgcacgctcaaaagaataatttactatattaaaattctaaaagttatgtatttagacgctgctaaaaagcaagaaatcttcggaaagtacggaaagtctaacactgatactggctcatctgaggcgcagatagctttgttttcctaccgtatttctcatctgactgagcacatgaagctcaacagaaaagattatagtacagagagagctttgacaatgttggtaggtaaacgtcgtcgtttgcttgactacctgaaagcaaaagatatcgaaagatatcgtgcaattgttaaagaactcggtttgcgtaagtaatttacttgtgcgaaaagattgaaaagccgttccttgttagagggaacggctttttatttcttcttttgggctgatgagcatattttctcacttataattgtgtccatctaaagaatttgctatttttgcagtttaattattataaattatcacctttgatatctaaaatgctttcaatatggatacaagtaaaattgtcggcgaaaaaattaaagctctgcgagaagataaaacaataaccatagaagaactggcgcaacgttccggtctggccattgaacagattgaacgtatcgagaataatatcgatattccttctcttgcaccgctaattaagattgcgcgcgtgctgggagtgcgtttgggtactttccttgacgaccaagatgaagtaggtccggtggtatgccgtaagaaagaagcgaaagatgcgattagtttctctaataatgcgattcattcccgcaagcacatggaatatcattctttgtcgaagtcgaaagcggatcgccacatggagccgtttattatcgacgtaatgccgactgaggataccgactttgtgctgtcttctcatgagggagaggagtttattatggtgatggaaggtatcatggaaatcagttatggtaaaaatacctatctgctggaagagggagatagcatttattacgattccattgttcctcatcatgtgcatgcctacgaggggcaggccgctaagattctggcagtgatttacactccaatttagcgaaatacggttaatcattaattactaatcaattaatcactaactacatgcaattatttgatcgtactttgggccagtggctggaacactgggctgaagagacccctgataaggaatatatcgtatattccgaccgcaatctccgtttcacttggagccagttcaatcaccgtgtggatgatatggcgaaaggacttatttctatcggtgtggaacggggaacccatgtcggcatttgggcggctaatgttccggattggctgacgttgctttatgcttgtgccaaaatcggtgcggtatatgttacggtaaatacgaactataagcaatccgagttggaatatctttgccagaactcggatatgcataccctttgtattgtaaatggcgagaaggatagcgacttcgtacagatgacttataccatgcttccggaattgaagacttgcgaacgtggtcatttgaagagcgagcgttttccgtatatgaagaatgtaatatatgtcggtcaggagaaacatcgcggaatgtataatacggcagagattcttttgttgggagagaatgtggaagatgaccgtttgaatgagctcaaaagcaaggttgactgccacgatgtggtcaatatgcaatatacgtcaggtactaccggattcccgaaaggagtgatgttgacacattataatattaccaataacggattcctgaccggtgaacacatgaagtttacggcagatgacaagctttgttgttgcgtaccgttattccattgtttcggagttgtgctggctactatgaattgtctgactcatggttgtacacaagtaatggtggagcgtttcgacccgttggtggtgttggcttctatccacaaggaacgttgtacggctctttatggagtacctactatgtttattgccgaactacatcacccgatgtttgacctctttgatatgtcctgtcttcgtaccggtattatggcgggttcgttgtgtcctgtcgaattgatgaagcaggtagaagaaaaaatgtatatgaaggtgaccagtgtatatggattgacggaagcggctcccggtatgacggctacccgtatagatgattcatttgatgtgcgctgtaatacggtagggcgtgattttgagtttacggaagtgaaggtgattgatccggagacaggtgaggaatgtccagttggtgtacagggtgagatgtgtaatcgtggatataacaccatgaagggatattataagaatccggaagctacggcggaagttattgatgagaataatttccttcattcgggcgacttgggcattaaggatgaagatgggaattatcggattaccgggcgtatcaaggatatgattattcgtggtggagagaacatttatccacgtgaaatcgaagagtttctttataaacttgatggagtgaaagatgtgcaggtagccggtgttccgtcaaagaaatacggagaggccgtcggtgcatttatcattctgaaagaaggtgtgacaatgcaggaagaagatgtgcgtgacttctgcagaaataaaatctctcgttataaaatccccaaatatatcttctttgtggatgaatttccgatgacgggcagtggcaagattcagaaattcagactgaaagatcttggtttgaaactttgcaaggagaaggggatagagattatttaaatgaagaatgaataattttacttttcttaggtataaaaagagactgtcttctaataggcaaaaagaagacagtcttactttaattatatgcttagagctcatttataacttctgaatttcttccggtaataatcctgtcgctttttggattgtctctgtgtccaatcccattgatttcagatttcgggctatttctatacacccttccatttttccttccatgcgtccttctaattttactccatccacacgtcattttgtatcatgatggcactcaggtgttcgtcataagcatagcgttctgcaggagacatattataataaatcagttttttacgagcttccgtcaaaccgggagcctgggtgtcagaacggatacagccggtttttaggtactcaatccattcctctaaaggagtgactgctactttattgaactcgtttacgcggattaggaagtactctgggaaaatccctgcaggaagtttatggacgagagcgtccttttcttttgttgttacttcaagcgatctccggtgtgtactccagtgaagctattctgtccatgatataaataatcatttccttttccgatgtcgaagtacagaatgctaatggaataaatctttttcacttcgtagtagcgttcgccaagagaaatgtgttctgtgattgctttggcgacaccgtaaaggatacgttccaagtaatacaactcacgcgtattttgaatctctactatgatgatttcgcctttgctgtttttggctttgatatccacggattgaacttgtcatctacgctttgctgattactttcgctttccagcagttctatgattttcacttcttcacccaaaaggaccgttaagaatccctcgagtacgtcgaaattcgctttttgacggagaaggcattttacggctcagtcaaaccgtatatatctgtcctgctgctccatatcctatcttttttgattattgcaaagttacgatttttttcagacttt

SEQ ID NO: 11715 - DNA, 20097 bp, Unknown
  gut microbiota DNA sequence
caccatgacaattgatatgtgcgttgattccggctattaatccttgtcctccggcttcttcatatccggtagtaccattcacctgtccggcaaagaatagatttttgataatcttcgattccaacgtatgtttcaattgtgtcgggtcgaagtagtcatattcgatggcatatcccggacggtagatcaccaaatctttgaatgccggaatttgttttagtgctgcaatctgtatgtccatcggaagtgaagaagagaagccgttcaagtacaactcctgagtcgtctcgccttccggttccagaaatagctgatgctggctcttgtcagggaaagtaacgatcttggtttcgatactcgggcaatagcgcgggccgatactttgaatctgcccgttgaatagaggggaatccggcagaccttcacgtaggatacggtgtacctcctcgtttgtatagcaagtccagcattgcagttgttttaaatgccgcacacttgtgttcataaatgaaaatttatggaagtcacattctccgtcttgtgtttccatccggtcaaagtggacgctacgtgcatctattcgtaccggagttcccgttttcattctgccgtatgtgattccgtgacgggcgatggattcagtcagctggtaagaagccggctcggccattcttcctcccggcaacttatgacgtccgatatgcataagcccgttgaggaaagttcctgcggtcagtacaatgcattttgccttgaaggtaactccccaaactgtgaccaggccggtcacttctccgttttctaccaaaagttcgcagacggtatcctgccaaatatggagattgggtgtattttccagtctctcccgccaagaccagataaatttggcacgatcgcattgcgctcgcggactccacatggcaggaccttttgaacggttcaagattcggaattggatggccgtctcgtccgtaaccaatcccatctgtccacccaatgcatctatttcgcgtacaatttgtcctttggcgattcctcctactgccggattacagctcatttgcccgatcttgttcatgtccatggtgatgagacaagtctttgaacctaaattggcggcagcggctgccgcttcgcaaccggcatgtccggcaccgattacaattacgtcgtacttaaaatccattcctgttttatttattatctaacgctgcaaagttacagaaaagttgtgagagttgtatcctcaagctgtttttgcttccgaaaaatcggggaggggaacgggcggattgaaaaaaacgccgtgatttcgggttatgaacatacagtttgttcaaaaaataaagttattcttgttgatttagtggtttactctctactaaaaagtaagaattttgcctctatatgttctcgcatgctttctttttgctacttcgaaaattatcggaattttgaagaaactagggtttgctaaggaagaattaaagaaaatagtataagcagtgaggttaaatgtgccaattagcctgtctttttatctgatctcttgatataagtcaaaaaaacaagtctgaatatattttttaataaaatggctcttgtcattttacaaaacagctatacctttgcagtgtggttgtgaaactacttagatttttaggtattagaaagagtaaaattaaaaggtgaaaattagaaggtattagtttataaattttaggtattagcattttaagattgtttttcaggaaaaaagattgttttattaggtattaagtaaaaagagtagtttttgggtaacaagtaaatgaaagatgaaaaaaagaagaatcccgttttatggggattctttaaggtagagcggaaggattcgctctttttttatgcccgtttgtgtcattagcagtactatttcatagatgaatactttgtagtcttattctagattggcgctcttttcagattattaaagcgacattccattcgttccacgctagtggatagaatcattcacttgagtagacggaattgttcactatagtgcaatgatctgttcactggagtgcaacggtttggatgcgcgatagataatacgggagcgcagcttgataaaacgctcttgaatgcttccttgcatataaatgtctgttagttgtgaggcaaagtgctgcttgataaaaaagaagaaaaatgttgcatttgttatgaaaggaaagaagcagtatgagagatgcaggcggaaaatatgagatatacgagattttaaattatctctcattatataatcatttgatgatatgatgtttacattaatttatgagaggtatgagagatggaaatgaaaaaaatctcgaggtgcaagccggatattttgaacgagaggggagtcggtcgagctggttgaaagttacttttattttctattttatagtttggcgaagcttatgtttttgaaaaaaacaatatatttgcatttgtaaatatcgcaaaagtaagtagttgcggcgattttaatgaattttgtttgtttttcgcaggtagtgtgacagtatgaacgataaatttgacactatagtagcaggagtcaatcgaaaggatgaaaagatatggggcgatttctatgatcgtttttatgctgctttatgtgtttatgtttccaaaatattgccggttcccgatgtggtggaagatttggtccaggaggtgtttatttctatttgggagggtaagcgtactttctctgatatcagagaactcaccaattatctctatcgtgcctgttataacaacaccttattatatatacgcaacaatcagattcatgataccattttaagttcccttgctgaaggagaaagcgtagaagatgaggatatgatttatgctttgacggtgaaggaagaaatcatccgtcagttgtatcaccatattgaagagcttccgaccgagcaacgccggatcatcttactgagaatcgaagggtatacttgggaagagattgcggaacgtttgggaatcagtatcaataccgtcaagacccaaaaggcgcgcagctatagatttctccgtgaaaaaatgggagatgcgatgagttttataattctttgtttatttctctaaaaataagaaaaaaacaatctgatatgtatttctctttttatagattgattaagttttattttttttgttaaaagcactaccttccccttttattatgtgacaaaatgatatatttctgtcgctgaaatctcgctatttatattattcttccgaaaaaatatcatctttttgtcacccttttttatggattatgtatatctataataaagagaaattaaacagtcgtttaattaaaaatggtcaataagatgaataagtttgaaaatgtatatcaagatgccgttttgatgagaagagttcttcttggcgaagcggacgaagcggagcaacaagagcttgaaaagcgattggaagagtgtccggagttgcggaagatatacactcaattgcaggatggcgggacgttgagcgcagcctttaaggaacgtcaaaaatattcatcgagaaaagcttatcggtctttccttcaaaagataggacaagttgagccgaaaggacaaagacgccgctctcttcgcatcggatggtatattgctgccgctgttgtcattttggcaataggactttctttttatgtgtcgaattacacttcaccggaaaaagaaaataagactttgatccagccgggtacacaacaggcacaattgactttgaccgatggcagtgtcattgatgtggataaaaaagaagtaaatgtggtagtagatggcattcaggtaaaatataaagaaggagtactgtcttatcaaacaaccgctgcaacacaacacgaagaaaaaaacgttgaagagcaaccggaaaaatcaaatgaactggtcataccgcgtggaggagagaacacggtaatacttgcggatggaacgactgttcatttgaatgcaggttccaagttgacctatcctgtgcgtttcaccggcaaacgtaggattgtagctttggagggtgaggcttattttgacgttgttgaaaatgaagaacatccttttgtcgtacagactcgttttggcgaggtgactgtgctcggtactgcattcaatgtcaatgcttatatcaatgcttctgcctgttatacgacattggtccgtggtaaagtacaattctctgcaccgaatgcggaagttatcaccctcttgccgggtgaacaggcaattgtttcggctaatggttcggagaaacgtgcggtggatctggaggagtatgtaggttgggtagaaggtttgtatgtttttaataatcgttctttaggagaaattatggagacattcgaacgttggtacgacatacaagtatattatgaaaccgaaaatttacgcaatataacttatagtggtagtttgaagcgctacggaacaatcaactcattccttgaggcattggaactgaccggtgatctgacttataagatcagtggtcggaatatcttgatttatggtaaaatgggagaattaggagtaaaatagagtattagataagtttaattgttaatttatgagagaaagacgatggctgctatgttttttagtggcgatgtgctgcacgcttagcacatgggctttaccgtcacaagacaagacggtgactttgaatctgcgtaatgtctcaatcgagacggctttgaatgcagtgaagaagcagacaggagtgaatatgttgtataattcgcaaatgtttaagggagtttctccggtatctgttaatgtgaaaaatgagagatgggaagtgacccttaagctgattttgaatccgaaaggatttgattatgcaatgaaagatggtattgttgtcattcgtaggatgcatacagagaagcgggtaaatcgtatccgtggtacggtatttgatgcaaataaagaacctataccgggagccagtattattgtgaaaggaacccgtacagggacttccaccaatattgaaggtgaatttacactggatgtgagagatgataaagtagctttggaaatctcttttatcggtatgaaaaagcagactctccaggtagatgcttctcgtaagaaaatgctcgagataacattggtggatgatgtcaagacattggatgatgtggtagtaacaggatatagtaatgtgcgtaagactagttttaccggtagttctacgcagatttcgggtgatgatttacgcaaggtgtcgcagaccaacgtaatcggtgctttgcagacattcgacccttctttccgcttggttagcaatgcccagttcggttccgatccgaacgcacttccggagatgtatatacgtggccgttccggctttggggtaaaagaactggataaagatcaactctccaaatcaaatctcgaaaataatcctaaccttcctactttcattatggatggttttgaggtgagtatcgagaagatatatgacttggaccctacccgtattgagagtatgacaattttaaaagatgcagctgctacggctatttatggttctcgtgctgcaaacggtgtggtagttatcactacagttgctccaaagccgggagaagtccgtgtttcttataattttaccggaactttggaaatgccggatctgagagactataatctggctaatgcatctgaaaagctagagatagaacgtcgtgcaggtttgtatgacaaaggtaataatggcaacaacacaacggcagatggtttgaataaatattatgaaaaatatgcattgattcaaagtggtatagatacagattggttgtctttgcctttgcgtaatgcttttgaccataaacatagcctttatatagaaggtggtactcctaatttacgttatggggttgatgcatcatacaatggtggtaatggggttatgaaagggtcaggacgtgaccgttatagtattggtttttcattggattatcgagtaaaaaaactacaagtaaaaaatacggtaagttttggacatactaagtcgaaggaatctccttatggtgctttcagtgattatacaagtttattgccctatgagactccttataaaaatggtactttggtgaagcagttgtactattctaggaaaggtagtaattctgttaataatcctttatatgaagccacactgagcaattatgagtggagtgcttatgatgaaattatagataatctgagtgtaaactggtatttgaacgattatttaactgttaagggtcagtttagcgtaactaaacaatataccagtagtgagcgtttttatgatccgttatcttctaaagtttcagtttatggtactacggataccaaattgcagggtgatttgttcaccggtgaaggtagtagcttgagttggaattctaatgctttcttatattatacccgtagctttggaaaccataactttaacttttccggtggttgggaagcctctgcttataatactgagaacacctctgcccaatatcgtggttttccgtccggtcagtttaattcgttgaattatgcttccgaaatttacaaaaagccgactcttacagaaaatacgacacgtcgtgtcagtatattggctactctgaattatacttggaatgatatttatttggccgatgcttccgttcgttttgacggctcttccgaatttggtgcaaatcagaaatgggcacctttcttttccggtggtttgggtgtgaacattcataattatgatttcctgaaaggaaatgagaagattaataaattgaaggtacgtgcatcttatggtcgtaccggtaaagtgaatttcccagcttatgcagcaactactatgtatgaaactttatttgatgaatggtatattacaggttatggagctgttcttaaggcgttgggtaataaagatttgtcatgggaaaagactgacaaattcaattttggtattgagacccaattctttaatcaacgtttaacagttgatttggactattattatgagaaaacaattgatttgattaatgatgtgacactgtcacaaacttcaggtttctccacctacaagaataatatgggtgaggttgagaacaaaggttttgaaatgcagatacgtgccgatatttacagagatcgtaactggtcagttgctttatggggaaatatggctcataataagaacaaaatattgaagatttctgattctcagaaagcatataatgaacgtgttgcggaattttataaaaaagaattacaatatcaggcaatttataatacttctttaaaagatgccaattacgcagttccgatttcgcaatatgcggaaggggaatcattgacttctatttgggcagtccgttctttaggtattgatccgactacaggaaaagagctattcttgaacagagacggtagcattactgatacatgggatgcaagccaagaggtggttgtgggtaatactgaaccaaagctaaacggctcaataggtctgaatgctacgtataagaactggagtttattcgctgcttttcaatatgagtttggaggtcaggagtataatcagactttggtagatcgggtggaaaacgcagatattgctaatggtaatgtagacttgcgtgttctaacccaacggtggcaaaaacccggagatgttgccgaatttaaaaatattgcagatagtaaattaacgactttaccgacatcccgttttgtgcaagataaaaagtatattcgactgagtgctttgacattaagttatgactttaacagggaatggattaagaagcatttacatatgaatatgttacggttggaaatgagctccagtgattttattaattggaattctattcggcaggaacgcggtttgagttatcccaaatcttggaaggtggatttctcgttaaaagcacaattctgataaaaggagaaagaaatatgaaaaagatatataaaacgattgtcttactagggacgatagcaactttaggaacatcatgtaatgattggttaaatgtatatccgtccgatcaaatcaaagaggaatttctttttgaaacaggagatggataccgtgcagcattgaatggtatctaccgtaaaatgacttcatggagtatttatggcagtaatctgaaatgggggattatagatgcttgggggcaggtatatgatatggaactgtctgcaatcgccaatggcgggcagcctatgaagaaaattgagattctggattttaaaaatttagagctgactccaactacagaccaaatgtggagtgatgcatggaatatagtggcaaattgtaatgagttggcgcaacaggcggaattggctgatagtacacttttttatgaaggagagtcggagcgccggatgattttgggagaagccatcggtttgcgtgcttaccttcagtttgatttgttacgtgtatatgctccttcacctgctatgaatccgggagagcgtacatttattccatatgtaaacacctatccggcttatgttaataatcgtgagacggtttcctattgtttggagcaaattattaaggacttgcggaaagcgcaggatctgctgttgaaagtagatcagaattcaaattggagcgaccgttttgaagaagtaaagaatgacgaaaacctgtttaaggctagtcgtggatttcggttgaactattatgccgttactgccgaattggctcgtgtgtatctgtatgcaggtatgcctgacaaggcatatgaacaagctgatattattattcagaaaagtgatttatttgctgcactgactgatagagaagaggcgctgaagagaataaaagatggtaatttgaaaatgtatgatgacattatatttgcactttactctcctacagaccaggtggagtgggatcgcttgataaatcattctgatgataaggctgaaggtagtacagatagagaatattttttaggtatttcttctgctattgccagagaacgttatggtgatgatttggaaacggactggcgaatttgcaatcaaatggaacagagaaagagtggtgattatcgtacattaaaatattacgagcagttgaatagttataaatatgctgaagtcaacaacatgattgtacctatgttccgtatgtcggaggtctattatattgctgcagaagctatttataaaaaagatctggacaaagcgaaagactatttgaagcttgtgaaaaaaggcagaggagttgaagatgatttaggcaatgtgacagaagcagattttatggatgttcttgtgaatgacgctcagagagaatttctgggagaaggacagacttttttcatgttcaagcgtttaatgaggacaatgaaaggaagggaagaagtacaagcgactgaaaagaacatggtgttgccgttgcccgaatcggagagtgctatttaatttaaaaagaataaaaacttatgagaacaaaagatatattgtttgcgggagtaatggtatgcatgggcatgtcattctttatttcctgtcaagaagaaggactggttgttaatggtaatgatgtatcttatatcaactttaataaagacataacaaaagatacgactagaatttgttttgagttttatcctatggaagaaggtatggatgtgaaaatagcagaagtgccgatagaagtggctatttccggtaaagttcaggataaagatctggaatttactatcgggatagatgagagtctgtctacttatcctgcatcccaatgtattttgccggaaaaatgcatttttaaaaacggacaactattggatacgatttatgtaaagctgaaaaattcggatgatttaaagacggttaccaagtatgttgcattaaaaataaatgcaggtggtgaagtcagtgaaggcttagccacctattccagggctatcattgctgtgacagaccgtcttgtaaaacctgaatggtgggactataaagacctatatgacggtgagtacagttcggttgactggtattatctgggagattattcggataccaagtaccgtctgtttttaaaagtgttacaggagaatgatgatgtattgttcgatggtaaggataaggtgaaattgcgcaaatattctttgcaattaaagtatatggtagaagaaataaacgctggaagagatcctgatgatccgttgagggatgaaacaggtgcgattattgaaataccggttgtaggataattaaagattaatgatagtatgaaaagaatattgatatatatatattttttggctggcataatgagtttttcaggttgcctggatgatgaaaacaactatgattatagtgaatttaacgagttggaggggagagagattggaggaatgaaagacgaatattttctttcgtatgctcaaaagttgactattactccgacttttgaatttactattgataaggaaaatccggatgtatcttatgaatggagactggatggtgtattgttgccggaagaaaccgggccttcttgcactttcagttttgagcgtgggggggtacatgaagttacttatacagtaatcgataataaaagcggggttaagttttccaggagttgtacgcttagggtacgttcaccattcactcgtggttggttgatattgagagaaggtgaatctcaggagtctgaactttcttttgtcggtgccagttcggttcttcataagatgacggttactgatggtacaacaatagctgagattgacagagactcgcttgtgtatgatcaagtagtagagaaggtttcggatggattgggatctaacccggtcgggttgtttttgaatgcaggttatttaggtccgtatggtgaagtttttgagacaagtgatgaagtgggagtgatgcaggaccgctgggtggaactgaacggtagcacgttagagcgctctgtttatacagaggatgagtttagaggagatttgccggaagccggtttacatcctcaggctgctgctatgactttttccgctaaagctttgttaaattccgatggatatatttattgggcgggtacggcttttgccagtgattttcattcttgtgcttatacctcctttccgttgggaaaggataaaaagttcaagggagtttatccaagctttaagctcaataagcatcatggagctattccggcttacacagcggataatgaaattgtggggatcattgatgatgcggaagttgtttcttatgctgatcctagtataaaggaatcgacttatagcagtggagtgcatagtgtacaaacaggagagtatgaggaagatcctgtagatgatagatataaattggggaatggagaattgcttactataatgccggcaacctcaaatgatgaggggtatcaggatgttaaacctagttgggtcgcaattgtacgtaacggttctcagtatgaactgttatattttcaatggaaagtgggaaactatagctattcaagcagagtttctaccaaagtatttgaaaaattctcacttgatggcttgactggatatacagatatggcagtatttaatatcaagcagtatgtggtaattgctaatggaaacgatttgtggtattttcaatatggggcaggtgataaagcggtgttgaaaaagttgcattcatttgattctcctgttaaggcattggctgctaatgatattaatgtatggtattctggagaaccggctaaatggcaaccggaacataacgggcaattaggagtagcattagaggatggcacgtttggcatttatgaagtttgggaaacggaagacaaacaggcgttggctacagatgtgaagattaatcagcttttcccggatccaaaggctgagaccccggtgaataataattttggcaatattgtagatattatttacaaatatggctctatccgagattttgtatcattcaatttttaaaaaaaaaatcatccagacacgatatgggatataaatttggaatactattggctttatttgccggaggtttggttactgttgccaaacctcagcaacaggctaattatgaacttgcagagaagttcaatgcttttgatttaggtggaaaactttccagaaatagcttggccatttatccgcatgagattaatggtacagataatttctggtttgattttcagacaacagacgggaaattctattattatgtgactccggcaaatggcaaacgggaactgctgtttgacaatgatgaaatggcaatggctcttacggagttgacgagagaaacaattgatcctaaggacttttcattccatgaatttaaattttccaaagaccagaagtcatttacttttgaacatagaagcaaaacttatgagtataatcgcataaatcgtaagttgaaagaaatcagaaagacagatgacgataaaaggacggagggagaagttatatattcttggatgaatttttctccggacagaaagtatattctatatgcaaagaaccacaatctttatgtaaagggaaataaggcattgggaatggatactaccgaagtgcaattgactttcgacgggatgccttattatacgtatgcacgagagcgggatggattcgaaccagataaagaaatggctaccaatgcgcgttggtgtaaagatagccgccatgcttacttcgttttggaagatgaacggaaattacgtgattcttgggtgattaattctttatctaaagtcccccaattggaaaaatataaatatgaatttccgggtgacaagcatgtaacacaatatgaattagtgattattgatgcggtgaataaaacagccaggaaagcgaatgttgataaatggcctgatcagtatgtaatggtgtttgaaacttcttccaaaggcgatttggtgttctttgaacgcactaaacgaacgtgggatgaagtggatgtctgttctgtaaatacaaatacgatggaggtaaaagaaattattcatgaagtggataaaccttatcgtgatcctcatgctcgtaacgttgtcatattaaatgatggaaaagatatcttgttccgttcggaacgtaccggatgggggcattattatcattatgacggagatggaaatttaaagaatactattacatccggtaaatggaactgtggtcatattgtggctattgatacattgggacgagaaatttatttctacggttatggtaatgaggacgttaatcctttttactacagggtgtataaagcaaatattgataaggaaggggctacgcttatcagtaaagaagacgggcagcataatgctcattttttgcagtcgagacgttattatgttgatacttattcacgagtagatatggaaccgaaaattcttttgaagaatgatcagggaaagactatcgttgagttggcaaagccggatttacgggctgtatatgatgccggatggaaacagccggaacggtttgtggtaaaggctgctgataatgctactaatttatatggcgtgatgtggaaaccttcggattttaatccgaataaaaaatatccgattatttctgtagtttaccccggaccttatttcggatttgtacctactggattttctttatccgacagatacagttcgcgtatggcacaattgggatttatcgtaatcgctgtaggacatcgcggtgattctcctatgcgaggaaagacatatcatcgttttggttatggtaatatgcgtgattaccccttagcagatgataaatatgctatcgagcaattagccagccgctattcatttattgatattaataaggtgggcatttatggtcattcgggtggtggctttatggcagcatcagctatcttgacttatccggatttttataaagctgctgtttcttgttccggtaatcatgataattatatctataatcgcggatggggagaatgttataatggtgtgagggagatagaaaagactgtgaaagatagtttaggtaatgagagaaaagaatacgaatataaatttagcgtgaaaacaaatgccgagcttgcgaagaatttgaaggggcatttgatgcttgtaaccggtgatgaagataaaaatgtaaatccggctcatacttatcgtttagcacatgctttaattgaatccggcaaggattttgatatgcttgtcattccgggtgccggtcatggatatggctctgctgataagtattttgagaaaaaaatgtatcgtttctttgcaaagtatctgctgggagatgaccgggcggattattggggagacattaaccgcaacaaataggacaatagataagatttatgaaaaactccctcttcaaatatgcatgtccggtggttgccttgttggtatgcagctttgtcagcgcacagcagaaggcgaattataagctggcggagaagtttcgtttgttggagcagaatcctatagtaaagtattcgacagaagtcaggccgacatttattaacgatacggattgtttctattattcttttacgacacgtgaaggaaagaaatattattatgttaatccgaagaagaaagaaaaacgtttgttatttgatacggatgaactattaagcaaaattgcagcatatacaaagaaagcttattcttcggcagatccatatttgtctttcacctttatgaaagataacgaaacgattcgcattgattttgaccgtgggctttatacgtataatattcatacgaaagtgttggagaagcttaatgaaaagccttcttatgggaatgctgacccgtattggatgaaatattcgccggacagtcttttctttttatatgcaagccgtcataatttgtattttgtaggcaatcctcaaaaggggcaggataccatacctgtaaaattaaccgctgatggggaaaggcattatactttcaaccgtgaagaagaaggagaatcagaaggacggtttggagccgaatccgctcattggattccgggtactcatcgtttttatgccgtgcgtgaagataatcggaaagttcgtgattcatggctcatcaactcgttggatactccttatccgacattgaagacatataaagccgagcttgcaggcgataaatatgttacccaatatgaattgttaattggtgacgtggatagccgtgaagtgaagaagattgatattaaccgttggccggatcaatatatcgatgtcctttacgtctcgggagatggaaagcgtttgtattttcaacgttataaccgcacgtggaatcaggcggatatttgtgaagtggatgtggagacgggaaaagtccgtgtcgtgattcatgaggaaaacaagccttaccttgactaccagatgcgtaatgtttccttcctgaatgacggaaaagaaatccttttccgctctgaacgaaatgggtggggacattattatctttatgatacggctaccggtaacctgaaaaatcaagtgacggatggtacatgggtagccggtccgatagcgaagattgatactgttagacgtaaaatttatttttatggttacggtagagagaaggaaatcgacccttattattatattctttatgaggcacagttggaccgttcgaatacgcttcgtctgcttacatcggagaatgcttcacatgaggtcagtatttctccgtcttgccgatatttggtagattcttactctactgtttcgcaggaaccggtaaatgtggttcgtaaccggaatggaaagataatcatgaccttggagaaaccggatcttcagcctgtctatgagatgggatggaaagcaccggaacgttttaaggtaaaggctgccgatggggtgaccgatttgtatggtgtgatgtggaaacctgctgattttgactcgacgaaagtgtatcctattatttcgaatgtttatccggggccattttttgaatatgtacctacacgctttacgattaacgatgtttataatacacgtttggcgcaattgggatttattgtaatcactgtagggcatagaggtggtactccgatgcgggggaaggcttatcacacttacggatacaacaatatgcgcgattatccgttggcggatgacaagtatgctattgagcaactggccgcccgctatccgtttattgatattactaaagtcggtatttacgggcactcaggtggtggatttatgtcggctgctgccatttgcacttatcccgatttttattcggctgccgtttcgtcggcaggtaatcatgacaatcgcatttacaacaaaggttttgtagagattcatttcggtgtagacgaaagggtgaaaacgactaaagatagtttgggagtggaaagtacaacttatgattacagtgttcgtgtgcgcccgaatcaggagctggcgaagaactacaaacatggcttgttattgtttacgggtgcgatggataaaactgtaaatccggcccatacattgcgtctggcggatgcattaattaaggcagacaaggatttcgatttgtttgtattaccgaaatgcacgcacggattcttcggtgagtctgaagaattttttgaacataagatgtggcgtcattttgcccgtttgctgctatatgataattcggctgattttgatgttgatttgaataaagatatgattaaagatgacaggagaagataagatgaatcggatatttatgtatataggggttatagtggggttggcgttaggagctaatcttccggttgaggctcagaaaaagtcgttggatatagaggcatgtacattatggaagcgtattgatgcaccggatatttcaccgacaggcagatgggtgacttaccgtatatcgttaatggaatataatccggataacagagaagagaagccattgcatctatttgattctcatactcgaaaagagatattgttggatggtgatatagaaagattggaattttataataaggaccagggagctttttatcaacagacagactctgggggagtaatgaaaacaatcttgttatcgttgccttcaggaatgaagaccgaatggaagcaccaagaggattttcaccctgtagaagggaccccttattcaatttcggttattaatgtacccaaagatactacaaatcatgttccggcttttaacaggctggtgatacgtcatctgaaaacagaggttgcttttcatattgacagtatcggctatcataccttgtatgacggaggacgttctattcttttcattcgtaaaaagtccggcggaaacgagttatgctatggtcctttagctggtccatataagactctttatcaaagctctataaagaaggagccttcttcttatagttttaatgagaaagagatgactggagagtttagtataaatgattctttgtggtatgctttctcattaaagaagccgggttgtaacctgttttttgaccggaaagagattgttttgcctgatggtatgtctatcggacgtattgacttgtctaaaagccataattttctgaaacttgaacttcggggctcacagcaaatttcacgtagaagggaagaaccggagaagaaaccggacaagagctttgaattggagttgtggacatggaatgaaatggaggttccgactttacaaagaggtggacgttataggcaagataagtcggtgacgtatatttatgatatttcttctaaaaagcttactgaagtagcttcatctactgtagatttactcttaccgtcgggagcggaaaaattggattatgtgctttacacggatgaatctccgtataagatgcaacgtgaatggttggaccagttgccgtttgatgtttattcagtgaatgtgcatacaggtgtaaaacaattgatcggacgtagttatcgtactactccaaaatggtcggtgaatggtaagtgggcggtaatgtacgatcctattgcgcaggtttggaataaatttgatggtgctaccggtaaggttgtaaatatatcagatgctatcggttatccgatgttcgtggaaagttatgatcaaccagctcctgctcctgcttatggaatagctgggtggacggctgacgggaatcatgtatttctgtatgatgcatatgactggtggaaagtagatttgaccggagagcgacagccggagtgtctgactaaaggttatggtcgcaaacatggcaagtctattcgtaaaatgacgagtaatatagataaagacgtttttcagaaggatgaaactgtcattgttagtctttgggataaaaacacaatggatgagggggtttatcagcttgatatgaaagggcgtctgaaaaaactgatggaaggcccttatacatataatatataccgtttttccgataatcataagtattgcgtctggaatcgtcagaatataacagaatttagagatttgtggtggagtaaagcagacttttcaaatccggtaagggtgacgaatgtcaaccctcaacaagcggattataaatggggtacagttaaattggtaaagtggaccaattatgagaataaagaaaataaagggttgctttatttgcctgaagattatgatcctcaaaaagaatatccggtgttggtacagttttatgagactcattccggtgaattgaatatttatcatgccccgttgttaagcagcgcgttgggagatcctgtatattttgctagcaacggttatattgtgtttatgccggatgtacatttcacggttggaacccccggtcagagttgttatgatgctgtagtaagcggaacaaaatatctgatagagcaggggatagcacatcccgggaaaataggtttgcaaggacatagttggtctggctatcaaacatcatatttggtaaccaagacagatatttttacctgtgctaatatagcggctcctatcacggatatggtgaccggctatttaggaatacgtaatggaagcggtctgccacgatattttatgtatgaggaaacacaaagtcgtatgggaaagactttgtgggaggcaaaagataagtatctggcaagttctgcaatattggaggctgataagatacatacgcctttgttgatattgcataatgatgaggatgaggctgttgcttatgaacaaggccgtgctctttatttggctatgcgtcgtctgcaacgtccggcatggttgttgaattacaagggtgaggggcattttgtaatgggcagaggtgctcagaaagactggactatccggatgatgcagtttttcgactattacctgaaaggaacaaaagaaccgcgttggatgaaagagggtattcatttaagagaacgtgggattgatcagaaatatgatttactagaaaaataaataaaatgaagaaattattaattacagctatggctctgtcttgttttgcattcagtagctacggacaggacaaagtggagaaaaaaattattggtaaatggtgtaatccttatacttataaatcgacaggtgaactgaaaggttttgaatttaaaaaaggtgggaagtgctctgcaatcaatattccctctttggatttaaaaacttggaagattgataaggatggttatttgattatcgaaggattcagcaaggaagataatggaaaggtagaagtatataagacccgtgaacgtattgggctcttgtctccagactcattgcaactggttacacaggaagtaaacccgagattggcttttttgtatctgaatacgaaatcgataaagaagttggttactccggaagttgcaccaaaagaaaagtaataaatctctctcttaataatttagtgttaatttagcattatattgctaatagaagcacctcatcgtagggattacgatggggtgtcttttacttttttatatcaaaattgtagctcattatgtaaatatttatcaagttattacgatatgttctgaacaatttaatattatatttagcatggaatatcgctatttagggatattcctaaaataataaaat

SEQ ID NO: 11716 - DNA, 8569 bp, Unknown
  gut microbiota DNA sequence
gttaatctgcgtttcttatatggataaacgttgctcattccatagatttattataattttgtcagcaaatatgatgaaataatgtctcagttacctactcttatagccgatctcgcactgatactgatctgtgcaggcatcatgactttattatttaagaagttgaagcaacctttggttttaggatatgtggttgccggctttttggcaagtccgcatatgccttatacaccttccgtaatggatactgcgaatattaagacatgggcggatataggtgttatcttcttgttgttcgctctcggactggaatttagttttaagaagatagtaaaagtgggtggctctgctattattgccgcttgtactattattttctgcatgattctgttgggtataggcgttggtatgggcttcggctggcataggatggatagcctgtttttgggtggtatgattgcaatgtcctctactacgattatttataaggcttttgatgatctagggttacggaaaaaacagtttaccggcttggtcttgagtatcttgattttggaagatattttggcaattgtgttgatggtcatgctttccacaatggctgtaagccataattttgaaggtacggaaatgttggaaagtatcggtaaactattgtttttcctaattctctggtttgtggtcggtatctatctagtaccggaattcttgaaacgttgccgtaaactgatgggagaggagactttgcttattgtgtcgctggcactatgtttcggtatggtggttatggcggctaatacgggtttctccgctgctttcggtgcgtttattatgggatctattttggcggaaacaattgaagcggaatctatcgaccgattagtgaaacctgttaaagatcttttcggagccatctttttcgtatcggtaggaatgatggtggatccggcgatgattgtagaatatgccatacctattcttgtcattactttggcggttattttggggcagtccgtatttggaacatttggagtaatactttccggcaaaccattgaagacggctatgcaatgcggctttagtctgacacagattggtgaatttgcatttattatcgcatctttgggagtctcgctgcacgtgacaagtgattttctctatccgattgtggtggctgtttccgtcatcactacttttctgactccttatatgattcgtcttgccgaaccggcttctactttcgtagatgctcatcttcccgtttcatggaggaaatttctgatgcgttactcttccggatcgcagactgcgctcaatcatgagaacttatggaagaagttgatattggcaatggtacgcattactgtcgtttattctattgtcagcatatcgatcattgcgctttcttttcgttttgtcatacctttctttaaagagaacctgcctcatttgggagcttctttacttggagctgtgtttatcattctctgtattgctccatttttgcgggctattatggtgaagaaaaaccattcggtggagtttatgactttgtggcacgccaatcgtgcaaatcgcgctccgctggtatcgaccattgtgattcgcattatgatagcggcactttttgttatctttgtgatttccggattattcaaggcgtctatcggcctagttatcggagttgcagtgctggtagtgttgctaatggtatggtcgcgccgcttgaaaaagcagtccatctcgattgaacgtcgttttttccagaatcttcgttcccgtgatgtgcgcgcggaatatctaggggagaaaaaaccggaatatgccggacgcttgttatcgcatgatctccatcttgccgatatggagattcctggtgagtctgcttgggcgggaaagacattgatggagctgaatttaggaaagaagttcggagttcatgttgcttccattcttcgcggaaagagacggattaatattccgggtggttctgtccgtctgtttccaatggataaaatacaggtgatagggacggatgaacaattgaatgtgtttaatgaagccatgcaaaatgggacaaaggtggattgggatgtgtatgaaaagagtgagatgactctaaaacaattaattgttgatagtgattccatgtttttaggtaagaccattcgtgaatcgggtattcgggataaatatcattgtatgatagcaggtgttgaaagtgaggatggaacattgatgattccggatgtgaatgtgccgcttgaagagggtgatgtggtttgggtggtaggtgaaaaagaggatgtataccaattagtcaatcaaaaaaacgaaaaagtacaagtcggataggagtgttatgcctatttttgtaaacgataaaaacttaaaaataataatatcatgaagagcgatccgaaagaatgtctgtattgtcagaataatgaaacgctgcataatctgatgattgagattgcgcagttgagtgtgtcacgtgtattcctgtttaaggagcaaacctatcgcgggcgttgccttgttgcttacaaggatcatgtgaacgatttgaacgagttgagtgatgaagaccgtaatgcttttatgtcagacgttgcacgtgttgcccgtgccatgcaaaaagctttccagccggaaaagataaattatggtgcatactcagataagttgtctcatttgcattttcatttagcgcctaaatatgtggatggaccggattatggaggtacattccaaatgaatccgggaaaggtttatctgactgacgcggaatatcaggaattgattgatgcagttaaggcaaatctgtaaatgataatctagagtctacggttcacggttcaccacagaggacacaggggacacagaggttgtatatcgaagcatacctataattgtattaagagtataatcatggacagtgcctaaaagactcttttccctatttcctctgtgtcctccgtgtcctctgtggtgaactattcttcaaagtcaaaatcgaagtcgaaatcgtccataaactccggagttgtaaattcttctagctcgcggcggtcttttttagttgggcgtccggttccgcgtgcacggtctatgaatccgctgattttgctcatttctaacaattcgtattgatcgggagtagtgacgttttccatcatctccggtactaactttgcacctatgcgcttttcgatagcctgcagtaccttgaaggaataggtgataggtggcttttttacctgtatgacatctcccggttttaccatacgggcagctttcaccaatgcgccattgatggtgacgcgtcctttcttacaagcttccgctgcaattgtgcgtgtcttgaagatgcggacagcccacatccatttatctattcttgcttccgccattttatttcttattaaactggttcattgtgatatcaattccggcaaggcaaaaactcttgatgatttctccagctgtttccaatctttcattcattgttttccagtcttcatcagtgaagtgtccgagtacgtaatctatttgtccgccacgaggaaaatcatttccgataccaaaacgcaagcgggcatagttctgagtccctaatgttgcagcgatatgtttcaaaccgttatgtccggcatcgcttccttttcccttcaaacgtagtgttccgaaaggaagtgccagatcgtctactacaatcaatacattctctagtggaatgttttctttttgcatccaatagcgaacggctaatccgcttaggttcataaaagtagacggtttcaacagtatcaattggcgacctttgatcgtgaaattagtggtgaatccgtagcggccgtcaataaaaggaggagcactgttggttttagccaatgaatctactgtcataaatccgatgttgtggcgggtctcatgatattcgggaccaatattccccagtccgacaattaaatattttatcattgttttttcggtaaaacagttcgttaatgtagaaagagaaacgcagatcaatacaaattaatgcagactgaacatctgctttaatctgcattaatctgcgtttgaagtatatctctgtttacagggataatctcagattatttgcctgcagcggctgctgcacctcttgctgcacgagtcaacttaacggcacatacaacggcttctttagcactgatcagttcaagaccttcaaagctcaattcaccaactttgatagtcttacccaatcctaagtgagaaacgttgatgatcagcttttcaggaattacattgtacaaagctttcactttgatcttacgcatctgcaatgccaacttaccaccggctttcacaccttctgcaagaccttccaactgtacaggaacttccattacgataggtttagcttcatcaatctgatagaagtcaacgtgcaggatagtatcctttaccgggtggaactggatgtctttcaagatagcgtttacttttttgccatcgatcaccaagtctactacgtagatgtgcggagtataaaccaagttgcgaagaccttcgttagtcactgtgaagtgaactacttcattacctccgtaaagtacacaaggtacaccaccgttcttacgcatttctttcaaagctcttgcttgttctgaagagcgttctgcaattgttcttgcagttccttttacttcaattgatttcatttctttaaaaaattgtgttactctaaattaagttagtttgcttaattcaccatcacacgatgtggattatcacacgatgttgcaaaaaagcggtgcaaaagtacatctttcttttgaaatatcaaagagttactcctttaaaagtcaatatcaatcttgatttcactctctaatttctcttcttgggcttcttcggtagcttttcgctcattttcttcatcggcttcttggtccagctggccgctgtagtcacccatttcactacggtcgataaagctgatagcttccgtcaaacctgccataaacttctgaaagtcttcccggtataagaagattttgtgtttctcgaagctcacttgagagtcatcaccttctcccgttaccacttttttactctctgtaatagccaggaacatttcatctttacgattcttttttacgtcaaggtaatagatgcgtttacctgctttaatggacttggagaatacgatctccttgtcattcatgtctgcgctcattttcttttttaaatcttccatatcttacggtccgtttataatcggcttcaaaattggatattttttttaaactgtcaaaagaaaaagcgcagagaatgaaatactgcattaaaaaatgtgatttatttgtggaaactcattaaaaatatctacttttgcagttcgataacaacagtattaatttgaattatgatcaacagagttcttattcgtcttaagattatacagatagtatatgcctattatcagaatggcagtaaaaatctagactcagcggagaaagagttattctttagtctttcaaaggcgtatgacctttataattatttgctaatgctgatgatagcattgacagagtacgcacaaaaacgtattgatacggcaaaagccaaattggcacctacggcagaggagttatatcccaatacaaagtttgtgaacaacaagtttgttgctcaattggaggtcaataagcagcttacagagttcatagctaatcagaaaaggacttgggcgaacgatcaggatttcgtaaaggaactttatgagaaaattgtgggaactgatatttataaggattatatggcttccgatgatgattcttatgaagcagaccgggaattatggagaaaactctataaaacatatatttttaataatgattctttagatcaggtgttggaggatcaaagtctgtattggaatgacgataaggaaatcgtagatacattcgtgctgaagacaattaaacgttttgatgaaaagaaaggcgctaatcaggaattacttccggaattcaaggatgatgaagatcaggaatttgcgcgccgtctgttccgccgtactattttgaattctgactactatcgtcatttgattagcgagaatacgaagaattgggatttggaccgtattgcatttatggatatcattattatgcaaactgccttagcggaaattttaagtttcccgaacattccggtcagtgtttcgttaaatgaatatgtagaaatagcgaagttgtatagcacgtctaaaagcggtagctttatcaacggaacgctggatggaatagttaatcaattgaaaaaagaaggtaagttgaccaaaaactgatatctttgtatacattatagaaactaaaactgattatttatgaacgtattgactttattattagatgctcctgttggggctgccggaggtggaagtatgatgtggatcatgctgatagcgatgtttgttatcatgtatttctttatgatccgtcctcaaaataagaaacaaaaagaaatagctaatttccgtaaatctcttcaagtaaatcagagcgtgattactgctggtggtatacacggaacaatcaaggaaattaatgatgactatgttgtacttgagattgcttctaacgtaaagattaaaatagataagaattctatctttgccgacgcttcagcagctaacaatcaatctaaataaatagctggtaaatacatgcctatgtttgatcgtagggaaataagatatacatatttaaaactatctaagagaattaaggattttctgctcagtgataagagcagagagttcttaatttttttatttttctttttgatagccagcggattctggttacttcaaacattgaataatgattatgaagcggatttctctatcccggtgcgtatcaaagacgttcctaataatgtagtgttgacctctgaacctccttccgaacttcacgtcagggtgaaagataaagggactgtccttctgaactatatgttgggcaaaagtttttttccggtgaatcttagttttcctgattataagggaaaagataatcatgtgaagatttacgcctcggattttgaaaagaagataataagccagttgaacgtgtcttccaaaattctttctataaagccggatacattagattatatctattcggaaggaaagtccaaactagtacctgttcgccttcaaggaaaagtgactgccggacttcaatattatgtgtcggatacgatttgtaatcctgattcagtattgatatatgctccggaaggaattttggatacgataacgactgcttatacgcaaaagataaatctggagaatatttcggatactacgcggcaacgggtttctttatctccggtgaaaggagtaaagtttgttccgagttcggttgaaatgacattcccggtcgatatttatacggagaaaaccgtagaagtgccgttgcatggaatcaactttccggcggataaagtgctgcgtgccttcccttctaaagttcagattacttttcaggtaggcttaaaacggtttcgtagcataaaagcgagtgacttcgtaattaatgtctcgtatgaagagttgctgaagttgggttcggataaatacacggttaagttgaaatcatttccaagtggaatcaatcaaatccgtattactccggcacaagttgattttttgatagaacaaatatcttccaatggcgattaaagtaggtataaccggtggtatcggtagcgggaaaagtgtggtttccagattgctcggcataatgggaatccctgtttatatttctgatatagaggcgaaacgtattacgaatacggatgaggtaattcatcgggaactgtgcgctttggttggtgaggaagtttttcagaatggggaattaaaccgtccttttttggctacctatatgtttgggtatccggaacgcacgaaagaagtgaatgggattattcatccacaggtgaaaaatgatttccgtcaatgggccggtcggttgagtcgtaaaccattagtcggcatggaatcagccattcttatagagtctggttttagagatgaggtcgatgttttggtaatggtatatgcaccattggatataagggtagaacgtgccatgcgacgtgatggctcttcaaaggacttggtaatgcagcgtatcgaggctcaaatgagtgatgaggttaagagaagtcaagccgactttgtgattgtgaatgacgatgaaacacccttaattccgcaggttttagagcttatttctttgctatctaaaaataatcattacctttgctccgcaaaaaaataattaataaacaaaagaatatatactatgttgaagactatcttgtctatctccggcaaaccgggattgtacaaactcatttcgcaaggaaaaaatatgttgattgtagaatcagtcaatgctgagaaaaaacgttttcctgcttatggcaatgaaaaaattatttctttggcagatatagcaatgtacacggacgatgcggaagttcctttgtatgaagt

SEQ ID NO: 11717 - DNA, 11553 bp, Unknown
  gut microbiota DNA sequence
gccgtagcatccgccacagggatgcccatgccatgtgccatgagatagggcgaacccatttgatccataaactgctggtcgagcacccagccgcctcgctggctgaagctttctgcttcgatgagcagttcttcggctacagccacaaggctacaggctacggctatgcatgtcagtaagatttttttcatcacagcacagcgtttttatgattattgaatagttatatctcctacttttacccaaccttcggcggtttgatactcatcgcgggccgagagtaagataccgatagcgttctctttggtcgtatctaccaatcccactgcccaagtgtaagtacctgcggctacatcggtgagtttgatgttactagtataagttttgggctttccgctcatccaggtagcaatgtccgctttctcttctatatagatgcgggcaggcttttctgtatttttatcaagcaaagcgatggccaatttgtatttgtcaccgtactgcggcagattggtagggcaatacccccaacccagattcgaccaacggtgagtaagtgacacgttgctaccactacgggctgtagtaggaatagataaacggtcgggatagagacggtaaccaccttcggctataaactcctttaccaagtggaaagcagtgttaaaccaagagtgtgtttcaccagtattcacgttggtagcaaaacgaaagtccatcatattgacataacttcccttagcctcatcatattctccctgacgcacttcggcaaaattcttataaccgtcgccggcaatagaaccaccgtgggatgattccacccaaccaccttccatagtgataggtacaatgccacgataagcggcagcgatgccacgctcccaatccttataatattgcttcataccaaaagcatcgtgacgcaggcagaaacctttggctacagcacgtttcaccaaatcggcagatataccggtatcaacatcaccagatcctttggtagaaagcaggcatcggtgatagtttatcatgataggcactttggtgaaaagacgagacattacatcggtaatccattcgaatacagcttgtctagggctctcatcacctgtagagtatttcagtgtgtgagtttccccccatttgcccaagccaaagccgcttacaaactgagtgatatcagggtcattgtatttggcagcgaaagcagtgaggaaggcttcatactctttctgaaagatggggtcgtcaggataaggcgtccatacgtctacactaccggtagtagtggtgaatccttcggcaccggcttctctcacatactcgggacaggcattttcatgcttgtcgcgactgtcacacacaaaggtgaaagcgagtttcaagttgcgttctttagctccttctaccaacatacggaaacgtttcgccggttcagtctgcaaagtctcatcccacacatatttccccctttcaggattaaaatgactccaaagaccacgtatatagagagtattgccatagttggatactttcacggtgccttcggacgactcgaaattgtcgtagagatcccagaaattcatcatcatgccacttccgataccagcgtagatcacccatccactcatgggattacgcagcagtttgtagcgctcaggcttaatgctaacggtagtgttgccttcgatgttccaactgtagtcggttgtaaggtcatcatcgtctgaacaagcagtgcctataaaagctgtagcagccaacaggcacatcgacaaggtcttgatgctgttttttattattttgttcatagaatatatgtcgttaattgttattgtttaaaaggtagaataaaaagtgaagtgattgaagcttcaccccttattctttcattttagatttatttaatatcaaagagtacagtgttattctctatatccactactacataattacagccttcagggatgaggaagtaagcgtagcggttatcagcttgacctgttacagccttttctaccttgcctgctattactttagtatatccattgtgatccttacgtttagcgtcagctgtagatccaacaaaccatccgttattagcatatcgtaaagtgctgaagttcacccaacctctatatgtcttctcataatcatctgtatattcatcacgaggcaatacatcacctttataaacaaagactttcggattggcaagactctggattaggttatacttcacttgacagtaccactgaggattttttatgatatctttaatttcttcaatttcttcgtcagtaccagggtctttagcaaaactattaaaaccaccatacatatgcaatacattcacctcttgcctccatgggtttatccccagtattgtattattaaacgatacggtaagcggtttcaagtcagttgcagccgaatagatagcaatggtcttttcctccttattcaatacaatacgataagtcccgtcagccggaatagtccaatactgcctgtctactttgctgataagtgcttgcccgaacgttgccaactgaccatcttcgatgtcatggttatctgctacttccggcacaatagccatcgattgttcgccctcgaaagtaagcggtatgtaaaggctaccggctttcaattcaccgcgccaagcataaagttgatcattttcgagagtttgggctatctcaatttgttcttcacctacagcagtacccgccaggaacatttgctcagcctcaactaccgcaccggcttctactatcttcacagtctgcttgctcatattcacagtgatacgataagtagccgctgacggaatcacccacgaattggcttcggcgcggtcggatataacacctgtcatttcacctttagttataggagcatcggcagtttccgggccaatggcattcaactcatcggcataatcaacagggaagtttatcttaccggctaccaaagcgccttcgtaactataaatcttgtttatctcgtctttcaacgtcaacttgatattatcttcgcctacagcggaacctcccacatagagattatcggctttgtactgctttggaccatacgtttttatctttaacgtagtcgtagcaatatcaggcactatcagacggggaccctcaaagttggctgttacagtaaacagtacttcgccaatggtactggtggtaagtccgaaatggtcgaccagtattttctgcatctcctcgttggtgtacgagcgaaagaattctccatcgtcgtcaaactccttgatattcgtagcctcactaccgatgagctgcatctcgtatttgtaagtcgtgatataatcctcaccaaaatcgtgagcggtactccacttcagagtgacagctgtttcgttgggtttgctctcatcgagcttaataaattcacccgaaggagccagttcaatctccgactgattgcgtgagacagtattgtctatatcctcttcacacgaggtagcaagcatgctcatcattcccacagccaccacgccaagatttctatataaatgcattgttttcatattcgtaataatttataggattaataacccggattattaggtaacaagttgggacacaactccacatcatgtgtaggtagtggccacaaatattcacgttcggggaagatacgtttagcaccctgcgaacaataaccggcattgaagagagccgaaaagtcagccagaccatcttcgtcaatttgcggagtctttccccaaaaccaaagattcttattcacaatattattcaataactccgtcggatcgataagcataatatagttgtaaccgttcagtgctttttctgccaacttccaacgcatcaaatcctgcaaacgttgattttccatagcaaactccatgcgacgttctatacgcaaagcgcgtcgtagttcagtctggtcggtagtagtcacggctggatagctatcagtcgctgttacattcactccataagcacgagcacgtaccatattaatagctttcaacacactgtcatcaatccggttcagttctatcatagcctcagcataaatcaacagtacatcagcataacgcattataatgtagtcttgctctaccttttggtctactgtccaactagcatcaatgcctttcttccacagcaaacccgtatatgagctatattgattcacgatacgagtatcttgattgctttgtttcttacctgtagtataattcatcacggttttagctgcaggactagggtcatattcaaaaccacaatgttcagtgttgaactcaacaatagtcattatacaacgtgggtctcgattcttaaatgggttgtgcggatcaaacaatggagattcgtcaataggaagtccgtcagtacagaggtatgcagcgaaaagatcccatgaaggattatacgatccatatcccccagcattacgaggaagagcgtttttcacaatccaagagtcaagtatcacactgttttcaatagagcgtggtattacaaataccttttcatcatttaatttggtactctgcctgaaaagtttggcatagtcgggctccaatgaataaagctcaagatccatacagtctttagcagctttagcagctatttcataatcccccatataaagggcaaaacgtgctttcatagctagtgccgcacctttagtggcatgaatattttcgtcctgtccatagctttcgggcagtctagcaacagctttatcgaaatcagcatataccaaaggaattacttccgctttaggtctacgaccacgctgcaaagcttcagaaatagtgatagtctcttcctgataaggcacatcaccatagaaaaaaatcaaatccgcgtatttacaagcacggcaaaaatacgcttcaccagcatagcggtcgtaaacttcctgtgttacattatccttcgccttatgaatattttcaagcattgtgttggcacgagcaatcaatttaaatgattgttgccacaaagcatatacttcatactgctggccattcatagttccatcaagtatagttccaccacttcccggattacggttcgtttgacgataggtagtgttatctgaccattgttcggacgaattaagaggttcttgccaataacccaaaatgtaaaattcattagatgccaagcgcaattctgtttcggttgtataccatgactcggtattaccttgcgatttaggaaccagatccatgctctcacaggctgcgagccccaaacacattccaactaataataatattcttgttttcatattctactcctaaatttatttaaaagttaacttgcaaacccattactaaagaagttgtaatcggataagatgaggcacccatttcagggtcccacccatcagggaaattactcaaacagaaaagatcactaccacttatataaaagcggacacggtctatacccgctttttgtgtccatgtttcaggaagagtataacccaatgtgagattcttcaaacggaaatatgagccgttaaacatccaaaagctagacgtagcatagttattacttttcgatacattcgaaagacggggatacctagctgacaaattctcttctgctgtattaaaaggactccaatatttaccttcgataatagacggaacgctcccataattatcacgtagtggctgcaccatggcagtagaaagatatgaattttgcttgccgatgccttgaaaagcaatactgaagtcaatacctttgtaagaagcattgaatgtgccaccatattggaaacggggcaacgaattacctaaaggtacacggtcatactcaggactgattataccatcaggtacgccatccggaccactgatgtctcgatacttcaaatcacctaccgtaacggttgtactcgtacgggctgagttattcacttcctcctgggtctgataaatgccatcacatacataaccataatattcattgaaaagaacgccggcgcgcttaattttaccattgctgatttgctcaccatcattcatataatcaatctttgaaaggaaatccgagaaatttacattcactccatattggaggtcgcctatccgatcattccatgccagttcaatatcataaccatgagtagacattttacccgcatttgtattagggttattgtatcccatgaagtaggggatctcaattttcagtaacatatccttagtttgtttccaataatagtcaaagtggaactgcaaacgattattgaagaaatttgcatccaaaccaaagtctgtgctagtagtggtttcccaagtaatatcttctacagccaatatagcgggacgagctgttttatcagaaacaacacttccgtcagccatataaaataacgaattgccaaaactcatcagagctatataaggaaagtaatcgtcaccaatacgttcattacccagtataccccatgagccgcgcaacttcaagaatgaaagccaatcccaattaagacttttcataaacttctcttcactcattacccaacctgctgagaatgaaggaaaggtaccccaacgataacctttagcaaaacgcgaactaccatcgtgacgtatattagcctgaaacaagtaacgatcagcatacgaatagataacacgaccgaaaacagaatttgaagtatattcagaacctttaccgctattagtctgaaagtcttctgaaccaatattgagataaggataaccggtaagttcgtatttatcacgtgctgcagtcagttcttcatctttcatatagtagttctcaaaacccgccatcacagtgagatcatgactgccgaacgttcccatgtaattagcaataacctgactagtgacatgataatcatccttacgggtttccgtaagcgaattggtagtccaagtgctaccggagtcaaaataaccgccaaatgtttcgggatcatccgctaaagtatatccacacgaatttttaaatgcttttttcttttgataattaataaaaggagatacgatacccgagatacttaaccctttgacaggtttgaaagtgagcgaacctttaccagccacctgagtactgtgagcaactgaattaccaccagccacaagcagtccgtagggatttgaaccactcttacccgaagccagacgaccatcgtcccacgtagcgggatagatggcaggcatcttacgcatggtatcgaaaggatcataatttttagtactactcttagcatgacggatatttacgtctatttgagcactgagtttatcgttgatattaaagtcgttgttcgaacgaaacatataacgctggaatccacgaccatcgtaaagcccgtccacctcatcatacgaaagagtagctaccgactttaccgttttgttaccacccgatacggaaagagtgtgagtcatgcggggagcactcgacttcaaaatcaaatcagtccagtcagtaataggataatggttaggatcgacagcattatactttacccaattctttgtctgatcggccgtatattcctgaaaaaagccaccggtagggttatcgttgtacttcaattcgttactcatttccaggtagcgggtaactcctaccataccgggttgtttggtaggaatttcccaaccaaattcagcattgtacttcagattgattttaccactatcgttaccgcgcttagtggtaacaaggataacgccagcagcagcttttgaaccataaatactagcagccgcagcatctttcaataccgaaatactctctacatcattagaattcacatagtcgagcgaactttgcacaccgtctactatcaccaacggactcgattcacccatcgtagtaataccacgcacacggatagaggcggcacccgaaccgggagccgaactattacgtgtcaccatcactcccgaaagtgatccctgcaaggcattggaaagcatggctgtacgtttgtttactaactcttcccctttcacagccgccaccgctccagtgaggtctttctttttcacagcaccgtaaccgataaccaccacttcattaagtgtcttactagcttcttccataacgacagcatacatattcttgctatctatccgtactattttatccatataaccgacataactgatgagcagttcgctaccttcatgaacatctatctgaaatttgccatcaagatcggtgatggtggccacatcactacccttcacacgaaccgtagcaccaatcatcggaagttcagtaacatcaactacctgccctgaaatatgctttgttttttttaccttagtagtaggctttggggaagaattaacagtgatagttacctgacggttctgaatgtaatacttcaaattagccagccgacacacctccgccaagatggtgtcaattgactttccttgcaattcaatatttaccttatattcaagacgctctttgaccgattggtcataaacaaaaacatatttgctatgcttctcgatatagtcgaacacttgtttcactgtcgaattttcagctttaagaatatatattccatttagcttctcgaatgaaacagtcgacgcactagaatagacggggacagatagcagtcctgccaaacagaaagcctttgcaaagcttgccaccttagttacgattgttttccgattcataatattaagattaataattagtatttattgtataatgatttgcgatgaatgcaccgtacaccagtcactttccgatttcgagcgtaccgactttacaccatccatcgaaaagaagattcttgtcaactgccatcttcaaacccggttggtatgccttggtagtatcaaccagtccaatgagccacgtataacttcctttttgaagaccctccagactgatatttgtggtgtaatgaccatcacagccctgcacccaggcagagagatcagcctcctctgcaatctgctttttcacaatgctatgaccggtatccatcaaagcgatacagactttatattttcctttccactgaggaatgttggtaggacagtatccccaacccaaattacgccaattgtgctgcatactcaccagttcaccttgacgagccttattcacgaaactcaccttagtaggatagagacgatatcctccctcacgtacgaaacgatttaccaaatcgaaagaagtattaaaccatgaagctacttcatctcctgtacgaagatccatcatattgacatgagcattacggctttcttcatactcacccaaacgcacatcttccgaatgcccttcgcgatacttgccgctgggatcaatccagtaacgatggtgtgctccggtaatccatccaccctccataataatgggtagacgatagcggtaagcacgggcaaaatctttctcccattgttcataataaccggtcatgccgaaagcatcgtgacggatgatatatcctttggctatagccctttcgagtaaccgtttgctatcagggtgtggttttgcccaactaatagtatcccccaccaagcgatggtagtttatcactaacggtacacgtttgaaagcttttgtataaacatcggtaatccattcgaatacttcttctttttttgaataatcattatatttcacaccgtgtgcttccccccatttaccaagaccataggcatcaataaaatccactttatcagggtcgtcaaaagcaacggcaaaggcttgaaggaatttttcgtatttctgttggaatacggcatcgtcgggataaggcgaccatatttgggaattattaggatcctgaaaacccttcgcaccggcttcctttacatagagaggtgtattctgtccctggtcgcggctgtctacattaatacggaaagccaaacgcattccacgttcacgcaccgaagcaagcaatttatagatacgtgagtccggatcgttccatacatactttccctctttactttcaagcatattccaattgatgcgaatataacatgtaccggcgtaatcgctcacacgaacagtggaatccccaccatttacgggcatagcatcatagcgttgggtctgccaaaagttttcatcccatgcacgtcccaagtacattacccaacccgtaaggggatttttgagtacagaagtagtatcaggctcaaaacatactgtttgttcaggcgccttcactcctttagttatagctgcttgtgtatgtatcgaaaaccatccacagagtatcagagctgctataaaaagcataaatgtacgtaacaaagtgtattttttcatattcttcaatggtattaaaaagcatagcttctccttacgaaaaagcgtataaacctcctctccttgctataaaggcattataaattttgataataagttcttatgtaattatttcattcagtagcaactaactacaaaagcagttacttcttcactaagtagatcgtatcaccatgaactttcatacgggtttgcgtcatggtttcaatggtttgcaaaacttctttcacacgattaccaagtatcagcttgccataaagtttattaaccgatatcttatcatcaggcagaatcgtcactccataataatgactgagtcgttgggtgacagactctacactttcaccggtcaggctaatcataccctgcatccaacaagtatattcgtcggtatttactaaccgcttttcagcgaaaccaccctcctgcaaattcaccatttcattcggtttcatacgaacccgatcattgtttgtcgtttttagttctaccgagccttgaactaatactacttgcgaatccgaagtatcgtagttgttcacattaaatcttgttccaagtactttcactctgaaattatccgaatgaaccaaaaacggatgctctgcatcatgtgccacatcgaagtaagcctcacctttcacatatacttcacggcaatcgccatcaaaacgtttggggtagcgtacaattgtccgcgagttggctacgatttttgtaccatcgaccaacatcagtgtcatcttttctccaacaggcacttccacctcttcgtcatatgaatcagccatcaattctgtaacttccatgcgggacaaaccgcccatcgcatcctctgtaattatatattttatacctattaaaaaaagcagcgtagcagctactgagccaatatacatcaaaacgcgtcgctgcctagatttacgttcatgttgatgcattttcaaaaaagcttttttcttaataccggagatatctatctcggccggggtactgtgttctataaatgacttcaacttgatgtcaccctgtaaatccccatatgtataatcattaatatctttatccatcttcaaatctttttatcctttcaatatctctttcctttttataatcttctcatgagaagttcccttctatttataaagacgcaaatgttagatttatctataggttgaaattctatttttttcttttagtgctttctttt

SEQ ID NO: 11718 - DNA, 55774 bp, Unknown
  gut microbiota DNA sequence
acatgaaccaggtcttctttccaaaatgccatattacaacctcttatacgtaacatagtacgctttgcatatcgattagccaaataacgcctaagcacccgagaacgaaaagcatttaacacaaatctaagattctgttttagaagagccggatatttctcaacaccttttaaaagacgagttgtagacatctttcctaaaagcacacgactcccgcaaacaaaataccctttctccgccagttctaaatgatccgcaatgaaatgtctgtctaagattatatctccatcaatctgaataatataatctcccttcgctttttctatagaacgattgcgaatcgctgaaaggcgaaagcccttatcctcatgccatacatgcacaataggaatatctgtcttctcacgcatttcatcaattaattgccgtgtatcctcacgcgaaccatcatctgctatcagaatctcagcaggcttcacagtttgcgcaaagacactataaagacaaagagacagggcctctttccaattatatgtggatattaataatgagactaacatttcaataagatttaaattctactttcattactttttctcatcttccggccagttataatccaactcagcctcccgttgcagcgcagccgcaataatctcatttgtactctctataattctcttcttaatacccgttgtactaacaccgggagtatacggaaaatatactactctctttccgggttgctgctttatccattccaatccttccaaatatttgtctttccaatcatctcctatagttacaatatcaatattttctctctctaattgagcaatctctgtcaatttcacctgcttcaccacttttgtcacgcatttgatagaggaaacaatccgcatacgttgctcaaaaggaataatcggcggcattcctttatagtgttgtatcagttcatccgtacttacccctactatcaattcatcacccaataaggctgacttctccaagatattcaaatgaccaatatggaacaagtcaaaactgccggatgtaaatactctaactttcttttctttcataactatatagatttatcggttttctatttctttaattctccttgccaaatcatccagatcttcattagtctgaacacccagatgggacacacggaaatagttcggagttccgccgggcataataaaaatctcctgtttcagcaattccttaaaaagaatatcaccatttctccgaacaaagaatcctgttatgcaatttgaaggaacttcggccggtacttcccaattattctgtttacatagttcacgaaaataaagagctttcgcccgtacggatgcaatgatattgtccacacctatcttcatatcgctctgcaaacgtgcatgtaactgaaggaataaggtagtagcaggactataaggagtttgaccacgttctaaattcttcagattctcttcaaaatcaaaataataagatttatgcgagaaaactgtctgaagcactcggggagaaagaaacaagaatgacaatcccggagctatgttcaaacctttctgactgcttgtgatacagatatcaatcccccaaccggacatatccaaggtatcagataagaaagaactgatggcatctaccaccaaagatacctcatacttcttacagatagcagaaatcttctccatatcataaagttgtccggtagaggtctcgtgatgttgacataaaaagacatcgggacgagatgtacgtacccgctcttccaattgcacatagtctatatcacgggcaaaaggaacctcaaatatttcgttcggacagtgataataatcacaaagattcttccaacggtgtccgaacgatccgcctaccagaataaaagctttctcacattgagagacataattagccaccacagcatccatcgctcccgttcctgaggccgtataaaatatcacacgtccctccggacagtttatcaaatgcaacaacattctctccgagtctttcacaagctcagagaattgcgctgtgcgcatataaggaaaaggcttccctcctatttggaggatcgagtcttctatatttccaggaaaaacatatgacttcatatttcgctcaattaaaattcaacatttattctctcacctcttctttattctcccaaatttcttaatgcttgtatacttccgccacaagttaagcttacgcttttcgggtactccatgacgatgaatataatcggctactgcatccagcattcgcctgcaaactttcccatccaaataaggatcgtaattatctacaatccaacgacgtttggcgatgtcttcttcattatattgtgctctttcaaacgcttccatcaactgagtgacatcggttatatcagtccaataaatatcttttgcaatagtacgataggtaatgaccggtcgtcctagaagaagaaattcataaacggtggaagaggtgtcacttatcatcacatctgacatcaactgatacttcgtgacgttaaaaccatccacccatacaatatgttcttcttgttcagccagttgcttgtattcatcaatccattccttccgtgtcaacggatgaaatttcagaagcaatacaatatccctcatctttactaaatgcaacaaagcttcttttaatgcaggaagagatgttaaagatggtgaaaacgttggtgcatacaacactatctgctttttaccatgctctctcaatagcttttcccgttcctgatcaaaatcatgccaatgggttttaatccaatcctgtttgggccatcctgtctccaccacttcaaaatcaccatactttaccgccagttctttaaacttcttagtaaagaaaggaccttgcgtaaaataggtatcaaaataccggcggatcacccaatgatctttcttctctgcagcatatccgtgaaacacctgcaccttcactccaggcaaataatatggaacaatattgcccggaacaaatattgcttccggagagaaatcataaacttcctgtatagaatgcgtataggtaacttctttctgcaaagggaataccggaatcttcggaagatgaatataccacaacagttggttatcttctgatttcaatgcttcctgataaatgggatacaatatatcaatagcatatttgttttcacaaaacagaacaatacgcataattctatagttccaatttatattttaccatgtgtttcttcgcaaaataagtccaaaatttcttccgacatgccaaaacacgttccacacaatgagcttcgtcagcatgacgggctttcgcatattctttggcaagcatttcgaaaaaagctttctgtccccacaaccgagcaaaattagcgcaacccatatcgacactgatctctccaaaagtcattctattaatatcgaccaacataaaatggtattctccatcgatccgatcaaacaggatgttacccggtgagtaatcgcgatgcataatacccgcctgatgtaaattggccgtgtattgtgcaaatgctataatgagatctttacaacgttcgacatctgcatttccaaattcatagaaattcctttgatagggtgactgcatactaacaaagtaagagtaatttatcaacccgcatttccgttcttcaatataagcaattggagccggtgtttcaacacctttctgaagcagcatttgaggatattcaaaagcacgtttcccctttggagtacgaaaaaaagaatagacgatacggttagccaaagccggaattccatagcgtttcacatttatctctatcccgtcgacttccatcacttttatcagattccttccggagtagatgatccgtccttcccgttcaaaagtatcaggaacactctctataaacttgcgcaaatgctcgtatgtaggattcactactattttcatacctcatcttttattttttatctcctgttctaccatgagcaaagtaatcacaacttataattaaatctgaaactctccatgcatcctttgcatgttgaatctctgccgtagaaacaccgactgtatcacctatgatttccatttggggagaaatagcaaaagctttcttccccgaagacagtatactctctcccaaccctctccatggataatcatctgccccaagcaaatccaacaaagtaggatacaaatcgacttgtcccatgactttctcgtaacgtaaatgtactggggaatttaatacaatcagtggtgtgaaacgctcaggggatataatatcttttcctaaagcatgttcataaagtggttttctggtcaaaccaaatccttcatgatcaccggttattacaatcatcgtgttctcaaatttcttctgagaacgcaaaaaagttataaattgacctattgcataatctgtatagttggccacaaccatataattccttaatcgttccggcagcttatccgaaaaacttatccgtttgctttcttccggaataataaacggggaatggcctgagtaggtaacacactgcaccaacgtgtgaccaccggtcgggaacaattcttccgtagctagcttttctccgcactgtctaagaaaagagacatctcccaaacgatgacgtggtcccgtcttttcatccagtacaaaatagggcttgtccaaaagtttatcgtaaccaaagtcttgtgcaacaatggcaacattccatacaactttcttatctaccgtcatgcagcaggttccgcctccttcatatttttctttaaaagctttatctatactataataagtatgatgaggaaagcgagcactataagcaccatagtttatgggtagaagaccggtatgcaacagtaattgcccatcaatggaacgacttcctttgacctgtgtctggacgtaaggagcatataatacattctcttctttcagcatgcgattcagattaggagtgatttcttttccttccacacttttctcaagcacccaactctcaaaagattccgccaaaataataatacaattatcgcgtgcttctatctgaaagggaagtggctgccgtcggggatgtttactcaaccaatcttcaatttctttctttatctgtggggtgtactctattttatcttgtacatgttcataataaagagaaccaaaaatagtgtatatgggagtcccgcatgtctgataatcagtcaaaagtgcttcataagtttttttgtacccgccataataagctataattccgccaagagccagcaatggaacgcagatacatcccgccaacagtctcaagctttttcttctctgttccttaagagtaacctttaggttttgtttgcgggttaagacaaggaacagcaccgtcaatagcggaaaacccagatctgaccaacgcagagaatcaaaaacacttgcagtaaagtcggaaagattgccggcaaggaaatagctgtcccaaggaatagaagtataatatgtacggaaatacatcagattaacaattaacagaaggtcaatcaatgtaccgactgtaatcagataccatctggagcgtatataaagaaatggaactgccaacagggaagccagcagaaacttcgtcaagtaggtttgcggaaaagaaaatgatgagaatgtggtattcaggctccagtccaagtcaaacaatatgaacttaaagaaaagacaaccaatgaacaaccataagattttacgcgattgcatatgtttttatcatttatagtgcaacatttatgacagactggcaaaaagcttatcgaaataagatacataagcttctacgctaaattcattaataatacgctcacgggatgccttagccagtttctgcaattttgtacgatcatccatcaatgagcgcatggcttcagctattttctctgcagaacccgaaggaaccaagatacctgattcattgtctactattaaatcgcgagcaccgggtatatcagtgacaatgcacggtactccgcatgccattgcttctcggacaacacgaggagaggcgtcacgcagagccggtaggataaataaatcctgtttaggcagaaaagaaatcgcatcttcgcgattccataagaaatgaatacgttctgctcccaccccttgctgcgccagctcgtaatcactattatcatagtcaccgataacaacaagatgggcctccggagcattcaatatctgaaaagcttttatcagataagtgagccctttaaacggacgacctttggttgtaccgatataaatgcatttaaaagcattatcgggcactccttccgcctgcttaggattcgcacaggcatcagccacccagtctatatcaaacggcttcacgctgacagacagtttatccttatcaatgtacctcgtaagatattcttgtatatccgcagtctcacatacgatatggtcaacacgaggatttaatattcccatataataggtaggatcaagttttttcaccttagcctgagtaccccgataacctacattcttgacggaagtgcctattgtcgcaatcaaagcattggatagtccggatgtgctcggtgagaaaatcaaatctatatcatattgctttacatatctgcgaagcgtcttaatgactttccaggaaaatttagatgtaataggagaaattggcaaagggatacattttccctctacttttgcagcttcagaagcggaaggaaccgttaaataaattgtataagactcattctttgacaattcacccaacatcttataagttgccacatccaccgccttgtgagttaccaatatattcatacattatcaattaatataaataatcgtgtctagcctcgtgcaagcattacaaaagaaacacaccgcaaagataactaaatcttattacattccggctgaaataatctcattttatttccggagataatttggcataagctttctgaatggcttctttgcaataatatccttgagaaatacgctcattcactttagcaacattcattctcaaagcattataagactcttttgtcatctgagtgatgatagcgtccagatctaataaagaagagacacaaataccgataccattttcctctacaaatgaagccaaagctgcttttttccaaatgataacgggaagtccgcaccgaatatagagagataatttatgtggagcattatactgaagatattctccttccggaccgacacccccctctagggaggaaccataccacaccaatccgtattccccttcggctgtggcaataagatcatccgaccgagtatatcccttatgatctacttgcccctcaaacttatcaggttcaaagccattgccataaagtaccatatcgaacgaacgtggagaacgtcccaatttatataaaaaatcactatgaaaagtagataacgctccaacaaacaaaacacgaggatgagaagctgctaaattcttccctgaagactgcctatctgacaaataatcaaagaccccaagaacttccagatttgcctttataccattctcatgcaaccaattcttcatccgttcactgtgcacaataatgctgtctgaatggttcaatcttgatatttcgtgaggtatagtcaagcgacggcgacgaaaactgtccaaatcatgaattaaagtaattatcttacaaccacgcagatgcgccatacagcaaacaaatgtatagtatttctttaacggatattgcagtatcaacacatcacctttatgtaaacagaatacgctcttcaacacacccgacagcgtcaaaataaaagctatgacagcatttgtataacgggtctgcttaagcccgacattacgatagccgcactgctccatgatatattcaatatcggttttagccttgttggcagcattattaacacccttatagttccttgataaatagcaaatcataattctttttttagttcatttttagccaggttcaatgcagcctccaccgtatcatccatatcaaaataagcatattgggccaaacgcccaccaaacaaaacattcgccgtagtattcgccaaatctttatacttctttaaaagcatcatattagtatcatcattcactggataatagggttcgttttcagcagtaaaagccgcaggatattcacgggtaatcactgtacaaggttgtgtaccaaactcaaaatgtttgtgctcaataatacgagtataaggaatctccctttcacaataatttacaacagcattaccctgataattatctatttcaagacgttcatgttcaaaacaaagactacgatactccaaacgcccaaaacgataatcgtaaaattcatctatacaaccggtaaataagactttatctgccaatgcatccagctcttcacgcgcggaaaaataattcgtattcaaacgtacttcggccttctcaagcaacttgtgtatcagctcattatatcctcctttgggaattccctgatactcatcattgaagtaattattatcataagtaaaacgaaaaggaagcctcttgatgataaaagcaggaagttccgttgctgaacgtccccattgtttttctgtataaccttttatcaatttctgataaatatcttttccacaaagcgtcaaagcttgctcttccagattggccggagactttatatatgcgtactctttacgttgctcttcaatcttagcttttgcctcttgaggagtattaacgccccataacttattaaaggtattcatattaaaaggcagattatataatttacctttataatttgctaatggagagtttgtatagcgattaaaggaaacaaaacggtttacataatcccagacctgcttattgtctgtatgaaatatatgagctccatattgatgcacatgaatatcatccacattctcgcaatagatattcccacctatatgactacgtttatcaattacaagacaacgctttcctgcctcaatcgcctgccggacaaacacagcagcgaataatcctgcgccaaccaccaaataatcatattccttcatacatacaaagttttttataatcaacctacaatcgcctctattttttctatcacctgttcaggagtaatatttttcagacaagcataatctctcctccaacaaggcttctgcccgtaaaccgaacaaggccgacaaggcaaatccagctgtaccgtattgatgggtaactgtttccaccccataaacccggcatatggatgagtagccccccaaatagagacgacaggtatattgaccaacgacgccagatgcatattggcagagtccattgagagcattacatccaaatggctcatcagatttaactcggtgcacatattcaacttacctatcatagatacgatggagggatatttggctatccaggtatcaaacacttcctgctctttcttgcctcctccgaacagaaaaaccttcaccgtaggatctgccgcaaaatgggcaacgacctgctcctgcagttccaacggataaatcttgccggtatgtttggcaaaaggagcaatgccaatccatttttggctcccttttggaccagttacaggctctatctctgcaaagttcccttttccttcaccataaataaaagaaaagtttagcagaaccggaagtcccagcttttccaacacatccgcataacggcgaaaggaacttttctggttctccatcaccttatggtggcggcgaaccagtttctgtttaccagcccgccctttacagatagaagccaccggtacattagcaagccaaaaacgcaaacataaatatctggaacggagcacatgatgaaagtccgccacatagtcaaactgcattgctttcaactccgagtaaaggctgttcaatccccaaaagcctttatgcttgcctgtcagatctgctcctacaaaacttacattctccggcaattcctgaaaaagcggttgccacacggaacggctcagtacagttatctcatgctggggatattgtactgccagagaatgtattacgggcactgtcattgcgacatcaccaagagctgaaaaacggataatgagaatacgcgccattcgttatttctttgcataaagcaccggattcaatgccgggtcgttatacatcttcatctgtttatatactttcatatatttctttccggcttcgatgtcagccaataactgatcaatagccgacgaaagatccttgcgttgctctaacaaaacattcagtttggtctggcattgtgtacgatgttcttcgctggtatccgtacgttccacctcttgctgcatatggtagattttcaaagcaaggatagacaagcggtctatagcccatgccgggctttccgtattgattgtcgcatcgccaagggggattacctctttgtatttgtcaaggaagtaactatcaatcagctctaccagatccgtacgatcctgattggacttatcgattcttctcttcaaagttaaagcagccaccggatcaatctggggatcacggatgatatcttcgaaatgccactgaacggcatctatccaatttttcaaatataaataatactcaatcgacttcaattcgtaaggattgttcatctgagcgtctacactatccgttacatggtaatcattagtcgatttccaaaaaatctcgttgcaaaggttactaaatgtcataatcttaactagctattagatattataatagggcaaatctatgtaatatttctcagacaagcaaccctttcttacttttttatttagtacctttgtggataccaaagataaattgtatatgaaaatcattatagacaacaagataccttatataaaagaggccgtccagagtatagcagatgaagcaatttacgctcccggaaaggattttacaccagaactggtacgggatgcggatgcgcttattatccgcacccgtacacactgcaaccgtgaattattggaaggaagccgggtaaagttcatagcgacagctacgattggcttcgaccatatcgacacggaatattgcaaacaagcaggcatagaatggactaatgcgccgggatgcaactcagcttccgtcgcgcaatacgtacaagcttcgctgctggtatggaaagcgatgaagaacaaaaaactggagggactgactataggtatcataggtgtcgggaatgtaggaagtaaggtagcaaaagtagcaaaaggctttgggatgcgggtcctattgaacgacctgcctcgggaagagaaagaagggaatcgtttctttacctctttaaatgaaatagctgaagagtgcgacatcatcacctttcacgtacctttatataaagaaggaaaatacagaacctttcatctggcagatacaaatttcttccgctcactaaaacgcaagcccgtcatcatcaacacctctcggggagaagtcattgaaacgggagctcttctggaagcattggacaataaatcgatttcggatgccatcattgatgtatgggaacacgaaccggaaatcaatctcgaactgctcagaaaggtcatcataggcactccacacattgccggatattctgccgacgggaaagcaaatgcaacacgtatgtctttagatgctatctgcagattcttccggatagagaggaattatgagattcatgcaccggtaccgaattctcctgtcattcatgcagaaaactacgaaaatgcacttctccaaatatataatccggctgaagacagcgaccggttaaaaaatcaaccagagctattcgaaaccttacgtggagactatccattaagaagagaagagcaagcttatataattaaatataaagaataaggcgtaccatctcctacgtcttattctccacacaatactctctctataacacgggggaaatgttcatactccaaagcatgtacttttttggctacatcctcaggtgagtcggtcggaagtaccggacaagcggcttgaaaaacaatgtttccttcatcataacgttcatttatataatgtatagtaatgccgctttttttctcgccggcagccaccaccgcttcatgaacacgatcgccatacatcccctttcctccaaacttaggcagaagagccggatgtatatttataattttattgggataagcatgcaaaagtaaatccggaacccggaccaagaaacccgccaacaccacaaaatcaatgtgatattcctgcaaaacagccagaatctcatctccagccatccaatcttcctttggaaacacgttacaaggtactcccagacggtgtgcacgttccaaaacgtatgcatcacttctattcgaaagcaccaacgaaacctgaatggcttcgttttctcggaaataccggataatgttctctgtattagagccggagccggaggcaaaaattgcgatgtttttcttcataactctcaaattcaatgcacaaaacagtgaaaaatgtgcaaaactttgcatttatttagtcaaatatttgcgcaaaacgataaatattcattcctttgcaccgcaaatttaaagaaataaaactaattattaattaaaaacttaaagttatgtctgaaattgcatcaagagtaaaagcgattatcgttgataaattaggcgtagaagaatcagaagttactaacgaagcaagcttcactaacgacctgggagcagattctcttgacactgtagaacttatcatggaattcgaaaaagaattcggtatctctattcctgatgaccaagcagaaaaaattggtactgtaggtgatgctgtatcttatatcgaagaacacgctaagtaatccgatttcatcaatatggaattaaaaagagtggtagtaacaggtcttggcgccattactcccgttggcaacagcgttcctgaattttgggaaaacattgtgaacggggttagtggagcaggacctattactcattttgatgcgtcgctattcaagacccaattcgcatgtgaagtgaaaaacttcgatgcaacaaaatacatcgaccgcaaggaagcaagaaagatggatttgtatactcaatatgccatcgttgtagccaaagaagcggtagaagattctggtcttgacatagaaaaagaagacttaaacaaaatcggcgttatctttggtgccggtattggtggtatacatacatttgaagaggaagtgggcaactactatacccgtcaggaaatgggtccgaaattcaatccgttcttcatccccaagatgatctcggatattgctgccggacagatttccatcatgtatggtttccatggtcctaactatgcgacttgttcagcatgcgctacttctaccaatgccattgcagatgctttcaatctgattcgtctgggcaaagcaaatgtaattgtatccggtggttcggaagcagctatcttcccggcaggcgtaggcggttttaacgctatgcatgcattgtcaacccgcaacgacgaagcttctaaagcttcacgtccgtttagcgcaagccgtgacggcttcatcatgggcgaaggtgggggttgcctgattctggaagaactggaacacgcaaaggctcgcggtgcaaaaatctatgcagaagttgccggtgtaggtatgtctgcagatgcacatcacttgactgcttctcatccggaaggtctgggagctaaactggtgatgaagaatgcattggaagatgcaggaatggatccgaaagaagtagactatattaatgtacatggtacatctactccggtaggtgatatttcagaagcaaaagcaatcaaggaagtattcggtgatcatgcctttgaattgaacatcagttcaacgaagtcaatgacaggtcacttgttgggtgctgccggtgcggtagaatctattgcaagtattcttgccatcaagaacggcattgttcctccgactatcaaccacgaagaaggtgacaacgacgagaatattgactataaccttaatttcacgttcaataaagcacaaaaacgcgaagttaatgttgccttgtccaatacattcggatttggcggtcataatgcgtgcgttatcttcaagaaatacgctgagtaatatcgtgttacgtaacaaaatagataagataaggctcctattccgcaaggatagagagtcttatctttgtttttaccggatactcggattctatccacgcaatattcagctttatgagcaggctctcctgcataaatcaacctccctccgttcggaaaaagggcgtccgttgaataatgaacgactggagtttctgggggatgccatccttgacgctatcgtaggcgacatcgtctacaaacattttgaaggaaagcgggaaggattccttacaaacacacgttccaagatcgtgcaacgggaaaccttaaacaagttagccgtagaaatcggattggataaactcataaagtattccacccgttcgtcttctcacaacagttatatgtacggaaatgctttcgaagcatttatcggggctatctatctggatcaaggatatgaacgctgcaagcagtttatggaggaacgaatcatcaaccgttacattgacctggacattttatcccgtaaagaagtaaacttcaaatccaaattgattgagtggagccaaaagaacaagatggaagtctcttttgaactaatcgaacaattccttgaccgggacagtaatcctgtatttcagactgaggtacggatcgaaggatttcctgccggaaccggaaccggatattccaaaaaagagtctcaacaaaacgccgcccaaatggcaatcaaaaaggtaaaagatcctgtattcatggcaacagtcgatgaagctatccaaagcaaatccccatgcgacgaccttgaatcaccaaatcatgatcttctgtaactaattttaattttccggctacttcagcgagaggaacagacgatataccatttcctttcaaagctaccatacgtccgaattctccattggcaatcaattctgttgcatgaccacccatccgcgtagagagattacggtcgaaaggagtaggtgaaccaccacgctgaatataccccagtaccgtttcacgggtttcgatacctgtctcatactcaatttcttgagcgatatattctgcggcacgcttacggccgtctgtctgaatcccttcggccaccaccacgatagaataaggttttccttttttcagcctctctaaaatcgtattgccgatattcttaatactataaggaatttcgggaacaagaatcacatctcctccacctgccataccggaatataaagcaatccaacctgccttatgccccattacttcaataaccatcactcttttgtgggagctggcagtagaatgcaggcggtcgatagcgtcggtagcaatgcttacggccgaatcgaacccgaaggaaatatccgttccccaaatgtcattgtcaatcgttttaggaacagaaacaatatttacccccatcgcagcaaatttggcagcagtcttttgcgttccgtttcctccgatgcagacaacacaatccagccccatttcacgaatattccggagaatcagggcaggcttgtccacatcggatacaacacccccttttttgaatggcttttcgcgggaagtacccagcatggttcctccaagattcagtaacccggagagagatttatccgtaaaagattccacatctttagtcaacaacccttgaaaaccactatgaatacctatcacttccatcccataataattgatggcagtcttacatacgccacgaatggtggcattaataccgggacagtccccaccggaggttaagattccaattctcattgtcttatttattagtcaaaaactcggagatttagtgaaactcgaagattttaacgattatttccgtcgtaaagatagaaaaaaaagataaataaggttacttttgcacgaataaacattatcatgttaaagcagaaatgaatattacaaaaattatcagcaagactttcgactcccgtttaaaacaaatagatttatatgccagtgaagccagcgagatacaacaccgcgtattaaaccgcctagtgcaacaggcttcccagactgaatgggggaaaaagtacgactactcctccatccgcagctatgaagatttcagaaaacgtctccccattcagacatacgaagaaataaaaccatatgtggagcgtttacgagcgggagagcagaacctgctttggccatcggagatacgctggtttgccaaatcatccggaacgacgaatgacaaaagtaaatttcttcctgtcagccaagaagcattggaggatattcattacaggggaggaaaagacgcggtagctctttatttccgtatcaatccggacagtcactttttctccggaaaaggactgatactgggaggcagccacagcccgaatctgaactccaaccacagtctggtcggagatttgtcggccatcttgattcaaaatgtaaatccacttgttaatttcattcgtgttccaagcaaaaagattgcattgatgagcgaatgggaaacaaaaatagaagcaattgccaacagtaccattccggcaaatgtaaccagcctttccggtgttccatcgtggatgctagtgcttatcaaacggattctcgaaaagaccggaaaacagactttagaagaggtatggccgaatttggaagtatttttccatggcggagtggccttcacaccttaccgtgagcaatacaagcaggtgatacattcaccgaatatgcattatgtagagacgtataacgcttccgaaggatacttcggcacgcaaaacgatctttctgatcctgccatgctgctgatgattgattacggaatcttttatgagtttgttccattggaggaagtgggaaaagaaaatccgcaggcgtattgtcttgaggaagtagaattaggcaagaattatgctatggtgatttctacttcttgcggtttatggagatatatgattggcgacacggtgaaattcaccagcaaaaatccttataaattcgttatcacaggaagaacgaagcatttcattaatgcattcggtgaagaacttattgtcgataatgccgagaaaggactggctaaggcttgtgcggaaaccggagcacaggtcagcgaatattctgccgcaccggtatttatggacgaaaacgccaaatgccgtcaccagtggctgattgagtttgccaaaatgcctgattcggttgagaaattcgcagcaatattagatgcgactctgaaggaggttaattccgattatgaagcaaaacgctggaaagatattgcattgcaaccgttggaggtgatcgttgcccgtcagggattgttccatgactggttagcccaaaaaggaaaattgggaggacagcataaaattcccagattaagtaatacacgggaatacatagagacaatgctattgctaaaccaataataaatcactctagcttgataccccggtgtcggtatgtccaacaccgggtatcaggtatatcggcacctgggtatcagccgcatcctctttcctacgaaattagcgggcattcactattatcccccctcccagcagtaaaccatctctataaaacgcagcagcttgtcctgccgcaattgcagttaagggctcatgaagttgtatatgaagtaaattatctggtgtaacagtgaccgtgcaatggttctcttgcttacgatatcgtattttcacgatgacatcattgtagcccagaatcttttggggatttacaagattccaatctttcagctgcatttctgttttttccaaagcagaaagagaagacaacacaacttcgttcttttcgggatatatctcttttacaaaaacaggacggttcagatgaatgcctaagccacgcctctgaccgatggtgtaaaaagggtatccttcatgccaacctataaaatttcccttttcatcgacgaatctcccccgtctgaccatttcggaccaacagctgacattttcggaccgcaactgaccatttcgggccaaccactctttcaggaagctccgatagtccatcggacagaaacagactcctatactatctttttttgtcgctactttttggaaaccgcgttcggcagcccaaacacgagcctcaacttttgtaatattccccatcggcaacagtatccgccgaagtatatcttgcttcaacccccatagaaaaaaagactggtccttatccggatcagcggcatgggttatataataggtaccttccaactctactttctgaacataatgtccggtcgctatataaaaaatgcccatttcatcggcaactttagcgagcaaaggccacttcagacagttattgcagagtgtacaagggaccggtgtacgaccttccatatattcctgtacaaagtattctatgatttgcttacgaaaaacatcacgggcatcatatgtgatatggcgaatacccaaacgctccgccaaactacgtgcatcttccagatattctgtcgagtcgttcaactcatagaaacggaaagtaattccggttacttcataaccgccctccagtagccgcatggcagcaacggaactatccgtaccaccgctcatacccaacagtactcgtctattttcttctatcatactgcaaaattaaggattttcccgtatctttgtcagttaaagcctaaagagaatgaaagagaaaacatctgacggacaaattatcatcgtattgacagagcatcctgtactcggtatattactcataccctatatagctgaaagattaagtgacaacacattacaattagtagaacaggcatttcacgcctctgccgaagctatgaaccggatgagtgaagcggaaaggcaggctattgacatcgcgtcacactatacggaaaagtatttgatgggagtatactcccgagagaaaacagtctcccgcttcctacataaattatccgaagaccccgaacggataaaaaacaacgtccgtccatttattgaaaagaagttgcaggaaatgctggctctgatacgtgaaaagaagttagcgctttatcagaaacaagggggaagtaaactgctgtatgcccatcatgcctaccacgtacatccacatgacgctgagattcgtttcatatttcagatagatgaaaatattttccgctaccaactgcaatgttattataaaggcgagccattctctctcagtgagcaaaaacccgtcaatgtgttaacatccatgccgaccaccttatcattgggaatggagctgtatttctttccaaacatcgaaagtagccgacttttgccttttaccaaaaaagaagttatcagcgtaacaacttccgagaccgaaaagtatattgacaacattctcattcccatagcccgttatcatgacatcaagactgagggtctgaacctgatcgagaagaggcgaaattgcgaggctatgttaatcatcgaaaatacgatttacgataaacagttgctacagcttagttttcgttatggcgaccaaaccttcactccggaagacaacaataccggcatgaagaggattatttaccgaaacgaatccggagaaatatactgttttcggcgaaatgccaatgcagagaaaagagcgatacagttcttgacaaatgccggattgcaacgtatcagcgatgttcactttcagttatcacccgatattcccgaaagaacactctccgaatggataagcagccaccgggaaatattacaacaatcttttatattatccggtaatatgagtaatacgccttattgcttggacgagatacatactgaacaaagttgcgatgataatcccgattggtttgaactgcatattactgtcgttatcggtgacttacgtattcccttcacacgtttccgaaaacatatccttgaagagaagagggaattcctgctaccggacggacgaatgattttattaccggaagagtggttcagcaaatacacgaatatgctggaaatgggagtccagacagaaaaaggattccgcttaaagcatacattcataggcgtagtagagactatcttgaatacacctgcatccaagactcccacattcaagaaagaaatacgtagcattcatccgcccaaaggactaaaagcacagctgcgtccctatcagcaaaaaggattctcgtggatggtacatctcaacaaagaaggattcggcggatgcctggcagacgacatgggattgggaaagacacttcagacacttaccctgctacaatatatctataagccaatatccccaaccgcccgtcagactgcggatatcaccgtctcttctcccgccatccgggaagcaaaagcggatatcgacggacagttctctttattctctttcgactccgaagatgagttactgccccaaccaaacgagattcgtggaaaagaaatgaatccggaaaatgtatcacaaccacaagcacgaaagccacgaaagcccgctacacttattgtggtccccacgtcgttacttcataattggcgtcgggaagcaaaacgttttaccacgctttcaatggtagaatacacgagtaccagtattctcagcaagacacatccggagaagtttttcagacgttttcatttagtgttcacaacttacgggacaatgagaaagaatattaacatactccgctcctactgttttgaatacatcgtactcgatgagagccagaatatcaagaatagcgaatcgctcaccttccattcggctatccaactgcaaagcaagtacaaactagtacttaccggtactccgattgagaattcccttaaagacctgtgggcgcaattccacttcatacaaccggacttgctaggttcggaaagcagttttcaaaagcgatttatgttaccaatccgtcaagggaatacccgcatagaagcacaactgcaacagttgatcgctccattcattctccgcagaagtaaaggagaggttgctccggaacttcctccgcttacggaagagacaatctattgtgatatgacggaagaacaaaacacctggtatgagcaagagaaaaacagcttgcgtaatattctgcttcaacatcctcaaagtacggacaaactgcactcattcagtgtattgaacggaattctacgcttacgccaattggcgtgtcatcctcaactaatctttcctgatttcacgggatcttccgggaaaactgcacaaatcattgagactttcgacaccctacggagtgaaggacacaaagtattaatattttcttcattcgtcaaacatctggaagtactggcagaggcctttcaggagcgtggctggaagtacgccttactgacaggagctaccaacgaccgaccttccgaaatagcccatttcaccgaacaaaaagatgtgcaggctttccttatttctttgaaagcgggaggagtaggacttaatctgacacaggccgactacgtatttatcatcgacccctggtggaatcctgccgctgaatcacaagctatagcccgtgcccatcgcatcgggcaggataaacaagtgattgcctatcgtttcattactcaaggcagtatagaggaaaaaatccttcaacttcaagacgaaaaacgaaaactggcagagacattcgttactgatagcgaaacattgccagcattgagtagtgaacaatgggtggacttgctaaaatgattttttattatatctttgtatccaaaaccatacagcatgaaatacaaacttatcgtgctcgatcttgacggcacactgaccaactccaagaaagaaatcaccctccgcaacaaagaggcattgatacgtgtacaagaacaaggtgtacgacttgtcttagcctccggacgaccaacctatggtatcgtacctctagccaatgaattgcggatgaacgagttcggcggattcatcttgtcctataacggaggagaaatcatcaactgggaaacgcatgaaatgatatacgagaacgtgttgcctaatgatatcattccccgactttatgaagctgcccgcacataccatctgactatattgacttacgacggagcagagattgtgactgagaattcccatgacccatacgtagaaaaagaagcgtttctgaataaaatggcgattcgtgaaaccaacgattttcttactgatatcaccctgccggtagccaaatgtctgattgtgggagatccggaccgactcattcctttggaatcagaactatgtcttcagctacaaggacgtatcaatgtcttccgttcagaaccttattttcttgaattagttccacaaggtattgataaagcactgtctcttggtgttctattagaagagacaggtgtaaaacgtgaagaaataatagcaatgggggatggctacaatgacctttccatgataaaattcgcaggactgggtattgctatggggaacgctcaggaaccggtgaaaaaagcggctgactacattaccttaagcaatgaggaagatggcgttgccgaagccattgagaagtttatctatcaacaatagcctacatatccggattttatactaactttgcgattccaataaaacaaatataaaaggttatggaacatcaacttacaatttacaacactttaaatagaaagaaagagttgttcgtaccgcttcacgctcctcatgtaggaatgtacgtatgcgggccgacggtctacggtgatgcccatctcggacacgcgcgaccctctattacattcgacgttcttttccgatatctcactcatctaggatacaaagtgcgttatgtacgcaatattaccgacgtaggtcatttggagcatgatgccgacgacggtgaggacaagatcgaaaagaaagcgcgtttggaagagctggagccaatggaagttgtacagtattatctgaaccgctaccacaaagcaatggaagcgctcaacgtactttcgccaagtatcgagccgcacgcttcagggcatatcatcgaacaaatcgaactggtacagaagattctcgatgccggttacgcttatgaaagcgaaggttccgtatatttcgatgtagccaagtacaacaaagaccaccattacggaaggctttccggccgcaatctggacgatgtactgaatacgacccgtgaactggacggacaaagcgaaaagcgcaatcccgccgactttgccctttggaagaaagcgcaacccgagcatatcatgcgctggccgtctccgtggagtgacggttttcccggatggcatgccgaatgtaccgctatgggacgcaaatatttgggcgaacacttcgatattcacggaggaggaatggatttggttttccctcaccacgaatgtgaaattgcacagtcggtcgcttctcagggggacgatatggttcactattggatgcacaataacatgattaccatcaacggaacaaagatgggcaaatcactcggcaactttatcacgttggatgagtttttcaacggtacccataagttgttggcgcaagcctatacgcccatgactatccgtttctttattctgcaagcgcactaccgcagtacggtggacttcagcaacgaagcattgcaagcatctgaaaaaggattacaacgcctgatggaagccatcgacgcattagagaaaataactccagccgccactacttcagaaggaatcaacgttaaagaactacgtgccaaatgctacgaagcaatgaatgacgatttgaacactcctatcgtcatcgcacaacttttcgaaggtgcccgtatcataaataatatcattgccggcaatgccacaatctctgccgaagacttgaaagatctgaaagagactttccatctgttcagttttgacattatgggattgaaagaggagaaaggttcttccgatggccgtgaagcggcatacgggaaagtagtagatatgctgctggaacaacgtatgaaagcaaaagccaataaagactgggcgacatccgacgagattcgcaacacgctgacagcactcgggttcgaaatcaaagataccaaagatggtttcgaatggagattgaataaataaaaaatacagaagaccggtccaccacgaaccggtcttctcttctttcatagaaactaaagcaactaataccttttcttaatattcactaatcacttattttccatgagcatctcaacaggttgcccatgttggcaaatcactgtcaatacggtattttctccctgttgccgcaatgttacattttccatcggactctttagcgtccaacgccccttaaggcatatctctttacgaatggggcggctaggctctttcgttgtatatgttttctcttctatgtttaagttaggatcacatacgctcaggcgaatactcttgtccgactcttgtgcaaccatcaccatcgtttcggccggaatggaagcaaccactttgtcatttgcagattgataggtttcaaaagcagcataacccgtaatacccgtttctttatcataaacaacgtgagctgtttgatcacgttgcaagactttatatggcagggtcttacgaagttcctccaaatcggaagaagaaggttgtataagaatcatatattcgtatgttccatctttcggagccttgccatgtgctatccaagcagaagagaatttacctttcgtcaccgctcgggtcttctcatggcgcgactcctgttccgccacttgcgaacggactgctccgtctactacatgataataattatcataaccatcatgcagccaatagccatcatctcccaccttactgtctttaccattatatttcgtctgaaaaagggtagtttccgttgggtactcagtattactgttcgtgatacctgttcccaggcaaaccattctgttatcgaaacagaaaacagacttacgggctacaaagtcgggcgtaaagttctcataatcacgttccatcaacttcatagcgaacattccgtttttaccgtccaaagaagtacttccggagaagttctctttggaacgcgccatagtagttcccttcaacggactatcaagcaactcaaagggtaaatgaatggtagtcgtacccggtaaacgattccagtcccatccttcctgcacaaaaccacttccggcacgggaaacaggattccctttacccataatctgcacagagccataactctgataacgcccgtaacgattatctttcgcataaatctcggctccccagacatcagttgtatatcctttcaatgtcaccatccaatccgcacgacggaatattcccgctgaaccatagttgtaaacaaagaatccttgtggagcttgagctgccttgacaccctctttcttaaagaaacgtgcattcggagtatctttgccatgtaccaagcgcaaataatcagcagccaaattacggtcgaacgcattcccttgaccggacaagtcaccagacagagcaatattagcaaacgcttcaatatcatcactacccatctttccaccgaaaggatgacgtccactgataccgattccccattcataaagattacaataattacgcatggcgataaaagcagactttatatgctggcgggcttcttccgtcaactcgaaactcgttccattcgtgaaagcgatgaattctcctactgttgccaatactccggtggtatagccgggataaaaacctccgtgatggaaagtagtcccatccacttttataccgccaattgttccggaggtatagcgtaacgaagaagacagccaacgggacaagccgctcaacgcctgttcctgttctcttgcatccgggaacatcatggccgaaacgaatttcgccatcagcagtgtatgccaggagtctaatagttcgtcccgagtgggcgaacatggctggcgggtttcctgtaaagcagcccagaaacgcaatgtagagagataagcatcccgatgaggatgtttataaatcgcatcacgcatcagccaggcagtcgtatatatcttacgaatctgataaccataatgatgattggttcccataccgctaccaaaggcaaatccctggtcaatagcataatcgaataccgtaaagtaattcttctttgaagcctcgttctgattacagagataatcgtatgcaaaacctgcaagcatggtctcaatatcattccatgacatttcccctttcttcttattctgctcgtcgggagcgacaataggagttcccacaaatcccgttccggcagcagaaggtgtgatagctgctttttcaaatgtcttataagctgcattaatctgcccttgcggagcttttttcacttccagaaaatccgttaaacgctgttctatcgttttcaattctttctttcgcttatcggtcaacttagttgccaacgggatatcatacgactgctgttcccatttccacacaaggcaccaatgccaaaggtcacgattggacaaaccgttattagccggtaactgttgatcgggagtcgtcctcaggttcattttcttctccgggaaaatcaaacggtcaagaaagacacgtcctttccgtccgggagcaacaagccgatacccaacaatattcttatccttcttattaccttgcatatatgcgaaagaaatccagcaagcacgccaaccggctgctttcaagtgatacggaaaccaataggagacctcacccgctttattcaggaactcaaaacgaatagaatcctgctgcggtttctcattataaatccacaacgtaataccaaactgctgttcttttttcgcattcagagacaacggattgatttggacatccaatgtagaaccggggtgaaaatcccattccaggctattctccccttctttgtagaaaagagaagaaaccttggcatctcccttccctgaaactttaaacgtttcgggaactccgtcttcgaagccgataagttgagcaaaagcagaagaaattcctccgaaaaggaagaataatatcagagttatatttttcattgctattcttaacttaaacgcagattaacgcaaattatcgtaaacttaagggttcaatctctgcgataatctgtgttaatctgcgttttataattactagtcatttaataaggaatccgatccgacaaaattttctctgtgtaccaaggatcatttatttctttcagcatggctcccatttcacgatagagttgctccaccacttccttattttcttccaaagacaaattgtgcaattgataagggtcttttacatcatcaaacaaaaggctctttttcaactgtttcgtattacggtcgatatataaagctagtgtatactgcgcagttttaatacctcttgaagaagggaagtaggtttgtaccaatccgttctcatctttttcgccatccaaattctgaatatagagtgcaccggtgggacgtacgatctccgctttctcatcaaagaaaagaggagcgaaattacggccttgtacttcggcagggattgaatcccccaatccgcacagtccaagaacagtaggcataatatccggtgacgataacagcagatcatccactctcggctgaattttaccggggaaacgtaccaagaaaggtatattcatagattccgagtaaggagaattcttcggatcttccgtacgttggctacacatggtctcgccatgatcggaagcaaagataacaaccgtattcttatccaatcccaagtctttcaaagtctccaagatctggccgaaagcacggtctactcccgtcacagacgcaaaataataacggacagactctgccttcttcattttcagatccacgttcggacgaaccagcaggctatccaacggttggctacggtaaaggttgaaatcctcttcctcgcaatcatccaaagaacgatacggactgtgaggcggattcattcctaccataatgaagaacggtttctttgtatcgcgtacattcccttcatttctcagataagaaacgaccttgcctgattcatgcaaaggcgaccactccttcggatcatgtcttttaccgtccgtatcccaataatgcggattcttatgttcatcgaaagttccataagaataccagtaattaaaaccatgacgacggtctttcggtgtataggcgtcccataccggacgcttagtctctacatattgtcccggatgttcgggatcgttcggagtcgggaagtcagcatggagcttgccgaaatacgcacaatcataaccagctttgctgaatacgtcaccaatacattccgcatcttcacgcaatgaactgataggccgtgtagaattacaattcaaaggtataccgctacggttcggatacatacctgtcagcagcattccacgatgcggactacttaacggacagttactttgtgccgaagtcaatactattgattcacgtgcaaaggcatccagattgggagtatgcacgggatcacccttaaagtttaccttatcctgaaacccgttctgactccaaattcccaatgcctggttacggtattgatcagggaatacatagataatattcggatgttcgacttgctctgctacctgtttcggagctttgcatccctgtgcggcaaacagcgtcaagctgccgaccagaaggttgataggtttattcatattcatttctccaaatctcttttacgcatcaatgcttccaagaaataatagtcggcatagttcaggggaacatctatttcctgaccgtgaggaatactacctaccgagtgcatcaggatgaagttcccgtttgtacccacttcggcacgataagcaggagagcccaaactttccatgatcttatcagcaatttctttataatgattgcccggtcgataaccatccaattcgtagagtgcagaagctgtacatgcagcagcggaggcatcacgaggttcgttcggaatattcggagcatcgtaatcccaataaggaacgagatcttccggcatattcttattgttaaagatgaaattatatactttttgtgcttggtcgaggtacttttcgtctttcgtataacggtagcaagtagtatatccatagagagcccaagcttgtccgcgagcccacgatgattcgtccgcatatccctgtgctgtctgtctcttgcgtacttcaccggtctccgggtcatagtctactacatgatagcaactgttatccggacggaaatggtgtgccatcgtcgtatcggcgtgtttcacagcgatatcatagaaagtagaatctccggaaaaggctgttgcctcaaacagcagttcaagattcatcatattgtctataatcaccggacacttccatccacgcgttccttgccaacctctatcagcatcccatgactggatcacacctgctccgggacggaaacgggtagataaggatttggcggcctccaccactacatctttatattctttcttatctgccaggcgatatccgttcagataactacaaccaatcatgaaacctacatcatgatgccatttcaaatgtttcacagagtctaatgcttctgtatatttttcagccaatggtaaccattttttgtctccggtcaaattataagtcaaccacatactaccggggaagaaaccggaacaccagtcatcaatagggatataagaaatactaccatctttgttaattgttctcggattcagaatcttaccggatttctcgataatatctgtttgaatagtgttttgtgctaccgcgttgtcaatgttgtcctgaataaagtctacttcagcttttttttgtccaccgcaactcgtaaaaaccaaaagggaaagtcctaatgcgctaagaattgttttcataatacacgggttatttgttaagtgattaattttcttgatggcaaaagtagtgcatttaaatagaattgaccgacctaaataatccaaatgaaggacaaatttggtacatttgcaaaagaaatatacatatcaaattaaaaaaaacaaatattatgacaccacaagagtttttcaagaatgacatattcgccacaaaggcaggtatagtactactggaagtgcgaaaaggatacagcaaagccaaattagatatcaaaccggaacatctgaatgcgggagcacgcacacaaggaggagctatctttactttggcagatctggcacttgccgcagccgccaattcacacggcacactcgctttctctctttcatctaccattactttcgttcgtgcaagcggtccgggagatactctttatgctgaagcacacgaacgttacatcggtcggagtacaggttgctatcaagtagatatcaccaatcaaaatggagacttaattgcgaccttcgaatccagcgtgttccgaaaagagcaaaaagttccttttgagatagaaaaagaaaaataaaatccctttgagagttattatttccccacctatctcattttacaatagaagtcagcggatgacggttacctctaacgtcgtttaggaatgctttggcagaaccgaagttcaaatacaaatccagacgtacgggaagatgattcaggtcatctgttataaaaaaggtaatcacctctttctccttacctttcttatcatattccactaatgagaagatcagacagcgataggttgttccattctccgcctttacattctcctttccacgataaataagcgtctgttcttctacctttcttccggtagccatcggaaacttgattttatcccctatcttataatccgcaggatcgtaagaacgcgcctgtgccagaatactcaacatatcatatatacaacggctatcacttgcaactgcctcatcaaaatttccatctcgatatgtgcgcttctgattgacaaaacaaagaccatccttataagagaaccaagcctcatctaccgtataccgtttcccttcttcagcacctttgcgaaaataacgaggttccaacttctccccgatcacacaagtcagcgtgtcacgcatcttgaaaaagaagtccgcccgtttactgcctagagcaagcagattgatccggaacgcaggttccgaatgataagttgtcgcatttgttgtcaaactggcaagcccggctttcacccaaacaaatttccagttaaaatacaaatcatacattacatgttcaccggtctgaaacgcatcatttttcgcctcacattgggcacttgcaggaagggcaaaagcacccgtcattaatgccactaatccaataatgagtttgcatcggacgttaacgacgccggttctgattatttcgttcttttttcttcttatcttcatctggtttttgttttttaagttcatccggtttctgcttatcaacaggagtcgcatgaatatcccatggttgtgttacatcccacaatgctttatattccaagatagtagggtaatagaaaacttcttccggttgtatgcccttttcaaagtctcccgtatcccactcgccatttccattcctatcattaatcaaccgggcagcatactttccaggattcaagaaatagaaatcaaccattccatcctcctctactctccgtttacgaacgactttatcttgggcatcaagtaattctacaaaagccaacgaatccgctccactaacattaaaatgaagtgtgaaatactcatcttcgctgcgaaccttgaactcttgttttattttatcagtaaacaatccgtatataccatgaaaagcagtcgaatctaccgaaaactcgtactccagagtcggttcccaatcataataaaaattgaactttttcagatttatcgaatcctgctcaaactcgaacggtatatccttccaaagcgtatcgactttctgccgtaaatgaattgccgcactatcaaagctggctatcggctcttcaaaatccaaagaaatgtacccatacacatccattgatgaagggacattgacttttacaggtaagaactttgtaggttccggttcttcttcctcatctttctttttcttctttttctttttgggcttttccgattcttctttcttatatttctgcttcgacaccaaattcaaagtatccgtacgagacaccaattgattcaacgtatctgtataaagataagtaagactcatagcaagagtatcctgcttgaagagcagagaatctttcacccaataatgaatcgtatcgttccgttgattcttctcgataacaaaagcatccttttcatcgaagttcaaccctttcatcacaggcaaggtgtccgccttaccggcaaaatagagcgtaaacttgtgtgggataagccgttcggacttaatcagatactgtgaataattaaattccttaaaagcacggagaattacatcatccggcaaataatgcatatatttcttttcaacaatcgtatcatacgtcagagaatccacccaagctgtgtccatacgggtacgttcttccatacggggaataatcagagaatcatgaaaagcgatcatttcactcttctgattaaaagtaaagttctggtctgcatccatcaatccgtaaatacggtatttgccgggagccacaccacgaatagaaaaacgcccacgactgtctgtacgtgccacacgttcgaaaggtaatttgttaaaagccgaatcgttcaagttggaatgtaacccgacaagcatacctttaatcggttccaaattagaagcatcaagcagagttcctgcaacttccatcgtatcgatttccgtacccgtagaaaaggtaaaagcgaaattacccaacggattaccttcattattgtcgacgatagcatccgaaaagtcgattgtataagtagtattaggcttcaaagagtcaagcagattcacttgtatcctcttgccggaagcctttatttcaggctgctgtatctgaggaggggaaacaaccaccttttcagtcgccttttccagttttataaattcgtcaaacaccagagagactttagtcctcttattatttaaagcacctgcagcaggagtgctacctacaaaacggggtggcgtctcgtcaataggaccaccgtccggtcgtccgatactggcacaggaatatagcatcactaccagtgttactaccggaagtaccttgcgtactatttgttttatcttttgattctcaaactgtaacatggtgcaaaaataagtgttctttaccaataaataccatacttctagctaatttattaaaaaacgaagcgatggattcctgtagaaatcattatctatgctgtttttatttctttttctcactaatcttactacctttgttagctgatattatttcatataactatagttatgcgtaaagtagactatagttatccttacgcataactatagtcatacgcaaagtacactatagtcaaacgaaataaaaacagcaaacgaaacacatccgaacaggcaaacggatattaaatatgcctacataatataattacgcaaatgagcatacgttacgacctttacgaaactcctgatattcaacagacaggcgaacaacaaccacttcacccccgtgtagttatcaatggaaccgtcgaccagaacgaatttctggatcgcgtacacaaattcaccggaataagccgcagtttattgtcaggtgccatgcagtctttccaaaacgagttaagagatttactcgctaacggatggaatgtggagctgggagatatcggttacttttccgtttctctgcaaggccctcccatcatgaagaaagaagaggtacgtgcacaatctatcaaactgaagaatatcaatttccgcccaagcgctcaattcaaaaaggaagtgggctggcaaatgagattggaacgcggggagtctttcacccgtccgcatggaaaaggacacagtgaagaggaatgtctgactatagtcaatgaccatcttgggaaatatccctgtcttacgcgtgccgattattgtcggttgacaggacatgacaagcagcgggcgctcaatgaactgaatgcttttatcgaacaaggggtgttgatgcgctacggggcggggaaacaggtggtttatacgaagaagtatccatgttcggtatgattcccgggaatgatggcgtttcgtcaggtaaaaagtttataatacagtcaatttattaaaaaccatccctaattgaatgtttttttgcccttcattgaataaaataatccttatctttggctcccgaaattcaaacctaatacaaaaaacccatgaagaaacaactactatcttgctgtctggcggcattgggactgacggcaattcaagcacaaagcttcaacgagtggaaagacccggaagtgaattccgtaaaccgctctgccatgcacactaattattttgcttacgcatcggctgatgaagctaaagccggcatcaaagaaaactcagcgaattttatgactttaaacggtctttggaaattcaactgggtgagacacgcggaagcacgtccgacagacttttatcagactaatttcaacgacaagggttgggataaccttcaggttcccggtgtatgggaattgaacggctacggcgaccctatctacgtaaatgtaggatatgcatggagaaaccagttcaagaacaacccaccgtacgttccgacagaaaacaatcacgtaggttcttaccggaaagaaatcatcgttcctgccaactggaaaggaaaagagattttcgcccatttcggttcggtaacttccaatatgtatctttgggtgaacggacgctacgtaggatatagcgaggacagcaaactggaagctgaattcaatctgaccaactatctgaaaccgggtaagaatgtgattgctttccaagtattccgctggtgtgacggcagttacctggaagatcaggacttcttccgctactccggtgtaggacgcgactgctatctctacgcacgcgacaagaaatacattcaggatattcgtgttactcctgatctggacagccagtacaaagacggtacgctgaatatcgctgttgacctgaaaggaagcggtacagttgccttagacctggcagatgctctaggcaacagtgtggctactgctgatttaaaaggttcaggtaagttaaacaccactttgaacatttccaatcctgctaaatggacggctgaaacacctaatctttatacactgaccgctacattgaaaaacggtaacaatacaatagaagtaatccccgttaaagtaggtttccgcaaaattgaactgaaaggcggacagatactcgtcaacggacaaccggtactcttcaagggagccaaccgtcacgaaatggatccggacggcggatatgtagtttctatcgagcgcatgttgcaggacatcaaagtaatgaaagagcttaatatcaatgccgtacgtacctgtcactatccggacgacaaccgttggtatgacctctgcgaccaatatggcatctacgtggtagctgaagcgaatgtagagtctcacggaatgggatatggtgacaagacattggccaagaacccgatctatgccaaagcacatttggaacgcaaccaacgcaatgtacaacgtagctacaaccatccgtccatcattttctggtcattaggcaatgaggccggtatgggacctaatttcgaaaaatgttatacatggattaaaaatgaggacaagacccgtgccgtacaatatgagcaggcacgtaccagtgaatttacagatattttctgcccgatgtactatggttatcaggactgtatcaaatattgtgaaggagatatccaaaaacctctgatccagtgtgaatacgcacatgcgatgggaaattcgcaaggaggattcaaggaatattgggacatcatccgcaaatatccgaaatatcaaggcggcttcatctgggacttcgtagaccagtcttgccattggaaaaataaagacggagtggccatctacggttatggaggtgacttcaacaaatatgacgcttcggacaataactttaacaataacggtttaatcagcccggatcgcataccgaatccacatgcttacgaagtggcttatttctatcaggatatatggacaactcctgccgatctcgccaaaggtgaaatcaatattttcaatgagaatttcttccgtgacctgtcttcatattatctagaatggcaattgctggcagacggggaagttgtgcaaacaggcattgtgccggatctgaaagtggcgccccaacaaaccgtcaaagtgcagattccgtttgacacaaaaaacatctgtccgtgtaaagagttactgctcaatgtcaactataaactgaaaacagccgaaacattgttacccgcaggaacaaccatcgcatacgagcaactgagcattcgtgactataaagctccggagctcaagctggaaaaccgacaggcttccaatcaggcaatcaccgtacccggtattctggataacgaccaaaattacctgaccgtcaaaggcgaaaacttctctatggatttcaacagacacaacggctatctctgccgctacgatgtgaacggaatgcaaatgatggaagacggtagcgaattgactcccaacttctggcgtgcaccgaccgataatgatttcggagcaggcttgcaacgcaaatatgcagtctggaagaatccgacattgaagcttacttccctgaaacatgctattgagaatgatcaggccgtgattcgtgcagaatatgacatgaagtcgataggaggaaaattattcctgacttatatcgtcaacaacaaaggagcaatgaaagttacccagaagatggtagcagacaagagcaagaaagtgtctgaaatgttccgtttcggcatgcagatgcgtatgcctgccaactttaacgaaatagagtattacggacgcggaccgatagagaattatgccgaccgcaacaatgcagccaaacttggcaaataccgtcaaacggtagaggaacaattctatccgtatatccgcccacaggaaaccggaacgaagacggacatccgttggtggagactcttgaatatcagcggaaacggtttgcagtttgtttccgaagctccgttctctgcttccgcactgaactataccattgaatcattggatgacggtgaaggcaaagaccagcgccattcctccgaagtggaaaaagcaaactttacaaacttctgtattgacaaggcacaaacgggactggcatgcgtcaatagttggggagctataccattagaaaaatatcgtcttccatatcaagattatgagttcagtttcataatgtctcccgtatctcataaactaaagtaaaaaacatagttaaaaaacacggtatcaaagaacaagaatagcgaaattactgtacttttgcagccggaaactgattattaataattagtttccggcttttttggcctttaaatcacttatcgacatgaatgatgacacaccggtaacaaacgcattacattaaaaacagataattattaagtatgaaaagtagaattgttttatttgcattttgcgtagcccttttgtctagttgtggcaataagggcaacggaacgggacaagtcccagaatatgcagtacaagagttacaaaagaccactgctaatttaacgactgcctatccggcgacaatcaaaggtaaacaagacgtagaaatccgtccacaggtatcaggcttcatcacgaaattatgtgtagacgaaggagcaactgtacgcaaaggtcaagttctattcatcgttgatccgacacaatatgaagcagcagtacgtacggctgaagcagcagtcgcaacagcagaagcggcagtgcgtacccaacagataacagtggataacaaacgtgaactgaacaaaaaacaaattatcagtgactacgatctgtcaatggcagaaaacacattggcacagtctcaggcacaattggcacaagcgaaagcacagcttatcacagccagacaaaacctctctttcacacaagtgaagagtccttccgatggtgtaatcaatgatatcccctatcgtttaggagcactggtgagcccttctatcgctactccgatgactacagtttctgagatagaagaagtatatgtatatttctccatgacagaaaaagaattgttggcgatgactaaaacaggcggtaccatcaaagaagaaatcgaaaaaataccgtctatcaggcttcagttgattgatggtacagagtacagcatcgaaggtaaagtggacgcaatcacaggagtaatcgaccaatcaaccggttctgtaagtatgcgtgccctcttcccgaacaaagaacacatcctacgtagtggtggaacagcaaacgtactgattccttacacaatggagaatgtaattactataccgcaatcagcaacagtagaaatccaggataagaaattcgtttatgtcctgcagccggataacacggtgaaatatacagaaatcaccatcttcaatctggacaacggaaaagaatatctcgttacttccggtttgaactccggagataaaatcgtcatcgaaggcgtgcagaatctgaaagatggtgaaaccatacaaccaatcacacctgctcaaaaagaagcaaactatcaacagcatttgaaagaccagcacgatggtaatttagctactgctttcaattaataacttagataatcgtatgaagttagataattttattaaccgtccggtactatcaacagttatttctattttgatagtcattctgggtgctatcggattggcaacattgcctatcacccagtatccggacattgctccccctaccgtgtcggtagaggccacttatacgggtgccagtgcatcaactgtattgaactccgtcatcgctccgttggaggaacagatcaatggtgtagaaaacatgatgtatatgacatcaactgcatccaatacgggttccggtgagatatccatatatttcaaacaaggaacagacccggacatggccgccgtcaatgtacaaaaccgtgtttctatggcacaaggtctgttgccggccgaagtaaccaaagtcggtgtaaccactcaaaaacgccagacttccatgctggtagtattctctctctatgacgagacagatacatatagcgaatcgtttattgaaaactatgctaagatcaacttgattcctcaagtacaacgtgtaccgggtgtgggtgacgccaacgttttgggtcaggactattctatgcgtatctggttacgaccggacgtcatggcacagtacaaacttgttcccggtgatgtatctgcagccttggcagaacagaatgtcgaagctgctccaggacagttcggtgaacgcagtaatcagacattccaatataccatccgctacaaaggacgtctgcaacaaccggaagaatttgaaaacatcgttatcaaatctctgcctgacggtgaggtactccgcttgaaagatatagcagaaattcaattggatcgtttgggttataactttacaaaccgtgtagacggccacaagtcagtaacctgtatcgtataccagatggcaggaaccaatgcaacacagaccatcagtgatattgagcaactgctggatgaagcatcaaaaaccttgcctaccggattgaagcttaacatttccatgaatgccaatgacttcttgttcgcttctattcacgaggtgttgaagacattgatcgaggcatttatcctggtgtttattgtggtatatatcttcttgcaggatttacgttctacgttgattccaaccattgccattccggtagctcttatcggtactttcttcattctgtctttggtaggattcagtttgaacttgctgacattatgtgcgctcgtcctagccattgcgattgtggtcgacgatgccattgtggtcgtcgagggtgtgcatgccaagctcgaccagggttatacttctgcccgtctggcttctatcgacgctatgaatgaactgggtggtgctatcgtatctattacgttagtcatgatggccgtgttcgtcccggtaagtttcatgggaggtacggcaggaacattctatcgccagttcggtatgactatggctatcgctatcggtttgtctgcattgaacgctttgacattgagtccggctttgtgtgccattcttctaaaaccgcataagaaggaagatggaacggaagattcgacattgaaggaacgtatgaaagtagcttatacggcagctcatacaaccatgatcaacagatacaccgaagctatcggaaaaatgctacatccgggaatcacacttaccttcacgattattgctattctcggtatgattttcggtttcttcagtctcaatccagtggttaccgcaatctttgtacttcttagtatcctggcactgatcggaatgagtacaaagaagttcaagaacagattcaacgatacatacgagtctatcctgaaacgttacaaaaaacgtgtattgttctttattcagaagaaatggctgtctatgggattagttaccgcctctatcgtactgcttatattcttcatgaacaccactccgacaggtatggtaccgaacgaagataccggaaccttgatgggagcagtaacattgccgccgggtacatcacaagaccattctgagaaaatcttagcacgcgtagacagtctgatcgcttctgaccctgctgtattatcacgaaccatgatttccggatttagcttcatcggtggtcagggaccttcttacggttctttcattatcaagctaaaggactgggatgaacgttctatgatacagaactcggacgttgtagtcggctccttatatatgcgcgcacagaagattatcaaagaagcacaggtattgttcttcgctcctcctatgatcccgggatattcggcatctacagatatcgaggtgaatatgcaggataagaccggtggtgatttgaacaagttctttgatgtagtaaatgattatatggcagccttggaagcacgtccggaaatcaactcggcaaaaacatctttcaacccgaacttcccgcaatatatgatcgacatcgatgcggcggcttgtaagaaagctggtatcagtccgagcgatatccttacaactatgcaaggatattatggaggtctgtatgcatctaacttcaaccgtttcggtaagatgtatcgtgttatgattcagtctgatccattgtcacgtaagaatctggaatctctgaagaatatcaaggtacgcaacagtgcaggtgaaatggctccgattgcccagttcatctctgtagagaaggtatatggtccggatattatcagccgtttcaacctttatacttccatgaaggtgatggtagctcctgccagtggttatacctccggtcaggcactggctgctcttgcagaggttgctcaagaaaacctgcctaccggttatacctatgaattaggaggtatggcacgtgaagaggctcagagtagcggaagtgctaccgggctgatatttgtgctctgtttcgtattcgtttacttattattgagtgcgcagtacgaaagttacatacttccattagccgtattgctatccgttccgttcggtctgttaggtagcttcctgtttgtcaacggtgtaagtgcactcggtaatatctcagcgttgaagatgattctcggtacgatgtccaacaatatctatatgcagattgcattgatcatgttgatgggtctgttggcaaagaatgccatcttgattgtagagtttgccctcgaccgtcgtaaaatgggtatgagtatcacttgggcagccgtattgggtgccggtgcccgtctccgcccgattttgatgacatccttggctatggtagtcggtttgcttccgttgatgtttgctttcggtgtaggtgctcacggtaaccgtacactgggtactgcttctatcggaggtatgttaatcggtatgatctgccagatctttatcgttcctgttttattcgttatcttccagtatctgcaagagaaagttaaaccgatggaatgggaagatattgacaatacagatgctgtaacagagattgaacaatacgctaaataatgaaattcgatatgaagaaacagattctatatatgttgtgtgcaactgctctcctgagcagctgccacatctataagtcgtatgacagacccgaagatatcacaacttccggcctgtatcgcgatccggtagcggataacgatacactggtttcggatacgaccaacttcggtaatctgccgtggagagaagtcttcaccgacccgcaactacagtctctcatcgaagcgggactgaaccaaaatactgacctcttgtctgctgcgcagaatgtgaaagccgcacaagcctccctgatgtctgcacgtctggcttatgccccatctttgggattgtctccgcaaggaacaatcagcagctttgacaagaatgcagctacaaaaacttattcattaccggttacagccagttggcaagtcgatttgttcggtcagttactgaactcaaaacggaatgcacaagttactttgaaacaggttaaggcataccgtcaggctgtacaaactcaagtaatctcaaatgtagccaatatgtactacacgttgttaatgcttgaccgccaactggaaataactaaagagacggccgaaattctgaagcgcaatgccgaaacaatggaagcgatgaaagatgcagcaatgtacaacatcaattcagccagtgttgaacaaagtaaagctgcttatgcacaagtacttgctaccattcctgatatcgaacaaagtatccgtgaaacggagaacgccctgtctacttttttaggagaagctcctcatgccatcaagcgtggcgtattggaagcacaagtacttccgaccgagctttctgcaggcatacctattcaattgttatccaaccgtccggatgtaaaagcagccgaaatgtcactggcaagttgctactataacaccaactccgcacgtgccgctttttatccgcaaatcacactcagcggttcggcaggatggacaaacaattcaggagcagggatcgttaatcccggtaaattattggcttccgttgttggttcactgacacagcctttgttctatcggggacagaacatcgctcgcttgaaagctgccaaagcgcaggaggaacaggctaaattatctttccaacaggccttattgaatgccggtagtgaggttagcaatgcgttaagtctataccaaaagaccagcgaaaaggtagaatccagaaaaatgcaggtagaatctgcccagaaagcttcggaagatacaaaagaattgtttaacttaggaacctcaacctatctggaagtactgtctgcacaacaatcctatttgagtgcacagctctctcaggtgtccgactgctttgatcagatgcaagctgtagtaagcctctaccaggcactgggtggtggaagataagaataactttaaatatataatactattatgattagtccgttagcttacgtagaccccgaagcaaaattaggcaagaatgtaacagttctgccttttgcctacattgaaaagaatgtagagatcggagatgattgcatcatcatgtcttacgctagtatcctgaaaggtactaaaatgggaaaagggaacaaggtacatcagaatgccgttctcggagcggaaccgcaagatttccactttacgggagaagagagcagcctgattatcggtgacaacaatgatattcgcgagaacgtagtcatcagccgtgctacatttgccggcaatgctactaaaataggaaatggcaattatctgatggataaagtacatctttgccatgacgtacagatcaacaacaactgtgtagttggtattggtagcaccattgccggagagtgtacattggacgattgcgttatcctaagtggtaatgtcacgttacatcaatattgtcatatcggtagctggacgctcgtacagagtggttgccgcatatccaaggatgtacctccatatgttatcatgtcgggaaatccagtggcatatcacggagtaaatgccgtggttttgtcacaacaccgcaatacatcggaaagaatcctccggcacattgccaatgcatatcgcttgatttaccaaggtaacttcagtgtgcaggatgcagtgcagaaaattatcgatcaagtgccaatgagtgaggagatcgagaatatcgtaaacttcgtgaagaactcggaaagaggtatcgtgaaataatactcaccacagaggacgcagaggtttaaaataaagatagtaaaacctaagacaccaaaaagcagattcatgtagattgcataagtattaatcattgcaatatttacatgaatctgtttttattatatccggattatgtacttttatctttctttctccgtgtcctctgcgtcctctgtggtgagaaattattcaaactccaatgttccgaaaaagtcgggacgatggaaatccggtttctctatttctatcggattccatgacaggaaatggggagtctgcaactcatcaccacatttatagaagttagcttttatctcttttccatcaagagaatcaatctgatgtttgaagaacactttataagggataatcaaggctacttcccaaccggattcgtcagcctgctcttcaaaaggcacattacccaaactggaccagcgttgcacaagggcggttatttctttcggagcatgttcacggccattgcgtgcaggacctgcaccaatcagaatcgttccgatacaattacattcgatattataatacaccccgtcatctgccggtatagaaaagaattctacacaggagtcggtccatacagaaccattatcttctccatatctggcacgtatactctcttcctttaccttaaaatgcaacaaaatagagtcctgcgtgtgagctatgcgaaaatttactttaggcttgtagggatactcagcccaattaacacattgaatgggttggaaatcaatcttttcttcatcgaacaatttcggaagcgaacaagcctctacgttagccgcactaattttctttactttcatatttctttcgtttggatgatacaaatatacgaactttcttctaataaggttcacagaaatcaaataaaaacgatatatttgccaatagtaataccttaaaagaacgaattagtgaaaaaagtaacccttttatttctgctgtttttaagcatctctgcagtccatacacaaggtcaaaacatcactttcagtcatttgaccacggatgacggcctttcacagttctctgtcaatagcatgtatattgacgaaagaggaattatatggatcggcacacgcgagggactgaaccggtataacggtaacgatatcaaaagttttaaactcaaaaaaaatgatccgaacagcctgttcagcaacacagtattgcgtatcaccggaaataagaaggggaaagtgtacctgctttgtaccgacggtatcgcagaatttgacctgactactcagcggtttaaaacactactgcaagggaatgtagacgccatctactataatgagaaactatatataggtaaaagagaggaagttttcgtgtataacgaaagtacgggcaacttcgacctttattatcatttggcgggaaaggatatcactttatcctgcctgcatctggacgataaaaagaacctctggatggggacaaccggcaacggagtttactgcctgtcggagaacaaaacagtatcccaacctatcacaaaaggcaatatcacaagtatctatgaagactcctccaaagagttatggataggtagttgggaggaaggactataccacataacgacagacggtaacatcaaaaatcttcggcatgacccccaaaacccgaacagtctatgttccgactttgtcagaagctgttgtgaagacaatgccggtaatttatggataggaacattctacggtttgaaccgttatgacaaaagtagcggtcagttccaggtttacacagccgatgacagcagaccggacggactcactcactcttctatttggtgtattgtaaaagacggtcagggaaccatctggctaggaacttatttcggaggtgtcaattactttaacccggagtacgaaatatacacccgctacaaagtaggaaacacagaaaaagaaggtttaagcagtccgattgtaggaagaatgacagaagacaaagacggtaatctgtggatttgcaccgaagggggaggtgtcaatgtctacaaccggaaaagcaatacctaccgttggtatcgacatgaagaagggaaaaatactatttcgcacaataacgtaaaagcgatctattacgaccggaacaacgacatcatgtggattggtacacatctgggaggattaaataaactcgacttgcgaaccaatcgctttaccatatataggatgaaagcaggagatcccgcttcactgccatcggatattgtacgcgatatcgtaccctacaaagacaagctggtcatcgccacacaaaacggagtctgccttttcagcccgtccacgggtagttgccgacaactttttaaagagaccaaagaaggaagaaatatcggcatggtggccagcctttgcttcgataaaaatggtactttatggattgcggccaccggagaaggagtttactcttatcgctttgatagcggtgagctgaccaattattcacataatccggctactccgaatagcctcagcaataataacatcaacaatattacgctggatagtagtggcaacctgtggttctccacttccggaagcggtcttgaccgttatcgtgaagagagcaatgacttcgagaatttcgatgtacaaaaagatggtttatccagcgattgcatctatgaagtattcgaatcatctatccaaaaaggaagtttattattaatcaccaatcaaggattctcacagttcgactatccgcacaagaagttctacaattatggtacggaaaacggattcccgttaacagccgtcaatgagaatgccctattcgtaacccacgatggagaagtatttttgggaggtattcagggaatgatctctttctgggagaagaagttgcatttcacaccgaaatcatatagtattattctttcacgcctgttagtcaacggtaaagaagtacttcccggagatgagacgggaattctcgaacaatccatctgtcatacccccaaaatcagcctgaaatcagatcaatccatgttcagtctggagtatgcaacatccaatttcattcccgccaatagagacgagatagtctaccgccttgaaggtttctccgacgagtggaaccatacataccgccaacagacgcttatcacatacaccaacctgaatccgggcaagtatacattaatcatcaaatcgcaacgggacggtatcgaagaggcacggctccagattctggtacttccttcctggtacgagacatggtgggcttatctgatctatacagtcattacaatcagtctgttctggttccttatccagaactacaattcacgtatcaagctgcgggaatcattgaaatacgaaaagaagcatatcgaagacctggaagcactgaaccagtccaaacttcgtttctttaccaatatctcccatgagttccgtaccccgcttaccctgattgtaggacaagtggaaacgttgttacaagtacagacatttactcctaatatatataataaggtattaggaatctataagaacagtctacagttgcgggaactgattacagaattacttgatttccgtaaacaggaacagggacacatgaaaataaagacgagcaagcataatttggtggagttcctctacgagaattatttgctcttcttagagtatgcaagcagcaagcagataaacttcaacttcatcaagcaaacagatgacattgaagtatggtatgaccagaaacagatgcagaaagtaatcaataaccttctatccaatgctctgaaacataccaaagcagaagatacgataacaatcaaggtgtcgcaggagcaagaccatgccatcatagaaataaaagataccggttcgggtattgctgctgccgaaatcgataagatattcgaccgtttctaccagaccgaacatctggactcattaaacaccggagccggaacaggcattggtttggcgctgacaaagggaatcgtagaactgcatcacggcactatccgtgtggaaagtgaacccggcaagggaagcagcttcatcatcaccctcaagcttgggaaccaacactttacggaagagcagatcgtcaaggaagatgtagaatccaccattcagcaaccaacagacgtgttcgttccttcggttgaggtattgcccgataccgcatggaaagaagaagagaacaacaagcgtattgaggatgccaagatgttgattgtggaagacaatgaatctatcaaacaaatgctagtcagcattttcgaaacattctatcaggtcacaaccgcatccgacggtgaagaggctttggaaaaagtgagggaagagatgcctagcattatattaagtgatgtcgtcatgccccgtatgtccggaacagaactttgcaaacgaatcaagacagactttaatacctgccatattccggtggtactgttgacagcccgtactgcgatagaacataatattgagggactgaaaatcggtgcggacgactatatcaccaagccgttcaatacgaacctgctgatttcccgttgcaacaacttggttaattcccgcagactgttacaggaaaaattcagcaagcaaccgcaggctttcgcacaaatgctggctaccaacccgatggataaggaaatgctggaccgtgctatggctattattgaacgccatttggacaacccggatttcaacgtcaacattttcgcccgcgaaatgggtatggcacgtactaatctgtttaccaagttgaaagccgttaccggacagactccgaacgacttcatcctaagtatacgtctcaagaaaggagctgtcatgctccggaacaatccggaactaaatatcacggaaatctccgaccgaatcggcttctcttcttcgcgctatttcagcaagtgcttcaaagagatttatcacgtcagtccattggcctaccgtaaaggggaagagaaagaagaaggggaagaagaaacagcgtaatatccggtattatcaagagtgtactattttgtacttcagttgtacattactagtcatccttgttttctcaattgtttatctttgtatcagtaacattaccccctaaaagataaacattatgagaaacgtttcacgcctattcccgttattgcccggcattgccatgctaaccggctgcaatcacgcatctcaaaagaacaacggacaaaacgttcagaatccgaacatcatttatatatttgcggatgatcttggtatcggtgacttgagctgttacggagcgagtaaaattagtactcccaatattgaccgtctggcaggacaaggagtacaatttaccaatgcttacgccacttcagctaccagtaccccttcccgtttcgggctcttgacgggtatgtatccctggcggcaggaaaacacgggtattgctcccggaaactcggaacttatcatcgacactgcctgcgttacaatggccgatatgctgaaagacgccggatacgctactggtgcagtaggcaaatggcatttgggactgggaccgaaaggcggaacagacttcaacagccaaatcagtccgaatgcgcaaagtatcggtttcgattatgagttcatcattccggcaaccgtagaccgtgttccttgtgtattcgttgaaaacggacgtgtagtgaatcttgatccgaacgatcccatcaccgtcagctacgaccacaaagtaggtgactggcctacgggagaagaaaatccggaacttgtgaaattaaagcccagtcaaggacacaacaataccattattaacggtattccccgtatcggctggatgaccggaggaaaatccgctctttggcaagatgaaaacatagccgacattatcactgacaaggccaagaatttcattgcatcccatcaggaagaacccttctttttatatatgggtacgcaagacgtacatgtaccgcgcatccctcacccacgtttcgcaggaaaaagcggacttggaacacgtggcgatgtcattcttcagttagactggactatcggtgaaatcatgcacacattggacagcctcaacatagcggacaacactatcctgatctttaccagcgacaacggtcccgtgattgacgacggctatcaggactatgcctacgagaatctcaatggtcatactccaatgggaatctatcgcggtggcaaatacagtgcttacgaagccggtacccgcattccttttatcattcgctggcctgctaaaatacagccttccaaacaacaagctcttttctcgcagatcgacacttacgcatcacttgcttcgcttctgaatcagcccttgcgcaagggtgcagcccccgacagccaggaacatctggatgtgcttttaggcaaaaacaatacaggtcgtgagtatgtagtccaacaaaacctgaataacacacttgccattgttaagggagaatggaaatatattgaaccaagcgatggtcctgctattgaattctggacaaagatggaactgggtaatgacaagcagcctcagctatatgatctctcatccgacccatcggagaaaacaaatatagcgaagtcacatcccgagattgtaaaagagttatccgcattattggaaagtgtaaaagaagaatagaaatatgagaataatagatttgtatgattttgcacctatcttgaataataacacccactacacccacgcaaaatccatacatttgtagaaaatataaaacagtgaatatgcgttacaacaaaaagcaatatatcacacgatttttctaaccttattgaaaacgtataataaaatcggactttaatcaatttaaccccctaaagagaggagcctcacggttcctctcttttactttgacctctgttgaaaaaagttatttcataaaagtaaagaattgtctgctctttgaacatcagtaggcttctttgattagctctattctcataaagcgaatgtttttctcactctcattctggatatcctccccaaagaatcccaaacggctaaacgtgcctgttgcattcacagaaagttccaacccttttgtgcctttctgcttgaagtgtaccgtaccgatatcactccatgtttccgggtaggagttctggcgtacattggacaactccccgtctttcttcatcaatacggaattgaacggagtattatcatccactttcaatgtaattctagctccctcagcaaatgatcttctccaatggcgactggtgaatacacgtactttgtaagtacccggctcatcaatcacacatttcagctgcaacttaccagtacctgcatggaagttttgtgtatttccaccctcagcaatcgtcaaacttccctctttgcccggaataatcttaccatttgccaccggaatactgactacattttcgttcatgtaattatcctcgctaaaacgcaccggagacttacataccaacttcagcaccggaatttcatcataattcagatgagcaggcactgtcaataccggatacgattgatcagtcaccgtcactttcttaccggaagcaagtatttctgcctttgtaatggatgtcaacaaacccttcaatgcaatacaacggttcagaggttccctcaaaagatgcagataaatcacattacccttatgtgtaacatacccccaagggaagttatcattaaaaggatttccggttgttccgtagacagcttccgaattcttctgcatccaccttccgatgaaatccattatatcaatgctcggttgtggtacggttccatcctccttcggaccgatattcaccatatagttcactccacgactcgcacattctatcaatgagcaaagaatatctttcgggctcttccagttttggtcgttctttttgtatccccaagtatgattcatggtagccaccatttccaaatccatattcacacgcgaacaaggcatctcattgtctcccaatgctccataatctcccagattataacccacacgaccattcacaatacattccggctgtaattctctgactacatttacaaatgtccgactctgttctttcgtcaagtcaaacggagtgtcataccataacaaatcaattttaccgtatcgggtaagcaattcccgcatttgcggtaaagccttttccctgatataacggtccagattcggttttacttccgatttcggcttaccataatgcccgtcatattcattctgcatcacagcagcgtcttcttcccgccaatcttgccgatgagaatagtagaatccgacttttaccccatgcttacggcaagcttctaccagttctttcaaaggatctcttttataaggagtacgctcaatatcaaaatcagacacctcgctcggatacatacaaaagccttcatggtgtttagtcgtaaatacaatataacgagctccggcttgctttgctaatttcacccattcttccggattatatttagctaacgtgagtttatcagccagtttctcatattcattgttagggaccttggcaaaattctgtatccactcaccgatgccatccaccggctttccattccattcaccggcagcaactgaatacaatccccaatgaataaacataccaaagcgaccttcacgccaccagtccatatctaccgactgttgtgcctgtccgtaaacaaacgcccaactcaacattaatatacttaacaacttcttcatattcataccattctttcttgatctactatttcactaacgacacataaacaggcattccctgggacaatacagtcttcaatactgtatttcccgctgcattctcttccaacgtaatcttttggctttcatcaccgcttttcacagtccatttacccttcagctctattgaagcttgtgtaggtgtagtccgccaattatttttgccaatcgttttcggacgaagattaggattgcacaacgccagttccagtccgcttccacttttatccagacgttccattaccagtaactccgttttagaagcacataccactcccgccgataaattagagaccggagcaaacagagcgtatgcaatggtagatgtaggaagatacttcactatatgcacagaatcttgtgcagtgatgaccttaaacagtttctcctgctcttgcttcttggcaagttccttcatccgttcggaagtagtacccggaacaaccataaactggtaacttttcttttccggcttcaccccatgatgaagataagcctttgcagcagtctcctttcccattccggcagccatacccgctgatgaaggagtagtctgttcaccgtacttaatcaccaaccggtcgtgtcctttcggaacaaaatacccggtagtggtaggagtaaccatccaagcggcaacctgtggttctataatctgttcttttcctgctttcattatctgtccgtttacagtcatatctccggattctttagatacaatagattggaaaagatttgtagcagtaatccattcatccgaatagtcgcctttcgcctctatatcagtaccaagactatacaacattccatcaacggcaaatacagacttgcagaaagaaaggttagtcggttcaaaacgacgacttccccaacgatcatcctgatcgaaagcagccgcaaaaaggccacagtctttccaagccaatgctcctgcaaaattagtcgttgttgatttttggtcgaaacggtcagcatcatttttattaggcgtcatttccttccaatccgtataatgtactgtagtacttccgggcatcatattccagtcccaaccggcactcttcttttctttatcagcgggataaccacacttggcaagtccaccttcataaagtatttccagcgttccatgactttggtatctgccgaaccggttggttttattatatatctctccaccccagaagttggtagtcggacaacgcatcactgccagccaattaccctgtctgtaaactcctgccgggctgaaattaaactgataaaagccatccgctttcagttcgggagcgtccttatacttcttcgtcttataaaaataattgtagtaagaagctaattcctgatcatacggaatccctagcacatctcctcccacttcaatcaatgtctcaaacaattgtcgcgagaaattaatccccaaaccggtaaaagggtgtctgcccgccatactattcgcaaaataacggtctttatccgattcagaacgtaccgccatcaaataaatactaaccacagctttgctcatccgttgatacgcctccttctcaatacggaaggaagtgcctttcagtcgtcccatatattccacccaagtgcgatatgaatacatatatccgttataatgggtattatgatgaaatcctgttccgtcaggtttcagtatatcatatccgctagggctgtactgggtacatcccgacaggaaatgagagaaagcggttaagtccttgatagcttgttcatcatttgggttatgaaccgcacaaataaacaaatgcggaagaacattataaatatagtctgagttcaccttcagtctcaactcttccgcactgagatataatcggtccgcctccagcaaattccacacagcagcaattaaccgacttttacgtacatcgtcacatacagacaaggcactcaagaaatctgccggaactctgcgtacatcattatagttactatatttatatttgggcatacgctctataactttctccgtaaagagaaaatccaaatagagattgaaactttcttccgcatctcctccgtcacgttcagcagcaaaggccaacacacgtaccgttttggcaatatcccgtccttgctgaagagtcactttttctttaaacggtgagactccggtaacagtcttttcatcgtaccgttccaactgccatagctgtacttgcatcaaagcggcatctatttctctttgattcgctttcggagcaggcagtttatatttcttcctaaactccttcaactctttcttcttcacttccacatcagacactgacatttctgtctgtgccgaatagtttgtgtggacattacccatagtataaggggatagacatatccctacacaaaatggtaataaacc

SEQ ID NO: 11719 - DNA, 31050 bp, Unknown
  gut microbiota DNA sequence
atccgtatgttcgacaatatcccgaacctgcgtggcgtatctccctggattctgttcgacttccgttcgccgttccgtttccaccccaccaatcaagatggctggaaccgcaaaggactcatatccgaccagggtatgcgtaagaaagcgtggtatctgatgagagattattacatgaaaaagagaaataaccgataagtttagctatatttgaatgtgatgaagcaatataagattgtagcgatttgtatgtgcatactgctccttcttgccggaggagcgtatgcgcagcaaaagacggtcaggatacttgccatcggcaacagcttctcccaagatgccgtggagcaatatctgcatgaacttgccgaagccgaaggcatttcaaccataatcggcaatatgtttattggcggctgttctctagaacgtcatgtgaaaaatgcccgtgacaatgctcctgcctatgcctaccggaaaatcggtacggatggaaagaagcgggaaaagggcaagatgtctttggaaacggtgctggcagatgaagactgggattacgtcagcctgcaacaggcaagtcctttttcgggaatgtacgagacgtatgaagcctctctgccggaacttatagaatatgtaaaagcacgccttccaaagaaaacaaagctgatgctgcaccaaacctgggcatatgcgtctacttccaagcatagtggatttaaaaactacaactgcaatcaactgaccatgtatcaggccattgccgatgcagtgaagaaggcggctaaggtgaataagataaagattgtcatcccttcgggcactgctatacagaatgcccgtacttcttttatcggcgaccatctgaacagggacggctatcatctggatgtgaaggttggacgttatatcgctgcctgcacctggttcgaacgaatcttcaaacacaatgtagtcgggaatccttatgctccggaagggctggatgaggcgcggaaagctgttgcccagaaagctgcccatgcagcagtaaagcatccgtataaagtgactgacctgtttattactaactaaccgacgaaaatacaaatgagaaaaaaagcattagtttacggaatctgtttgttgggtacggtatgtaccctttcagcaaaggataaaaaagggggtgcattatataaagacgcaaaggctccgattgagaaacgcgtagacgacttgttatcccgcatgactctggaagagaaagtgatgcagttgaaccaatataccttgggacggaacaacaacgtgaataatgtaggcgaagaggtaaagaaagtgtcggcggaaatcggttctctgatttacttcgagacaaatcccgaactgcgtaataatatgcagaagaaagcgatggaggaatcccgcctgggtattcctattattttcggttatgacgcgattcatggattccgtaccgtgtatcctatttcgttggcgcaagcttgttcctggaatccggatttggtggaacaggcgtgtgctgtatctgcgcaggaagcccgtatgtcgggagtggactggacgttctcgccgatgattgacgtagcacgtgaccctcgttggggacgtgtggcggaaggctatggcgaagacccttatgcgaacggagtgttcggcgcagcttctgtcagagggtatcaaggtgataatatgtcggcagaaaaccgtgtggcagcttgtctgaaacattatgtaggctacggggcatccgaagccggacgtgattatgtttataccgaaatctcccaacaaactctttgggatacttatctgctcccttatgaaatgggggtgaaagccggtgcggcaactctgatgagttcttttaatgatatcagcggtgtaccgggttcggcaaacccttatactatgaccgagatattaaagaaccgttggagacatgacggttttatcgtttcagactggggagctatcgaacagttaaaaaatcagggattggcagcaaccaaaaaggaagcagcccggtatgcgtttaccgccggtcttgaaatggatatgatgtctcatgcttatgaccgtcatttgcaggagttggtagaagaaggcaaggtatcaatggctcaagtggatgaagctgtccgccgtgtcttacttctgaaattccgtcttggcttgttcgaacgtccttatactcccgctacaacagagaaagaacgtttcttccgtccgaaaagcatggatattgccgcccggcttgcggcagaatccatggtattgctgaaaaacgaaaacaacgttttaccactgacagataaaaagaagattgccgtgataggtcctatggcaaaaaatggttgggacttgttaggctcctggcgtggtcacggaaaggataccgatgtggcaatgctttatgatggtctggctgctgaatttgcaggaaaagccgaactgcgttacgcattaggctgcaatacacaaggagataaccgcgaaggatttgcagaagcattggaagctgcacgctggtctgatgttgttgttctttgcttgggcgagatgatgacttggagcggagagaatgcttcccgttcttctatcgcactaccacagatgcaggaagaactggcaaaagaactgaagaaagccggcaagcctgtcgtactggtattggtcaacggtcgtccgttggaattgaaccgtctggaaccggtttctgatgccatactggaaatctggcagccgggtgtgaatggcgcactgccgatggcggggatattgtccggacgtattaatccttccggtaaacttgccatgaccttcccttattcgacggggcagattcctatttattataaccgccgtaagagcggacgtggacatcagggattttataaagatatcacaagtgacccgttatatcctttcggtcacggactgagctacacagaattcaagtatggcactgttaccccttctgccactaaagtgaagcgtggcgagaagctctcggcggaagtgactgtcaccaatatcggtgcccgtgacggagcagaaactgtccactggtttatttccgacccgtattgctcgattacccgtcctgtaaaagaactgaaacactttgaaaagcagcttatcaaagccggagaaacgaaaactttccgtttcgacatagacctggaacgtgatttcggatttgtcaatgaggacggtaaacgattcctcgaaaccggagaatacaatattcacgtactggaacagaccgttaaaatagaattgatagactaaaacacatgatcaccatgaaaaagaaaacaggcattatcggtttatgtatgctcgcatgcagcatcttgacccatgcacagacaattactcctcaagtagaacaacgcgcgaaggagattgtatccaaaatgactttgcaagagaaaatagagtatatctccggatataccagcttttccctgcgtgccattccccgtttgggaattcctgaaatacgtcttgccgacggcccgcagggaatccgtaaccatgctcctaaaagcaccctttatccgtccggtatcctttccgcttctacctggaaccgtgacttgctttataagttagggcaaggcttggggcaggacgccaaggcaagaggcgttaatatcctgcttgggccgggcgtgaatatctatcgcgctccgttgtgcggccgtaactttgaatatttcggtgaagacccttacttgacgggtgagacagccaagcaatatattcttggcgtgcaatcggaaggagtcattgcgaccatcaagcactttgccgccaacaaccaggagtggagccgccatcatgcgagttcggacatagacgagcgtactttgcatgagatttatttcccggctttccgcaaggctgtacaggaagcgaacgtgagtgctgtgatgaacagctacaatctcctgaacggtgtccatgccactgaacacaaatggctgaatattgatgtcttgcgcaatctttggggcttcaaaggtattctgatgtcggactggacttcggtatattccgctatcggagcagctaacgccggacttgacctcgaaatgcccaaagggcgtttcatgaatgccgacaatcttatccccgctatcaaaacaggcacggtgaccgaagaaaccattaacctgaaagtacaacatattttgcagactttaatagcttatggaatgttggataaggaacagaaagacagtaatattccgttggataatccattctctcgccaaacagctttagaactggcacgcgagggagtagtattgttgaagaatgaagcaaacttgctcccgttgaaaggaaaaacagccgtaatgggtcctaatgcagatttgatacctaccggtggcggcagtggttttgtcactcctttttctaccatttcagtggctcaaggcttgaaagaactgaagaaaaagaatctggtattattgacggatgatgtgatttatgaagatattatcaatgagttttatactgacgtcaatcgtcaggtgaaaggcttcaaggctgaatactttaagaacaagacgctttcgggacagccggaagtaatacgcacggaatcctctgttgattatgactggggatatggagcacctttggacggctttccgacagatggcttctctgtccgttggacagcctgctacatgccacaaactgatggtcagttgaaacttcatatcggtggtgatgacggttatcgtctgtttgtgaatgacaagcatattacgggagattggggaaatcattcatactctagccgtgaagttgaactgccggttgagggtggtaaggaataccgtttccggattgaattctttgataatatttcttcgggcatcattcgttttaatgcttatagccttaatgagatgaaacttcgtcaaggattggcaaaggtggataatgttgtgttctgcacaggtttcaatagtaataccgaaggcgaaggctttgaccgtccgtttgctttgcttcggtatcaggaattgtttatcaaaaagattgcctctatgcaccctaatgtcgtggttgtgctgaacgccggtggcggtgtggatttcaccggttggtatgatgccgcaaaagctattcttatggcttggtatcctggacaggaaggcggacaagcgatagctgaaatcctgaccggcaagatttctccaagcggaaagctaccgatttctatcgaaaagaaatgggaagataatccggtgcatggtagttattacgagaacttaaaggcagagattaaacgtgtagattattccgaaggtgtttttgtcggttatcgtggatacgaccgttcgggaaaagaacctttctatccgtttggctacggtttgtcctatactactttcgcttatagtaatatagctgcggagaaaacgggtgagcatcaggttaccgttagctttgatctcgagaatacagggaagatggatgcctcggaagtggcacaagtgtatgtacatgatgtacagtcctctgtcccccgtcccttgaaagaattgaaaggatatgaaaaggttttcttgcagaaaggggagaagaagcggatttctgttgtgctgaatgaggatgcattcgcttattacgatatgaatcagcaccgctttgtagtggaaaaaggcgagtttgagattcttgtaggcccggcttctaatcaattacctttgaaagctacggttgaactttccggttcatactcgttctaatttcctcgtaaagtcacatttgatctgtcttaaaacaggcttatttgataagaaaaacataatagaacctcatctccccaaaaagatgggttatcttggaaaatgacaaaggcgtagaaagagaattacttctcaatctacgcctttatctttctacggatagtgtgattattttacttcccaaatgtcattagtcatcaaaagctcctcgaaattatggtatttctttttgctttttacttcttcgatttgtgcttctaccgcatcattataagtcggggcgtctacatcgcggatgacaccaagtgcgatggggaagtcagggccttccatcaaggcgagttttaactggagtgtgttgtccaggcagtgtgcatcatgtatcagaatatctctttctgtgataccgttctcgcctagtttcacaactttcagcccaaaaccttcctgcattaatccgaactccttgttttcaccgaataacatcggtttgccatgttccaaataaattgcattttttgcacgcccttccttgttatatacggagttgtgtgtaccatcattgaagatgacgcagttctgtaaaatctcgcagacagcagtgcccttatgattataggcagctttcaatatatctattgtaccgggagcgtctgtggcaacagcacgtgcgaaaaaatgtccgcgtgcgccaaaacatagttcagccggattgaacgggtcttctacggtgccgtagggagaagacttgctgacaaaaccacgcggtgaagtgggtgagtattgtcctttagtcagaccatagatacggttgttgagcaagatcatgttgatgtcgatattgcgtcggttggcatgaatgaaatggttacctccgatagcaagaccgtcaccgtcaccgcttacctgccatacggttagtttgggattggcgactttgcaccctgtcgcgatagcggcagcacgaccgtgaattgtattcatgccgtatgtattcatatagtgaggaaggcggctggaacaaccgataccggaaattactgccgtatcccatggagcgacaccgatttctgccatagccttgtgtaacgaagccaggaaaaagtggtcaccacatcccggacaccagcgtggctgtccttttttaaagtctttagctgtatattcgctcataatttcttgattttacttgttgataatctcagtgaatgcattgactagttcattgacaacaaagggctgtcctttcacttggttgaactgataaggaacgaaaccgtccaccttcatacggagatatccggcaaactgtcccatattttgctcggctaccaccacttttttgtatttcttcatcaaggctgccgtattctttggaagaggattgatgaacttaaagtgtgctaatgctacttttttaccattagcacggagttcgtccatagcggcgtgtaaatgtccataagtacctccgaaacctacaatcagcaattcggcatcttccttgtcgccttcaacttctacgtcaggtacttcgatattggaaattttctgctggcgtaatcgcgtcatcaagtcatggttttccggatcagttgagatagctcctgtcttgttgtctttttcaagacctcctaatacatgagtgaatccttctgtacccggaactgcccaataacgaacgcctgtctgcgggtcccgttgatacggtgtccaggtttcagacatttccgggcgtacgtaaggaggattgatagcaggataatcagccaatttaggcaatttccatgcaccagaaccattggcaacaaatgcgtctgtcaacaacacgaccggagtcatgtgttccaaagcgatcttagcagccatataggctgagtcaaaacagtctgtaggggatgtcgcagcaatgacaggcatagggctttcaccgttacgaccgaagagaacttgcaacaggtctgtttgttccgatttggtcggtagaccggtagcgggaccgccacgttgtacatccaatacgaccaatggcaattccatgataacggccaagttcatggcttctgatttcaaacagataccaggtcctgaagtggaagtaacagctaatgcaccggcgtatgaagcaccgatagcagaagcacaaccggcaatctcatcttcacattgcacggtggttacgcccaatgatttatgttttgagagttcatgcagtacatctgttgcaggagtgatagggtaagaccctaaatagagtttcagtccggctttctctgcagctgcgatgaatccgtatgcagtcgctttatttccggtgatatccatatattttccgggaacggctgctttactttcaatcttatatgtatgtgctacggaagcgtgtgtgttgtgtccgtaatcatatccggcacgaacaactttgatatttgcttccgctatttccggtttcttggagaatttctcgcggataaagtcttccgctatgttaaggtcgcggttgaacaaccagcataccagtcctacggcaaacatattacggcatttcagcatggacttattatccattcccgtatctgccaaacagtcttttaccatctgcgagataggtgctgcaatcacgtcctgcttgatacccatttcttcaataggattatcggtggtgaatgccgctttatctaaatctgatttttgaaaggcgtctgtgtcgatgatgatacaggcggtggattttgcgaatttatattgtgttttcaatgcggcggcattcatagctaccaatacgtcgcatttgtctcccggagtataaactttttctgcaccgatgtgtacctgaaaaccggaaacaccggttagcgaaccttgcggtgcgcggatgtctgccggatagtcggggaatgtactgatgtcattgccaatcgtagccgacacggtcgagaagatgttgccggccaactgcataccgtcaccggagtcgccggagaaacgtactactacttcctccaattctttaaccatcatttcgtctgccataactttaattactatatttaatttaaaaactgcttttactttcaatttgtgagcgcaaaggtcggaaagttaatcgaattatcaaaataaaacgtactttattgtcctattgacgcaaaatatttgaaatatctggaaggaacctgtatttttattcttgttaaatcaacagaaaccgttatctttgcaatcaaaataggaacggccttgtagttcaacggatagaatagaagtttcctaaactttagataggggttcgattcccctcggggctactacaaagaatctataggaagttgtgttggatgctttcatgctgtatcgagttttaagttttacaatggcttcttttaagatgaacgtcttatagcttctatttgttttaataatcaatagaaaaagcctcctccgaacttcggaagaggctttttctatttttggaatattttattctcccgcagttgttgctacagtctttttgttcttcataaagttgtatgcaatcggagatgcaataaacagtgaagataaagtaccgattacaacaccgagaatcatcgcgaatgcaaagctgcggatagagtcaccaccgaggatgaagatacacaacaatacgatcaatgtactcaatgaagtattgatggtacgagccagtgtagtgttcagagagtcattgaataactgacgcttgtcacgtttcggatacaatccgaagaactcacgtacacggtcgaagattaccaccttatcattaatagagtaaccgatagccgtcaggatagcaccgataaaggtctggtcgatttccagtgagaatggcaggataccccagaataatgaataagcaccgataatcatgattgtgtcacaagtcaatgctgcaatagaaccaatactgtatgcaatgttacggaaacgaatcaagatatacaaaccgatggcaatcaatgccagaacgactgaccagatagcaccggtcttgatatcgtctgcgatactcggccctactttctgtgagcttacaatgctgccgcctgtgtggttatcacggtcgatgaaagttgccaggtcaatgttctgagtcaacaacggtttcagtgtttcatataaatatgattcgatttccgagtcaacattattgcctccgtcttcgatacggtagttggtactgatgcgaaccgttttcttatctgttccgatggcgataacgctaacgttcgcatcaccgaacttgcttgagatcagctcgcgcacctgttccggttctaccgggttttcaaactgtaccttgaagttacgtccaccagtgaagtcgatactttgacttagcccgcggatagcgaacgaaccgatacaaacgatgataactgcactgacgataataagggattttttgtttgttcccataaaatcgaagtgtgtattggccatcaggttctttgaaatcttagtggtaaatgtcaggttctgccatttatctttactcaagaaatgttcgtaaaccagacgagtcatgaacactgcggtaaagaacgatacgaggataccgataatcaaagtcgttgcaaaaccacggataggtcctgtaccgaaattgaacagaatgatacctgtaataatagatgtcaagttagagtcaaagatagcggagaaggcattagaataaccgtcagccaatgctttcttcactcccttgcctgcacgaagttcttctttagtacgttcataaatcaatacgttcgcatccactgccatacccagcgacaataccataccggcaataccggacatcgtcaatgcagcctggaaagaagaaaggatacctaatgtgaagaagaagttcaggaacaaagcaccgttggcaaccatacccgggatgaaaccatacatagagcacatatagatcatcaacaggatcaaagctacaacgaatgagaaaataccggcattgatagattcctgacccaacgacggaccaacgatatcttcctgtacgatgtgagccggagccggcatcttacctgatttcaatacgtttgctaagtcttttgcttgttcaggagtaaaatgacctgtaatctgtgaacgtccgcctgtaatttctgaatttacgtttggtgcagaatatacataattatcaagaacaatagcaatagaacgaccgatattctgttttgtcagctgagcccaacggcgtgcaccgtcagagttcattgtcatacttacagccggtttgctgtattggtcaaattcgtctttagcgtctgttactacatcgccttccaacggagctttaccgttacgttcggtagacttgatcgcgtataattcgaatgtttgtccttttttgtcgaactcagaaggagaaacgccccatttcagacgaaggtctttcggaagttctgccttgatttccggcatagccagatacttgttgatatcagcagtatctttatagtttgcataaccgataacaggaccttgtccgcttgaattcagttgaagcatagacaacagaggatattgtttcttgagctcttccatgtttacagaaggcttttcagaggctgttgtgtcacctttcagtgcagcggcaaggctatcggcagcacttacagcttttgtctccaccggagtagcttcagtaagaacggcagtctctattgtatctccatcagttgttgtttcttcagctaagatagcgcgcaatttggcgtcagcagactgcatggaaggaagaacttccttggctgtataagtttcccagaattccaggttagcagaaccttggagaagttttctcacacgttccggttctttgatacccggcagctccaccatgatacgtcccattttgtcttccagactttggatattcggctgaacaacaccgaagcggtcgatacgggtacgaagtacattgtatgagttctcaacggctgcttttacttctgctctcaatactttttcaacttcagtgtctgttgatttttggttaaccttgtctttcaactgttgtgttgcgaagagttcggaaagtttcgcttccggagcagctttgtggtattctctgatgaacagggtaatgatatcatcctgactgttgattgcctgctttgctgcttctgccaatgcattgttgaaagcttcgtccggcttgttgtcagccagtgctttgataacatcaggtacagaaacttcaaggataacgttcataccacccttcaggtccaaacctaaactaatctccatctcacgacattgtttcagcgtccagttacccagccagactttctcgttggagagagagtcgaggtagtcttgttctactttcgggtcgccgttcgcaatttctttcgccttgttggtatagtggcgtgttacgaaggagaaggagaggtagaacacgcataccagcgtgagtaataccgcaaaaacctttacaaatcctttgttttgcattttacttttaatttatgatgattacttttttaatttaatattcagttaaattctgtcgtatacaagttctttttgccgcatacaaggctgcaaatatagtttttttttcacatttatatgtaacaagccctcaaatatttgatgtttaagggcttttttgcagaattatttcattcccctgtttttcaataatggttccaagctaggctctgttcctcggaaatttttataaagcaccatcgggtcttcactgtctcctttttccaaaacattgtggcggaacagatctgcggtggttttatcaaaaactccgtgttctttgaaagcttcaaaagcatcgttatccaatacgttggcccacagataactgtaatatccggcagcgtacccaccgatgatatgattgaagtaagtaacgcggtaacgtggcgctatctcagggatcagattgagtttgtccatcgcttctttctcgaatgaaagtatatccatattatttacatctgttattgtgtgcaggttcatgtcaaggatagcggctgccagcaattcggtagtcatgaatccttgattgaaagtcttctgttgcagtatcttttcgatgatttcatcggggattacttctccggtctgataatgtttggcatacattttcagtacctctggttcggtagcccaatgttcgttgatttgagaagggagttctacaaagtcacgtactacgtttgtgccggatgttcccttgtattcacattttgtcagtaagccgtgtagggcatgtccaaattcgtggaacaaggtttccacttcatccattgtcaatagtgatggagtatcgcctaccggtttggtgaaactgcaaacgttgcacactaacggacgggttgctccttgttgctcacggtaattactcatccaggcacctccgctttttccggcacgcgggaaatagtccacatagaaaataccgagttgagaaccgtcagtgtctttcacttcaaacacctcaacatccggatgataggtcggaattcctttcagcttgttgaaagtgataccatataacttgttggctacggcaaaagcaccttcacgtacattttccaatttaaaatagggctttgtctcctcttcggacagattatatttctcttttcgtagcttttcggtatagtaccaccagtcccatgcctccaacttttcgcctttaccttccttgtccatcagcttttgaagctcggcggcctcttctttggctttaggcagtgcatagctccaaagattgttcaaaaggtccattacgttcgtcgcgtttttagccatcgtctcatccagcacgaaatttgcgtaacagtcgaaacctaacaattttgctttttccaaacggagagaaacgattttgcggatgttctctttgttgtcgttctcattgttattatttccccgattgatatacgctttgtatatttgttcccgaagcggacgattctcggcatattgcaggaatggcagacggctggcgttatgcagagtaaataaccatttgcccggttgtccggcggcttttgcttcttcagctgcactttgacggaaccattcgggcaatcctgctaagtcctcttctttctcgacgaagagctggtacgcattattctcgttcagtacattattgccgaatgtgataccaagtgtggacagctctttgtttatttcacgcaaacgtgcttgtttttctgcgctaagattggcacctgaacggacaaactgtttgtaggtcttgtccagcaggcgtttctgctctgtggtcagattcagggaatctttttgttggtagacatcgtttacacgcttgaaaagtttctcattcaaggatatattgtcttcatgttccgaaagaaccggagctagcttgatggatagtgcagttaatgagtcggttgtttcagcatctgtcatattgaagaaaatagcgcttacccgatccaggattggtgcactgttatccaatgccacgatggtattttcgaatgtagggatttccggactttcgatgatagcttcgatgttttgattttgctcctcgatacctttcaggaaggcaggctcataatgttccaatttgattttgtcaaaggaaggaacgccatactcggtttggaactctgcaaagaaaggattactttctgtttttgtagcacaggagtacatcatacaacttactgctaaaagggttaatgtctttttaatcatcattatgtgttttataatatagaattctccgtttttatcgtttgctgatataacaccaaatcggatagtggtccgaagccttaatagaacggtctacagtacaattataggctttcaggtcaggactaatcaggatattgtcgattcggaagtagaacttgttctggttataggagattcccaatcctttaccggactgtgtgaaagcgtcatccagttcttgagtgagaacccggtgggtatacgaaatagaaccgtcgttgaaatctccacatacaatcattgtaggataatggttttctgtaatgattctcgctacggaatctgcttgggaggcacggatagccgatgcttcccctagttttcgaattagttgtcggagcccggtctttacttttttagcattcggatcttttatcatatcttcatagatccctctgtcttctttggtgagtttgttggattccaagtgattgttgattaatgtaatagtgtcattatttacattcagcacatatttcatagagccgttataatcacttttatactcaataagttgtgacgagagtatcgggaatctagagaaacaggcaagctgcacatctcctttcctttgttggcgaatggattgatagggatacgctttcaacgctttctttacatcctgctccgttacgaactttttattgctggctgtgttgtattcttgcagacagataatgtctgcattactgtttttcagataagataaaatcggattcttcccatctttcttcttcagattactaaagctcattacattgtaagacagaactttgatacttccttccggtattgtccgggtagtagagttgaaaggaatataagtccgtatttgcggaaagcaaatcagaaaaccgatgacgggtagtagtgcatatctgtaattgacaaatgcccaaagaaacaggaaaaatagattgataatcaggaatattggaaatgcgagtccgagacaggaaactaacggattgactttggggctgagataggggctataagcgcttaatatcagcgttcccacgaagaatgcgttgatagccagtatcagatatgcgacaattttgccaatatgttccattcttttatcttttgcttgcgtcgaacaagcttttcttttcttctgtcgtcagactgtcgtaaccggattttttcaacttttccagaatacggtccacttcgtcagattgtgcttttttatgggcattataatcataatctttccgtcgttcggtagcattactgccatagtgtactttcattttaggtttgcgttcccatgttttcttttggaaaagagagatgaaaccatccagaatccagttaatccaggaagttaagtcagtccctttgcttagactggctgcaaaccagagcccggcaagagcgcctcctagatgggcaatgtgtcctccggcattacttgaggtaatagacagtacatcaattccgataacgaccagtgcgagatatttgagacggacagcaccaaaaagaaaaagttgcaccctatagttgggttcacgataggccgtagccgctacgatagccagtacggaagcggaagccccgactaacgttgctccggtcacttgtgagctgaataaaggaaatacgttgtaggcgaccatataaagcaaacctccgcagatacctcccaatatatatagccctcttaaatgctttgccgagaaaaaataaagaaataaactcccgaaccagtatagccaaagcatattgaatagaatgtgcagaataccggcatgcataaacatataggtaaacaacgaccacggttgatggataaacccgacaagagaggccggtaaagcgaatatgttgaatatatcgagagtgttgacttcaaacagtcgtagaaaaacatgaatcaatgtgccgatcacaaagataccgacattgatataaatcagttggataaaaatgtttcctcttctgaatgtttccttcaaatcagctataatatgtcccattgttattacttttttttctccaatacaaaatcagtatcagtccgaacagcattccgcctaaatgggcgaagtgggcgacgttgtctcctatgttgttggcaagtcctgaccataactcaattgcggcatatccgattacgaaaaatttggctttgatcggaaaaggtagcgggaagataaacaaccgattgtcgggaaacagcataccgaatgccagcaatatggcatagacagctcctgaagcacctacggtagtcatcatgttcagatactcttccatgggaataatactggtacctatatttacttgtgagtattggctgagttctgttgcatattgaatatattgtactccttcttggataactcccgcaccgataccacaaaggatataatagaacagaaaacgtctgggtccccatgtttgttcgagaatcggaccaaacatgaaaacggcgaacatattaaagaaaatatggctgaatccgccatgcataaacatataagtgataagctgtgccggattgaagtcacttgcgaggaaaaaatgtaatcccagataattagtcagatctactccatagcgttgtgctacgaatgtaccgaaaaacattagtacattgataattatcaggtttttagttacagttggcatcatttttttattctgaatattatgataatagatgcaaaagtacgaataaattctgttttaaagcatgaaaagtgcttcctattagctctttttcaataatttgctgcgttttttttatgtttttatttgatatgttgttttgttcggctatatttgtagaattaatccattgtgggagaatcttttgtgtaacatatatattaattaatcattttacgtattatgaataagtctgatcttattaatgcaatggctgccgaagctcaaatgagcaaagccgatgcaaaaaaggcacttgatgcttttgtcacttcagttactaatgccatgaaagccggtgagaaagtatctctcgttggttttggtactttctctgtaagcgaaagagctgaaagaacaggtattaacccttctacaaaagcaactattactattcccgctaagaaagtagctaaatttaaagccggtgctgaattatctgcagctgttgaataagatagatagttgaaagaatttaatttaggagaggaggcgtgaaacgtctcctttttttgtatctttgcgcccaagaaacaacttgattatgaagatagaagataaacttgtagcgtccgtcatcaacggactcaaagcactctgcggtcaggaagtccctgaaaagatggtgcagttgcaaaaaacgaagaaagagtttgaaggacatctgactttggtcgtgttccctttcctgaaaatgtcaagaaaaggaccggagcagacagcccaggaaatcggtgagtatctgaaagccaacgaaccggctgtagctgcttttaatgtgataaaagggttcttgaacctgactattgcgtcggctacctggattgaactgctcaatgagattcaggctgacgagcaatatggtctggtaaaagctaccgaaacttctccgttggtaatgatcgagtattcttctccgaatacaaacaaaccgcttcacttgggacatgtgcgcaataaccttttaggtaacgcattggctaacattgtggctgccaacggcaacaaggtagtaaagactaatatcgtaaacgaccgtggtatccatatctgtaaatccatgttggcatggaagaaatacggaaacggtgaaacacctgagacttcgggcaagaagggcgatcatctggtgggtgactattatgtatctttcgataagcattataaagccgaagtgaaggaactgatggctcaatttacagctcaggggatgaacgatgaagaagcgaaggcgaaagccgaagcggaatctccgttgatgcaggaagcccgtgagatgttggtgaaatgggaagccggtgacccggaagtacgcggattgtgggagatgatgaacaactgggtatatgcaggatttgatgagacttacaagatgatgggtgtcggcttcgacaagatatattatgaatccaatacttacctcgaaggaaaagagaaggtgatggaagggctcgagaagggtttcttcttcaagaaagaagatggttccgtatgggcggacctgactgccgaaggattggatcacaaactgcttcttcgtggtgacggaacctctgtctacatgacacaggatattggtacggccaaacttcgtttcgctgattatccgattgacaagatgatttacgttgtgggtaatgagcagaattatcacttccaggtactttctatcttgctcgataaattgggttttgagtggggaaagagtctggtgcatttctcttacggaatggtggaattgccggaaggtaagatgaaatcccgtgagggtacagtagtggatgccgacgatttgatggaagagatgatcgctaccgctaaagaaacctcacaggaacttggcaagttggatggtttgacacaggaagaagcggatgatatcgctcgtattgtggggttgggtgctttgaaatactttatcctcaaggttgatgcccgtaagaatatgacattcaatccgaaagaatccattgatttcaatggtaatacaggaccgttcatacaatatacctacgcgcgtatccaatcggttctgcggaaagcggccgaatccggtattgttgttcccgaacaaatcccggcaggaatcgaattgagtgaaaaggaagaaggactgattcagatggtagctgattttgcagccgttgtgaagcaagccggtgaagattacagcccgtctattattgccaactatacatacgatttggtgaaagaatataatcagttctatcatgacttcagcattttacgtgaagagaatgaagcggtgaaagtattccgtatcgctctttctgccaatgtggctaaggtcgttcgtttaggaatgggactgctaggtattgaagttcctgccagaatgtaatattctcttgaacaatatgttataaacggaaaaaggtgttgcaatgattatcagagcaacaccttttttccgtttattttttctttggagtcgttttccttttcttggttgtaccaggttctttttcgttctgtaccttgattagttccaagcaactcttcaatgtcaaatcctgtggaacaatatctttgggaatcttatagttggaacctttgtaagtgatataaggtccgtaacgtccgttcagaatttcaagttccggttcttcttcaaacttcttgaggtgacgttccatctccttctggcgtttttccagaattagttgctccgcttcttccaaagtgatggtcatcggatcggcagctttcggcagagatacatataccttgttatgtaaaacataaggaccgaaacgccccacacccacacttactgtttttccttcgtattcgcctaatgtacggggtaatttgaacaattccagtgcctcttccaatgtgatggtttccatagattgccctttcttcatttgtgcaaagcgaggcttttcttcatcatctgccgtgccgatctgtgcgacaggaccgaaacgtccaatcttaactgaaacaggtttgccacttaccggatcttctcccaatatgcgttctcctaccttatgttcagtcttgatagccagagtgttttctacagatgggtggaacttatcataaaacgttttcatgatggaagtccattgcgcttctccttctgcaatttcgtcaaattccttttctacactggctgtgaagttgtaatccagaatgttcgggaaatattcagtgaggaaatcattgactacgatacctgtgtccgtaggaaataatttcgctttttccgcaccggttatttcagtatgattttcgtctttaatctgattttctctcagggttaatacgttgaacaggcgttcttccccatctttgtttcctttctctacatattcgcgttgttggatagtggaaattgtcggagcgtacgtagacggacgtccgatacccaattcttccagtttgcgcacaagacttgcttccgtgtagcgtggcgggcgttgagtgaaccgttcggttgcgatgatagggccgtattccagtcgctggccttttttcaaaggaggtaataagcggctttcatcttcctgttcattgtcatcatcgtaggactcacggtatacatgcaggaatccgtcgaacttgatcacttcgccggtagctgtgaatacatctttgttaccgcttatgctgattgtagcagttgtcttttccagctccgcgtctgccatctgggaagcgatggtgcgtttccatatcaagtcgtacaattttttttcctgcgctgacccttcgatggattggttttccatataggtggggcggatagcctcatgagcttcctgtgcacctttggtctttgtctcgaagtgacggggatgtacgtagttttctcccatcattttagtgatagcctctttgcttcctattgttgcaaaatccgagaggttgacagagtccgtacgcatataagtgataaatcccgattcgtacaggcgttgtgcaagcatcatggtctgcgcaacggtatatcccaatttacgtgctgcttcctgttgcaacgtagaagtggtgaacggtgcaggaggtgttttctttaccggacgggtagtgatatcttcgattgtaaaagtggctccctgacaagcttcgaggaaagctcttgcttcttccttcgtcttgatgcgacgtgtcagttccgctttcatctccaccgacttgccatctgtgtccggaacgaggaatatggcggtgacgcgataagcggcttctgtcttgaaggcatgtatttcacgttcacgctctacaatcagacgaacagcaaccgactgaacacgtccggcagagagggccggttttacttttctccagagtacaggtgaaagttcgaaacctacgatacggtccagaatccgtcgtgcctgctgtgcatttacgaggttgagatcaatatcgcgtggtcgttcgatcgcttttaagattgcgctctttgtaatttcatgaaatacgattcgtttggtgttttcaggttttagttttaagacttcgtacagatgccaggcaatagcctccccctcgcggtcctcatcggatgcgagccatacggtttctgcgctttttgcttctgctttcagtgtactaaccagagcctttttgtctgccggaatttcgtagtcgggtttgaagtccttctttacgtcaatgctgaattcttttttcttcagatcgcgtatatgtccataacttgaaaggaccttgaaatctttcccaagaaacttctcgatcgtttttgcttttgccggagactcgacaatgacaaggtttttctgcataattctttcttttagaatggcttgtaccataatatttggggacaaaagtaaaaaaaaagattctccttaccttatattataaggagaatttaataaaatcttaagatttagcttagagggagaatgcttgccgacttattttgttgcggatgagggggcttcttttatttttttgagaaactctgtcggtaacattccaaattgcttctgaaaacatttggcaaagtaggaagaagagctgaacccgacgaggaatcctatttcggtaacccgatattctccctccaccatcattttgcaggctttctttaggtgaccttgatgaaatcattgggagtcatgccaataatgcctttgattttactttccgtacattcattaattggacgagtgagcgtgtcatgtgaagcccgataccaatgcccagtttatttatttcactgttgttcttaacctgatagaatgcgtcgaatattttagtcttttcttgatcggtgatgcctataccgtcatcggttacggtgactactatctcggaatccttttctgtagttgtaatacgaatcgtgcttttggcatatttcaaggcattgcttagtagattgctgataatcttggtaaaagcttctgtttcatcattatatctacaaagtccttgcccataagttcccacccatagtcgtttcttgttgtcgatagctagcgtggtgattacattctttgttagtgaattcggatgatccgaacgttgataagatgttatcttttgggttctgacattgtatgaatataatccactgatgcttgttcctatccatattcttccgaagtaatcttcaatgctatccgatattttgcctgtaaaagaaccgattctgatgaaattgtttttttcggggttatagtaacagaatcctgcagaggtgtccacgtaaatacatccattactggctttatatagagtgaatacgctgtgcattcaccacgaatgaatgtaagcacaggatttgtatggctatcgaaagaaatactttttgcatggggattcgttttatctgtattggttttcattaatataggacaatattaggaagaataagttgcataaacaaatgataggcaatttttttggcggtggaacaaaacttttgaaaacgaacaaaaaaatcgttcaaatcttggataattactggtgaatatgtttatgctctttggaataatttatcggatgaaattaaatttcggttagtatagattagtatctgtatattctatgtacatttgtctcgttagtatgtttgttttcgtttgacttaagttaaacgaaagaatgacttaagttgaactatcgcttgagttaagtcaaacgaaaatagaaatgtactttagaaaataaatctatgggagggaagatgtttatctctcctaataaagaactaatcaataatgagtgtaaattatgatctttatgaaactcccgaccttgctaaaagcggagaagaacagcctttgcatgcacgtgtagtgttgaagggaagttatacagccgaagaatttgtagaacaagtgactgcgcttcagcatatgccccatgcgcaggtggtgggtatcatagaggctatatcaaaagaattgaggcatttgcttttaaaaggattctctgttgaattaggggatatcggttattttagcctttcgttgagtgttgacaagaaggtgaaggaggcaaaagaattgcgttcgccgtctatatctctgaaagatattaattttcgtgtgaatcgccaatttaagaaggatattgagagtggtcttgaattacggcgttatcattcaccctttcgtgtgaaaaatccgttgccagaggaaaagtgcctgcaacggttagaaaggtttctaaaagagcacccatgcattaatcggcaggattatgccctgctcgttggaaaaacgaaaacacaggcattgcaggatattaatgctttcatcgaacaaggtgttttgaagaagtatggagtggggcgttcggtagtatatataaaggtatagtaaatcattttattggatatatatacttgatattaaacattttctgcttacctttgtttgcatgaaaaaagataacgagaaaggagacgagtctatggcaagtaattatattcgtttcgattgggctatgaagcgcttattgcgtaataaagccaattttgcagttcttgagggctttttgacaacacttctcaatgaaaaaattgttattcagaagttgttggaaagcgaaagcaatcaagaggacgagtttgacaagtataatcgggtagatatgcttgccgaaaactctaagggagagcttattctgatcgaagttcagaataataatgagtatgcttattttcaacgtatgctgttcggcacttccaagttggtgaccgaatacattaatcgtggagaaggctatgataaagtacgtaaaatatatagtatcaatattgtctatttttcattaggtagcggaaaggatacggtttatcacggaaaaacggagttcagaggtattcatcagaatgatgtgctggagttgactccttttcagagacaaacgttcaaggtagatgctgtgagccaactttatccggaatattatatattgaaagtgaatgatttcaatcaggtagccaagagcccgttggaagagtggatatgttatttgaatacaggtgatatccctgacagcgccacagcaccgggactggaggaggcccgcgagcgattgaaacttgataaaatgacgaaaaccgagcttgaagcttattatcggcatttggataatattgtaatattgagagataatatatttacggagcgtgcggaaggtcgtgcagagggtcgtgcggaaggacttgaagaaggacttgcgaaaggacgtgaggaagaaaagaaagaaatggcacgaaatatgaagtctttgaatatcccccttgatactatctcacagataacggggttggaaatagaaaaaatacgtgatttgaaaatttagttatcactgatagcttttcttataaatttagtgtgtcttatctgaattattctgattttatatcaggacgattgagatgagacattttttttgttagggggtaacgataaaatcgttcacattaagaacaaatagaaataagacggtggtatggcggtaagaaaaaagtgtagttttacgatattttttcaattacaataaacggatgctctcttgtttggatatatattgcacagaaacaaaggcaatcagatttatattttctatggtggatttgttataaggataacaaaataattgaagattgttttggtttgtaaagagggtgtgtcaaaactaaaatgaccactctaaaaagttacagattgtaactaacaattataaaagaaccatatcaaactctgttcttgagtaatgatatggctcttttcatcattgatttagggagtcaagtttcagattaaaagttgtcctttcatcagattacgttttgcccccccccttttctttatcttagaaccggaaactcagtcctcctaagaagttgaatccttcggcgggatagcccaaataatattgatatttcttgtttagcaggttatgtacttgcgcataaacggatactcctttgaatacattatagctggctccgatatgcagatcgctaatatctgacatattgaaagatgttgcttcctccttgtggctgatgtaatcaaaaccggcattcagttgaagtgcagaggtgggatgtacgttgagagagatggatgcttcattttcaggctttacggcaagtagatattcgttattgtcactgttccagttgcggtatatgtaatgggcggacagggacagtacatctttgtagtcataagttaattttatgccggcatagacattatcggtgtgtatttgtgtgaaagcgagcatggtacttactgttccgatgcttgtatcggacaaacttgaataggagtaaagcaagtcattctttaaattctggtatccaccgaacagttggaaccatatacctggataagggctggctttcagtcctaggctagcgttcagttgttcatacgtgtcataaggacggcggttgcttaattcggcagatgttgttgaaaagtaagagtctccgtatggacaaaggctttccaatcttcggaaatcattcagttgcttaccgccagttgcttttgcataaacaatgtaactgtccgagaaaatgtattgtgcagtgacatccggtgaaatacggaatgacttgtcgaatccgaaagataaatctacattggctccgatgtgtaatttccaatcgtcattattcaattcataatatggattcacaagtagagtcgtatagttcttgaaatattcatctcccgtagatgggttcttagtgtatccactgtataaaagattattcatttccaatgcgatagtaacggattgttgatcgttgatggctcctgtgacatcacctttggtgcgtatgattgtttccttgatggctgtatttgcatcattttcactgatcatattgtgttggcgttcgtacatcaacaggttcgtttctgcattgaaacgcagtggtgcagtctcatcaatgaaatgaatacccgcatggaagtcaccggaggtgaatttctgcttgctgttgacgcttcccggcaggaagttgaagttgcttagcccgaaatttccggcaatattcaagtctaatttattgaactggtgcgtataatccacattggcacgtgtgcggtagtaaaaagcattccatttttcgccgtctgtgtaagggagagtcaactttccatccataccgtccatttgaaaacgtacattcagcttatctttcttcgacagacggaatagataattggcgaggatgtctagattgcctaaattgccgtaaccggcacgtacatatccgggggcgcttccgggttgtatttcttttccggtataaggattcatcaaccctgccggaacggaagttgccggaaagaatgtagtggcatattccacttcttttttgctgacagtcggttcttcgactttaggcaggacgttcactttggaagcatccatgatgtccggattgtattcttgttccacaacgacggtacgattcatggtcgtatctttcggctgtgtcgtttgggctaggagatgggatggcatggagattgccaatgtgattccacctattatataaagagatcgtttcattttagttttatattttagttctcaactttcaatttttaactttcaatttgctcagtctgctttcgatcatagttgcgatgtcatcgttgccttgataattctgttgcagactcaacaggtattggcgtgcatccaagtctttgcccatggcggcatatacatcggacaaaaggacaaaactgcgtgccagccaataagcgtgtggtgtactttgctctatgtagttgagaagttctttctcggcggcgttgtattcttttgcatcgtaaagcgattgcgccaccagatatttggcttcagctccatatgcattacgtgtatctttggctaactcacgcaaatcatccacagcttttttatcggctttctgcttggtatatgctttggcgcgataataaagggcttcgtttcttagctccggactaagtttggcttctgccagcaagtcggtagcagcatgaattgtttcgatgtcgtctctcagcagaaaagcgcaacgaagtactccggtttcagcaagctggcggcgttccacattagttgctttctctttcagcattttatagctggtcaaagcgtctgcagtctgttgctgattgaactgtacttcggcacgaagaataagagcctcttctgcaaacggattgttggggtattccaatagctttccggaatggagaagaatcatatcatagttcttctgttcgcttccgatcaagcaaagatggtaatgtgcgttcaagctgaaagctccttccgggaaagtctgcaagtatttgttgaaacttgtttttgcttcttccagtcgtccccgcatatagattttttctgcggcagtatatgtcagagagtcctgctcattggcatcgaagcggatatgtcccggcatggcattggcaagagcagcaaattcatcgatacggttgagatctacatagatcgattttagatcgcgcatagccatccgggcttcttcactgcccggatatttttcgataacttgtttataggcttcgattgcctggttgtaatcatccttttgataatacagcaaaccgatttctgcagcggcttttctgctgacagggctttccggatatttgttcattagttctttaaaggaagtaatagcctggttattgttatccatcagcacatacgaccgtcctttttcataaatggcattcacagcgtatggagaagccggatattttcctaccagacgattcagtagggtgattttgccggaataatctttctgtagaccggacacaagagccaattgatagaaagaatagtctccggagggagtattcatttgttcggcttgtgaataataatgcttggcctcttcgaaattgcgtacgtgtaggtaacagtcgccaacacggttataggcatcggcaagcgcggttgtattttctcctttctccagccggatatatttttggaagtagtgacttgcctgggaataatcttttcggtggaaagcgatgtatcctaaattgtaattggcaagtgcatacgtttcattgttgggttgggttgtcagttgcagatatgcattgaagtcacgtgcggcttccgtcatacggttgaggcgatagtaggattctccgcaccaataatacgcgtctgctttcgtctgacggttgtattgtccgatagctatggattgattcaggtatttcaaggcttgttcaaagttggcattggcgaaggactgtgtacctaactgaaacaatattttctgtttggcttccaatatctgagcgcttggcttggctatccggtcgatggatttcagggctgcatcataactacgggtattcatgtaaacttctaccaaatagctgctgactttttcagcgtaaggagaagtcggaaattcgttcaggaatttctcgaaagcagtaacggattcgccgaaagcggagaaagaggtttcatgcaggcaaagagcgtaattgtaagctgcctgttccttgatttgcatattagcattggaggcggctgcttgttcgaaagccatacgggctttgtttttttctgccagttgcagataagagagccccatgtggaggtatgcgttttgtgtaagggcgtcgttggttgttgtcactttacctaatgtttcggctgctttggaatagacttttgtctgataataagaaagtcccagcatataaagtgcatcacgacgagctgctgagtgatctttatcaagatattcgttaaatgattctactgcttggtgatattgtccgaagtggtagtaggcatctcccagaatgcggtacatttctgcagtatgttcgttgtttggataggccgacagatagttttgtgctacaatctgtgccttatcgtagttttgaagctgtgcataaatttcggcaatgtagtaggggacaagtgccttgtacttcgaatcgtcctgtaacggcaggaagcctttcagtgcttcgttatagcgtttttgcgtatagcggatataagagagataataatcacagtctttggcatatttgggactgttggcacgtaatgtttcaaaccaaattgcggcttctcgtagattattggttttcagataacaggtggccaattggtaagtgcagtcatcccgttcttcattacccagcagaccgaggtcggcagagttgaagagcgccagtgcttcatcgtattttccttcatagaaatagcaggaggctaatagtgcataaatacggttggcgtaaggagtgtccggatagcggtcgagatacttgcgcaggatttcgatccggtttttgtctttcagttcataagcggaactggccagcatgtattctgcgtcttgaagaaggctggtggcaggcttttgttttacaaatgctttcagtgctggcagggcggctgcataatttttttcctggaaaagttctttcccttctttataaaggttgtcggtcgaagtgaacttatcacttgtctgggcaaatcctataataggcgtgcagcagatagccgcacaaatgagtctagtaatttcttttttcataatcgggtgtttatgcaaaagtacagaatgaaaggggatatgtttctgtagtttgttatattttaacgaattatctgccagataagaactttttaagtcctcggcgaatagaatccagtccaaaatcttctggatgaatttcggagagaggcaggaagaaagcatctgctacatcatccatggcagagaaatggctcatgttttctacagtgcagaggaaaaacatatcgagtgtgtgtacaggaaaacctgaataaacataaatattgggaagtgtgaactggtaaacggcttttttaactttcagccctgtttcttccagcacttcgcgtgcaacgccttcttcgcctgtttcattcatatcgatgaatccgccgggtaggtcgagagttcctttggctggctctttggcacgtcggcagacaagcagttcatttttctcattcaagatgagtgctactgtggcggcagaaggattgaaataatagacaaagccgcaatctgcacattttttagatttctcgttgttgacctcaaaatgagaggaaccacattcagggcaatataagaattgggcaagaggatgttccataatcgtatatattttccaggtttttgtttatgcacgcaaaggtataaaatgcttttattaatttcatctatcaccgcatagaaatattcgattgg

SEQ ID NO: 11720 - DNA, 15944 bp, Unknown
  gut microbiota DNA sequence
gcaaaagcgggctatttctatcgaacaattacaggaaggtattagcgaatctccgactccccgctctatgaagcaagcattagcctcttccgcatcaggaatcatcgccgagttcaagcgacgctctccttccaaaggatggatacaagaagaagcgcgtccggaagagatcgttccctcctatgcagcggcaggtgcctccgccctttccatccttactgataagaagtttttcggaggaagcctgaaagatatccgcgccgcacgccctttggtggaaattcccattcttagaaaagacttcatcattgacgaataccagctttaccaagctaaaattgtcggtgcagatgccgtacttctcatcgcagccgcactagaactggaaaagtgcaatgaactggcagagaaagcccactcgctgggtttggaggtcttattggaaattcacaacactgaagaactatcatatatcaataagaaaatagatatgataggcgttaacaaccgtaatttaggaactttctttacggatgtggaaaactctttccgtctcgccgaacaactcccccaagattctgtattggtatcagaaagtggcatctccaatcctgaaatagtgaaacgccttcggacagccggatttcgcggattcctgatcggcgagacattgatgaaaacggaacatccgggagaaaccttacagaatttcctgcaagcaatgcaataaccaatcgcctaaaaacagacaaccctatgatcaacggaaaaatcatcaaagtttgcggaatgtgtgaagcagaaaacatacgggacgtagaagcgctcgaaggtattgatatgctgggatttattttttatcccaaatctccgagatatatctatgaacttcccgcttatcttcctattcacgccaagcgtgtcggagtatttgtaaatgcagataagccgacagtcagtatgtatgctgaccgttttgggcttgactatgtacaactgcatgggacggaatcaccggaatattgccggtcactacaagagaggagactgaaaatcatcaaagcattttcgatagccctacccaaagacttgacaaaggtatatgaatatgaaaaagcttgcgattttttcctgttcgacactaaatgcgaacaatatggcggttcggggaatcaatttgactggaatatattgcatacatacaaaggacacgtaccttttatattaagcggaggaatccattcctgcagcacccattctctcaagggattcagccatcccctccttgccggatacgacctcaatagtcgttttgaagtgaaacccggaaagaaagatacagaccggatccgaacattcctaaatgaattaaaatcataattaaaaaactcaataatcatgaatagaatcaatcaacttttcaatagcgataagaaagacatactttctatctatttctgcgccggtgatcctactttagaaggtactgctcacgtaatccgtactctcgaaaaaaacggagtcgacatgatcgaaatcggaatccctttcagcgacccgatggcggacggcattgtcattcagaatgccgctactcaatctttacgcaacggtatgtctttaaaacttctttttgaacaactacgggatattcgaaaggatgtaaaaattccattgatattaatgggatacttaaatccgatcatgcaattcggatttgaaaatttctgccgtagatgtgtagaatgtggtatcgacggcgtcattatccctgatctccctttccgtgattaccaggaacaataccgaatcatcgccgaacgatatggtatcaaggtgattatgcttattaccccggagaccagcgaagaacgcgtgcgggaaatcgatgctcatacggatggttttatctatatggtttcatcagcggcaaccaccggagcacaacaggatttcaatgagcagaagcgggcctatttcaaaaaaatagagaatatgcacctcaacaatccgctaatggtagggttcggaatctccaataaagcgacttttcaagctgcttgcgaacacgcctccggagcaatcataggcagcagattcgttactttgcttgaagaagaaaaagatccggagaaagcaatactcaaattaaaagctgggttgaaatgatttattgatgtggatcagcagtttactctgagtcgttaaatcctctctcacgctttgcctacatcttttataaaaagatggcgggaaatctaaaagaagcaaccatcttttttagatttcccgccacaacttattcatacaaatgaggaatccacaaaattattcgaaaactcatcaatcataaatcacaattatttcatatctttgccaatattttaacagtagttcaacaattatgagagcagagaccccttccgttttgttaatttacacgggtggaacgatcggaatgatagaaaatccggaaactggtgccttagaaaactttaacttcgatcatctactcaagcatgtacccgaattaaaaagattcaactaccgcatctcttcctatcaattcgaaccacctctcgactcttcggatatggaacctgcttactgggcaaaactggtaaagattatcaattataattacgactatttcgatggctttgtcattcttcacggaacggacactatggcttacacagcttccgcattaagttttatgctcgaaaacctaagcaagcctgtcatcctcacaggttcacagcttcctatcgggactttacggacggatggaaaagaaaaccttatcacagccattgaaatcgctgccgccaagaactcggacggaacagccatcgttcctgaggtttgcatattttttgaaaatcatttgatgcgtggcaaccgtacaaccaaaatcaatgcggaaaacttcaacgcatttcgttctttcaactacccaccattagcacgggtaggcatccatatcaaatatgagcctaacttgattcgcaaacccgatccgacaaaaccgttaaagccacattatttatttgataccaatgtcgttattctgacgctctttcccggcattcaagaaagtatcgtgacctctctccttcatgttccgggactgaaggctgtcgtaatgaagactttcggatcgggaaatgcaccgcaaaaagaatggtttatccgccagctaaaggaagcgacagaacgtggaatcatcattgtcaacattacccaatgcgcgtccggagctgtggaaatgggacgttatgaaacaggaatgcatcttttggaagccggtgttatcagcggatatgacagtacccccgaatgcgccattacgaaactgatgtttctgctgggacacggattatccaaccaagacattcggtacaaaatgaactcttgtctgataggagaaatcactaaagtttgaaatagaagcctattatcatacttatttgattttatttgtttaaatataggtgttattctaaaataatatttatatttgcactacttgtaaattttatgtaacaacaaacttatctataaacctgataacaaaacaagcgacagaaaggtctattcgtatgaaaaagaaaatattactagtcgacgataaagcgacaattggaaaagtagccagtgtatacttaggaaaagattatgattttacctatcgggaagatcctatcaaagctatcgaatggctgaacgagggcaatatacccgatcttatcatatcggatatccgcatgcctctcatgacaggagacgagttcttaagatacatgaaaaataatgaattattcaagtcaatccctattgtcatgttatccagtgaggaaagcacgacggaaagaatcagactattggaagaaggcgcggaagactacatattaaagccattcaacccattggaactcaaagtccgaatcaaaaagattattgactaataccaggctgctacatgcaatattttatttatataggtagagatagcaagacgatagagttgttttccaaattaaatgtaggggtattttatgctgtgccaaattgtagcaaagctattaaagcagtagacaaaatacgtgaaaaatatgatatagctctattttttgaacaagtagacctctccaaagatattgcagatgtccggtatatgcgcaagaaatatccgggactttacatggtacttgttatggattcgttgtctaaagaagaagcggcacaatatctgaaagccggaatcaacaataccattaaatttgaaatgactcatgaagccttaacagacttatcaacttttctcaaacgccgcaaggagcagaaaataaaagatctccagctcaaggcacaaaatatcaaagctttccagttacctttatggaaacgaatctttgatatattattttcgggaatggctatattatgtctttcccctcttttgatatttactgcattagccattcgcttggaaagtaaaggagcagtcatctataaatccaaacgagtcggaagcaactatcagatatttgattttctcaaattccgttccatgtatactgacgcggacaagcatctgaaagatttcaatgctcttaaccaataccagcaggaagaagaggagcccgatatatggggagaagacatcgatacagacatgaatgaagaaggcgatgaagaagaaattcttttagtatccgatgatttcgttatctccgaagaagattatattcacaaaaaatccaaagagaaaagcaatgcttttgttaaactggaaaatgatccgagaataacaaagataggacgctttatccgcaaatacagtatcgacgagttaccgcagctttttaatatcttaaaaggggatatgtcgatagtcggcaatcgacctctcccactctatgaagccgaactactgactagtgacgaacacatcgaccgcttcataggtcctgccgggctaactggtctatggcaggtagagaaaagaggtgaagcaggcaaactttccgctgaagaacgtaaacaattggatatcatttatgccaaaactttttctttctggctggatataaagattattctaaagacagttactgcatttattcaaaaagagaacgtataacttcccttaagtgatggactcttatatctacataatagatgatctggcattcttccttacagggattctgtttctatatttttttgtattatccaccgcttcacatttcagacatatcacataccctaaagctcaaaaaaaatatcgctgcgccatccttattcgtgaaagcagtccccttcccgatttatatgggaaagaatcaccctacgaattcatcacatacaacgatctatatcaaggtatcatcagtttagacaaagaacattacgacttggctcttatcctgcctgatactgcccgcactctgtccccacaactgttggacaagatttatgacgcttatgatgccggaatacaggcaatccagctacatacactcgtaaaaggctgcaagggatttcgtttcaaatttcgagtgatgcgtgatgaaataaaaaacagcctgcacagggcaggcaatacgcaattcgggttatcatccaatttgcttggaaccaatatggctattgatctggcatggttacagaaaaacctgaaaagttccaaaaccaatatcgaacggaagttacttcgacagaacatatatatcgactatctgccggaagccattgtttactgcgaatcctatccgacctctccttatcggaaacgcccccgaaaaatgatctcttatttgctcccctctctattagaagggaactggagtttccttaatcggattatgcagctattgataccctctccgctgaaattgtgcatcttcgtcggtatctatgctttactgatgacagcatataactggacgtcatcatttggatggtggagcatattattcggtttattcattgtatacagtctggcgattccggattatctggtagaagacaaaaagaagaaaaaacactcaatatggagaaaaaaacacttaagcagcgaattaaagaaaactccggtttaaaacaggccgttcaccgattcatcatgcatcctgtcaaaacgcgtcctaactggtggatacgtatcttcggttacgtatatcttaaacgaggtaaaggctccgtgatttatcgaagcgttcgcaaagatctccctcccttcaaccgattctccttaggaagatattccgttgttgaggatttttcctgcctcaacaatgcagtcggcgacttgaccatcggagattatacacgaatcggattaagaaatacaatcattggtccggccgctatcggcaaccacgtcaaccttgctcagaatgtaaccgtcacaggactcaatcataattatgaaaatgtggaaaagagaattgacgaacagggtgtcagcacacaagcggttgttattgaggatgatgtatgggtaggcgccaattcagtcattctcccgggagtgactttaggaaaacattgtgttgtagctgccggaagtatagtcactcattccgtccctccctattcgatatgtgccggttgccccgcaaaagttatcaaatcatatgattttgaaacaaatgaatgggaaaaagtagaaaaatcagccatcaataactataaataatgagaatagctacgcaatataccttatataggggattgtgacatatattgagatacactatctttgcagtatcagaattgaattaattagtcataattttattacgtagccacatttaagtaaaaatgaaataggatcctgccgaagtgatttcgtcgggattttgtttttatactgacccgaaatatctactgccccaatattttgccgttttattcacaagcaataaaaaaaacgagttaattctttttttatagaatcactcgccaccgcatcagaaaagccaaaaggcttttccatagtacctcatttttttcctgaaaactaatcttcttttttacctctaaaacgtctttacctattgttatcctttttacctaactataaaaactttcctattgaataaaaattttaataccttaaatctttacttaatctaataccttacattttttcttttaccttataaactaacagcaatttcccaattgcattgcaaaggtacgaataatttccgtgtgcgcaaacggttttatattttataacacttttccttgctataagcccttcacatcattcagcgtaaccaacttatttacaatagcataaatagtcaaacccgccgcactatgtatttgcaattttttgctaatatttctccgatgcgtgataaccgtatgaatagataaaaacagcttttccgctatttctttatttgtcattccttttaccacacagatgacgatttccttttcccgctggctgagcgcatcctgattttccaaatcttcttcctcagaaggaacattcagcaaaccggagattttcttagacaatctctccaaatcatcaaatatagaaatagactcatcatatttgctcaacaaggaggcatctacaaaagaagtgaccaatgctatcacccgtatcttcttaccggacgtttcctctcggaacttacctatatcgaaataatcaccgaaagccggattgacaatcagcatatcaggacactgcgtccggacacagtcatgcagagcctcgatagaaagcaactctataggttgcactttcacattaggaagacgcttcaacgcagcagtcagtccgccacggataattacagaagtctcagcaattgcaatccggataacttcattatttttcattttccatcatcctcctttccaggttcaaaatagcaggaacaaaaatatagtcctctatcttgcaatgagattccagtccctcctcacaagcataaatatcaaaaagcgccgcattcagaagattctcattggctttggccggacaatatttaataatgatattcttcagttcggtcaacttctctcccacttggtcgtgatgtttggagaatgtactgatctggtagtttttcggggcatttcctgctattagcgcatccacatacttaaatacggttttctcttcataatccatatgtttacgcacttcacgggtatattcatcaaaaaacttcagaataaggaaagcaacatcgtcctgcgagcagtcaatggcttcaatcaatttgcgccggatggcgggaagagaaaaatcaagaaaatagatgtgtgcctgccgcagataatcaatcaacgcagggatggaaatatcatctttatctccatctaaccgagaaaagccctcagccataaaattaactacaataaggaaagtacggcaatctactccattcagctcgcaaacctcctttaccgttttatctccaaaccctaacgaaagcccgaaacgactcattacctgcaacaaggaataattgtcactgataagatcaatcatcttatcagtcggcttatatttttgtaaattatccatcttacctattatatttagcgagtgcaaagaaacggaatatttcacgaaatcgcaatcaccatttataggtattttgaaccattacaatattctaaatactaattacatattactattttacaatacaagtctaggcaagcttatctttttttcgtaattttgtcgctatcaatttgtaattagcaactcataatttataattaataaaatggcaaacgaactcgaactgaaatacggctgcaaccctaatcaaaagcctgcccgtatcttcatgaaagaaggcgaactccccatcgaagtgttgaatggacgtcccggttatatcaatctattggatgcattcaacagttggcaactagtgaaagaactgaaagaagctaccggactgccggctgccgcttcttttaaacatgtcagccctgcgggtgctgctgttgcggtagaaatgagcgacacgctgaaaaagatttatttcgtagacgacatgaaactatctccattggctacagcatacgcccgtgcacgtggagcagaccgcatgtcgtcttacggagactttatcgcattgtccgacacttgtgacgaagaaacagcacgcatcatcaaccgtgaagtatccgatggtgtcattgctcctgactacactcccgaagcactggagattctaaagaataaaagaaaaggaacctataatgtaataaagatagatcctgcataccgcccggctcctatcgaacataaagatgtattcggagtaactttcgaacaaggaagaaacgaattgaagatcgatgaaagtcttttgaaagagatgcctacgcagaacaaggaaatcccggctgatgcaaaacgcgacttaatcattgccttaatcactttaaaatatacacaatctaattctgtatgttatgccaaagacggacaggcaatcggtattggcgcaggccaacagtcacgtatccactgtacgcgcctggcaggaaataaagcagatatctggtatttacgccaacacccgaaagtgatgaacttgccgtggattgagaaaatccgtcgtgcagaccgtgataacacgattgacgtttacatctcagaagattatgacgacgtactggcagacggcatctggcaacagttcttcactgaaaagccggaaatactgacacgcgaagaaaaacgggcatggttggatacgatgacaggcgtagctttaggatcggatgcattcttcccattcggagataatatagaacgcgcacacaagagtggcgttagctatattgcacaaccgggcggatcagtacgtgacgatcatgtgattgaaacttgcgacaaatacaatatggcaatggcatttacaggcatccgcttgttccaccattaaaaagatcgaccatttttattccatatatccccatttataatgagaaggagacaaatcttccattataaatggggatttcctatttctttaagcccctctatctttgcagcgttacatttaaaaacgaatcaaagatgaataaaattggtgtattttatggttctacaaccggaacaacagaagaccttgcccgtcgaattgcagagaaattagatgtaccatcggcagatgtatttgatgtatccaagctaacagaggcgttagtcaatgaatatgacgtattggtgctcggctcttccacatggggagcaggcgaacttcaagacgactggtacaatggagtaaaagttttaaagaagtgtgatttatcccacaaatctgtagccctgttcggttgcggcgactctgactcgtatagcgacacattctgtgacgcaataggtattctttatgaagatctgaaagatacccactgcaaattctgtggagcaacagacactgcaggctataccttcgattcttccattgccgtcgtagacggtaagtttgtaggtcttccacttgacgaagtcaacgaagatagcaaaacagacgaacgtatcagcgcatgggctaaacaagtgaaacaagaaattagctaatttcaccttaacataaaagaccgcagtaaaaagaaggtataaagatagcagtttaagcgataaccttagcataagtttagctttgtttgtatgtagtttgtctgaggtgaatcgtttctaagaagacagtctcctgatagtagatatactcaaaggaacaggctgtagaagaaacgattcactcaaatacaaacaaggcaacagaatagttattcatgtttcagccatgcatttggcaatacttctttttcacctttttcattcaccagttccatctgcaatacgcctccgttacaatcgaagtaacgcacttctatcggatgaagcccggctttcaaagccttctgcacaataatctctaccggcgaatgtgctccatcattatctcccaacaattcaccgtcaagcattaatgtgctaccgtcgtccgagagaagggcaaatgtatagataccatcggcaggaacttccagatagccagtcaataccagaccgatatttcctttcacctcttcgggaatggataccgattccaccacatactcccctttgacaggagctgcatcaatatccgcacaaagattaccacgaaaatcgtgccatactgctttcaagccgggctgcaaagcagccggagcagtcaccgcctctgcataaggagcctttacatacttggtacgcaccacatccgaaggagaaccatccggacggaaagtgcggaaagcgaaatccgtagccttcccaacctccaaagcaccgttataaagagctgattctttggtaggcatactgccgtctgtcgtataccgtatttcagtaccgggtaacgggcaagtcaattccacagttgtttcatcaataaatgcattcactttatagaatccctgcaagtcaggcaccctataatttaccctcatcacatccatccgcttaaattgcggaacaagctgacgatagaattcttcgagatccggtttagctgtcggctccgcccaagctatttcactcaacgctatcatacggggaacaatcaaatattcaatgcgcttcattgtcggaatccattcagcccagagattcgcttgcacaccccagatatattccttctgttccggcgataaccgctcgtctgcacacggatcatacgcaagtattttctttactgaattctgatcctgcgcataatcgaaataaaaatattcattcggacaaacaatcactttctgcttttgtgcagttgccgtaggcaatgcatctttcgcccaacttctccaccatgtaatagtggcatcggaagataatccgtcggataccacttcatcccagcctatgagtttctttccgttggcaaggaaaaatttctccatgtcacgtacaaaccatgcctgaagttcttctaccgaacccaatttctccgtacgaatccgtttctgacaaagaggacatttcttccagttggctttttccacttcatcaccacccatgtgcacatattcataagggaaaagttcaaaaacttctttgaatacattctgacagaactccagcgttgtatctttacccggacagataggagaagagaaagtttccccccacccgattaatccgtcacacgccaattccggatattgaccgatagctgccaggaaatgtcccggcatatcaatctcgggaatgacatcgatacctctttgcgcagcataggcgactatttcttttatatcatcatgagtgtaataacctccatacagcgtatctccttccacaatgcgtatcttatcttccggaatcaggaaatcggtattatcttcttctttcgcacgtgccatacaggtacgatcctgcgtattgaatttacgccaggcccctttttctgtaagcaacgggtacttctcgatctctatacgccagccctgatcatcggacagatgccaatggaacttattaagtttatacaaagacatcagatctaatatatgcttcacttcttttttattccagaaatggcgggaagcatccaacataaatccacgccactcaaatcgtggcgcatcttctatttgcacgacaggaatagaataattctgtttctctccctgcacttctgtcaccgcaggaagcaactggcgaatagtagtaatagcagaaataatgcccgaatagtcagttgcctctacccgaatatactccggcgtagactcaagcttataagagccgggctttccagcagtatccttcaactgaaaatacatacctacctgactcttatcggtagtgacctcaacagaagacgatacgacattccgaagaatttcctgcaggtatccggtagccggaaacaacgactgatcggaaactccgatcttcatgccatcttttaaaacaaacgagcccgactgctcggtcagactaacgggggtaggcagaattgcaatttcttgcttgacggtaggcgtgcaagaagaaaaaatacaagctgacacaatgagaaaagagctacttagttttttgaacatgcggttaactatttaataaatgatttgtcttgtttttaattgaccatctatatataatacaactaaaacgcataaactactaaaaaggcggaaaaagtttttcataacttcatatcacaaactcctattaatgtttatctttgctcccccaatccattacaaaacaattataaagggtcacttcaatgtcaagagagaacatactaatcaaaacctcatggatcagcacaatcggcaatgcaatcctgtccgcatccaaaatcataatcggtttatttaccggtagtttagcggtaataggcgacggtatcgactcggcaaccgatgtcctcatctctatcgtgatgatttttacagcaagagtgatgaatcgtccgccttcaaagaaatatgtattcggttatgaaaaagcagaagggatcgcgactaaaatcctgtcacttgtgatattctatgctggtatgcagatgttgatatcatccatccaaaacatcttttccgatgaaatgaaagagataccgtcagccatcgctatctatgttactatattctctattatcggtaagctactattagcttcatatcaatacaagcaaggaaagaaaatagacagctccatgctgacggcaaatgcgattaatatgcgtaatgatgtcattatttcggcaggagttttattaggcttactgtttactttcctacttaagttacccatactcgactcaataacaggattgataatcagtctctttatcatcaaatcttccatcagtattttcatggactcaaatgtagaacttatggatggtgtaaaagatgtcaatgtatacaataagatattcgaagccgtcgagaaagtgccgggagcaagcaatccgcatcgggtcagatcacgaatgataggaaaccggtatatcatcactctcgacattgaagtgaatcctcatataaccatcacacaggcacacgaaattgccggagccgtagaaaaaagcatagaagactccatagacaatgtatatgatattttagtacacgtagagcctgccggagaatgtcagacagatgagaaattcggagtgaacaagggtatggtctgattagtacaaatacaaaatcctgcacgtttctcgtacaggatttcacattacagatttagctaggcatttttacagatttgtcttcaatgtaacctctgtactcatatgtagtaagatatcttattctcataatcatgagctttttacatttataaatcagcctctgcttttccatcattaggcaaggtagcaggattccatgattttatagtcgtatttgacacatctcattttgtcttgtttagagtcacagtatacatatattctttacctgcttctgttgcaaatacattatcgccagttaatagttcagtatgaagagtatacccatcagtattatcatatgtcaggtccacgcccagaccaccctcaacaaattcacccggacataatataaaagtataataagtaactttttcatccgtatcatagtctcccccattaaaaccattttgggaataaacaaaatccagcttccctacatcctccagcggctctactttccctgttgctatctcaaatgaaaccttagaatgtaaacttgaaaaactaaaattccaatacgacgagaaattacccggttgatacgacatggttttataaccctctcccggtactaatttcaaagtcaatttactcattttatgttcaaattgagtaacctgcgtaagcaagtttcttgtgagctttccatcttttatttgaatattactcctttattttctgcatacggataatatgctgtaaaagaacctatctcagcaccgtaataaataatattcgaactagcctcaaaagtattgccacttatccaattgtaacaacgattcgaatactctaacttaccacttttcccaaaaattcccattttatcccttgtctcccacttcgtatctaccatacgcgtcttcgctccctcaattccggccaatacctcaattgctacttgcccatcgttagcgacattatccatttcaccattatcacatcccgcaaatattgcagccaaaacagcaacataaaaataaatcttcttcataactgtattttttagtttatatttatcattaatcttattgaccagttagtgtgcatccacagcacctccattttccggtgtccaaccggtgatactagcacttgttatttccactttcgtacgatgtaaacggacctcatacgtgtacttgctgcctgcatccaatgccttatccattgtccaggtgaaaggttcgtcatttccattattcaaatcaaaagtcagcacacgtgacttaactgaattgggtaatagaatagcctcgctcaaagtgccggactcggttgtaaacaatgtgatatccgacttatccgctccgcacataagcgtaccgttagaaagattaaaagtcgcttttataggttgatttccaactgtgacaccaagatttctcagatcagccgtattcaatccatcgcccggacttatttccaatactaatttagaaagtttatgaacaaaattgaatcctactttcggattatcctttgtacatccttccactttgccagcatacatgaagtcgacagcttcctgactactttgaacagtcacatccaacggataagtataatccgtcagcggaaagacaaaaggataatatgcataaaaatccactgcaccgacaacggggaaatagataatattcgtattttcccctgtacagtcaatgccgtgcgtccgtcgggtacaag

SEQ ID NO: 11721 - DNA, 7291 bp, Unknown
  gut microbiota DNA sequence
aaataatattattgataatcagtggtttaaatctcgtgtaagtggagcgtatcggactcgaaccgatcaccttaacactgccagtgttacgctctagccagatgagctaacgccccttttttctcttatatgataacgtttgtaaacgaatctcttttgttgccgcaaatataatgcaatattctgaaataattgctatgtttgcggtaaataatctattagaaggaaaaatatgttgatttataacaccacttttcaagtggacgatgatgttcacgataattttttgatttggataaaagaatcttatattcccgaggtacagaagcacggagcgctgaaaacaccacgtatttgtcgtatattgagccatcgggaagatgggagcgcctattctttacagtgggaagtagagagtagtggattgttgcaccgctggcatttggaacaagggatacgattgaatgacgaactgactaagatatttaaggataaggtaatcggatttcccacattgatggaggtgatagagtgattcaaccggtaaaagagaagataattctggggatagaccccggtacgacaatcatgggatatggagtgctgagaataaaaggaaccaaaccagaaatgattgctatggggattatcgacttgcgtaagtttgccaatcattacttgaaattgcgccatatccatgagcgggtgctgagtattattgaaagctatttgcctgatgaactggctattgaagctcctttcttcggcaaaaatgttcagtctatgttgaaattgggacgtgcgcaaggagtagcgatggcagcagcgttaagtcgtgatataccgatcatcgaatatgccccgttgaagataaagatggctattaccggaaacggacaagcatcgaaggagcaggtggcggatatgttgcagagaatgcttcatttctcaaaagcggatatgcccacttttatggatgcgaccgacggtctggctgccgcctattgccatttcctgcaaatgggacggcctgctgtagagaagggatatagtagctggaaggattttatagcgaagaatccggataaagtgaagtaaactttaacaataaatcagattacgaaaaatagtatcataggagagcttgagatgaagataggaattaattcaataataggagtgactacagtggcaacagtgatgagttgttcttctgcgaaaaaggaatatgcttccttcgagttgtatcccgtccgtacgggaagccttatggaaatggaatatactccggaagctacgaaattcaccctttggtcaccgacagcagaagaagtgcgcctgatgctttatgatgaaggtgaaggaggtcatgcttatgaaacagtgaagatggaacttggagaggatggaacttgggcaactgtggttaacaagaatttgctcaataagttctatactttcaatgtgaaaatcaatgataaatggcaaggggatactccgggaattaatgctcatgctgtcggggtgaatggaaaacgtgccgctattatcgattggaaagcaacgaacccggaaggatgggagaatgatcaacgtcctccgctgaaatctcctgccgatatgattatctacgaaatgcatcatcgtgatttttcggtcgattctacttccggaataaagaataaaggaaagttccttgctttgaccgagcatggaacgatgaactcggataaattgctgacaggaatcgaccatctgatagagttgggtgtgacgcatgtgcatcttcttccttcctatgattatgcttccgtagatgaaacaaaattggatgaaaatcagtacaattggggatatgacccgttgaattacaatgttccggacggctcatattcaacagatccttatcaacccgccactcgcgtgaaagaattcaagcaaatggtacaggcgttgcataaagccggcatccgggtgattctggatgtggtttacaatcatacgtttaatacggcggagagtaattttgaacgtacagtacccggttatttttatcgtcagaaagaagacgggacattggcgaacggttcgggttgtggaaatgaaacggctagtgaacgtcctatgatgcgtaagtttatgatagaatccgtgctttactggatgaaggaatatcatatcgatggttttcgcttcgatttgatgggagtgcatgatattgaaacgatgaacgagattcggaaggcagtggatgaagtggactctactgtttgtgtttacggagaaggatgggctgctgaaacgcctcaatatcctgttgattctttggctatgaaaaagaatgtggcgtatatgcccggaattgcagtcttttcggacgaatttcgtgacggactttgcggttctgtttgggagaaaggtaagggagcttttcttgccggagtgccgggaggggagaacagcgttaagtttggtattgtgggagctatcgaacatccgcaagtacgctatgattcggtgaattacagtcggcaagcctgggccggacagcctacccaaatgattagttacgtttcctgccatgacggtttatgccttgttgatcgcttgaaagcaagtatgccagaagctactcccgagcaactggtccggcttgataagcttgcgcagacggtagtcttcacttcgcaaggtattccttttatctatgcaggagaagaagtgatgcgcgataaacaaggggtggataatagttataagagtccggatgcagtcaatgctatcgattggcgacgcaagacgatgaacggagatgttttcatgtattataagcggctcatagatctgcgtaagtcccatcccgctttccgtatgggagatgcggaaaaggttcggaagcatctggagtttcttccagtggaaggacaaaacctgattgcattccgcctgaaggatcacgcgaacggagatagttgggaagatattatcgtggcctttaattcccgtatgacccctgcgcgtttggcagtgcctgccggaaagtatacagtggtgtgtaaagacggggtgatagatgttcgcggactgggaacacagacgggaacggaagtgattattcccggccaatcggctttgattatgtatcggtagccagctttttcagcttgaatgtaacataacaacaactatttgtaacatatgcatacgatgatgtaacagacgggaaacaatctgaatcgtaattcttcggtggagggcaagaaacttcttaagtttgcaacgtgatagtcggcaagattcgtcattttttctaactatcgcgaaataactaagaagtaaaagaaaagacagaatgaaatggactctacaatgaaaatgaatgacgctaaaggtttctacaagctctcctgactccagcgtataggattcggctccggtgatttggcgcaaaaccttaatctatcagaccgtatgtatgtatttgctgattttttatacgaatgtatatggtctcaaaccggaggtggcagccgtgatgttccttatcgtcaggatagtggatgtcatttgggatcctcttgtaggggcttttgttgataagcacaatcctaaactcggcaaataccgttcataccttatattgggagggattccattgacagatattttctacaaagcgggtatggctcttggaggtgtggtgccgggacttgtcatggcatttgtcggatttgatcagactaatgaggtgccacaatcaccttttgccgaacaggggatactgtggcttgtagctgttattcctgccttgctgcttctggtggctatgttcattatatctaagtatggactagaggacgatgtgattgataacatcaatagagagataaaattacgccacaaagggggcgaataaataaaagaatatttacttaaaaattgttgtatataaaaacaaacggatcaatatttttttgcttgtgatggcggcatttcttacttatggtggtgaagtagcttttgcgcaaaacaattccgttggcttttcaatatgcacatgaggctgatccggattcttggcgtaatgattggccgatggctgggcgtaactattatatctattttggtggattgtggggcggtcaactccaacgttacaggaataataaggcgttggaatctgccattttgccggaaggtacagaagaagccttgcccacacgtgtagcccgtttgagagaggacatgatggagtttgccgaagaaccacgcggtggtgataatcgataaaaatgggaaaccgttgacagccggagatacggccgctgtttttttgaagcttcgtggatgcacaagtataacgggagatattatttctcttattctacgggagatacccatttgctttgttatgcgataggtgataatccatacggaccattcacttatcagggagtcattcagactccggtagtaggatggactacacatcatgccattgttgaattcaaaggaaagtggtatttgttccatcacgattgtgtgccatcaggagggaaaacttggttgcgcagcatgaaggtttgcgaactgcaatatgatgcggacgggaaaatcattactattgacggaatggatgaataaccccgttggataaacaaatcggttgtatgaatggaaaaatgttcgtgataggtcttgttttgctgtaaaattgttacctttgcggtcgataattaaacagaatataagaatatgagtcaaaatacatttagcatggcggggggcgtagcacgcaacccgcttgtgcgtttagccaaacccatcacgtcaactatcggagcgaatgaacatatagctattgtaggtcctaatggtggtggtaaaagtctttttgtagatactttgataggaaaatatcctttgcgtgagggaacgattgaatatgatttttctccttcggccactcagactgtttatgataatgtgaaatatattgctttccgtgatacttatggggcagccgataccaattactactatcagcagcgttggaatgctcatgatcaggatgaagtgccggatgttcgtgatatgttgggcgaaatcaaagacgacaagctgaaaaatgaattgtttgaacttttccatatcgaacctcttcttgacaaaaagataattttactttccagtggtgaactacgtaagttccaactcactaaaactctgttgacagcacctcgtgtgctgattatggataatccgttcatcggtttggatgcacctacccgcgaattattgttctccttgcttgagcgtttgataaagatgtcgtcggtgcagatcgtcttagtcctttctatgctggatgatataccttcgtttattactcatgtcattcctgtggataagatggaggtctttcctaaaatggcacgtgaggcttatctgaaagcttttcatgacagagatacggttgattcttttgaggagttgcagaaacggattatcaatttggcttatgacggaaatacctacgactcgggtgaagtcgtgaaattgaataaggtgagtattcgttatgatgaccgtactatcctgaaagaattggactggacagttcgtcgtggtgagaagtgggcattaagtggggaaaacggagcgggtaaatcgactttattgagtctggtttgtgcagataatccgcagtcgtatgcctgtgatatcagtcttttcgggcggaaaagaggaacgggagaaagtatttgggagatcaagaaacatatcggttatgtcagtccggagatgcatcgtgcctatctcaagaatttgccgactattgagattgtggccagtggtttgcacgacagtatcggtctgtataaacgtcctcaaccggaacagatggctatctgtgagtggtggatgggtatattcggtattgcagatttaaaagataaaccattcctgcaactatccagtggagaacaacgtttggccttgctggcaagagctttcgtcaaagacccggaactgctgattctggatgaaccgcttcatggattggatacctataatcgtcgccgggtaaagaaagtgattgaggctttctgccgacgcaaagataagacgatgattatggtgacacattatgaatcggaacttcccgatacaattacaaaccgtattttcttaacgagaaaccgatgaaagaataaaatcagcattttaggtattggcaactccttcttctttggtgaactttgtagcgaaacaaactgttctatatataactaaagaagaaaggagaccaataaaaatgagaaaaatagtattgcttcgtcatggagaaagtgcttggaataaagaaaaccgctttacgggttggacagatgtcgatctgaccgaaaaaggaattgccgaagctgagaaagcaggcgagacattgaaggagtatggcttcaatttcgataaagcctatacctcttacttgaaaagagctgtcaagacgctgaattgtgtacttgataaaatggatctcgactggctacctgttgaaaaaaactggagtctgaacgaaaagcattatggcgatttgcaaggattgaataaagcggaaactgccgggaaatatggtgaagaacaagtgctgatctggcgtcgtagctatgatattgcccctaatccgctttcggaaagtgacttgcggaatgcgcgttttgactaccgttatcatgaagttccagatgccgaacttccccgtaccgaatcattgaaagataccattgaacgtattatgccttattgggaatcggatatatttcccaacctgaaaacagcccatactttattggttgtggctcatggtaacagtctgcgaggtatcatcaaacatctgaaacatatttctgatgaggaaattgtaaaactgaatctgcctactgccgttccttatgtattcgagtttgacgagaacctgaatgtctctaatgattattttcttggaaatgcggaagaaatcaaaaaaatgatggaagcggtagccaatcaaggaaagaaaaaataaagtgttgtatattaaaaaaagtaaagttatgagtaaagtaattgatttgttaggagataaagccggatattatctggatcacacttgtaagacgattgataagtctttgatttatgtgccttctcccgatacgatagataaaatatgggttgattccgaccgtaatataaaagtgctgaacagcttgcaagctattctcggacatggacgtttggctaattccgg

SEQ ID NO: 11722 - DNA, 14463 bp, Unknown
  gut microbiota DNA sequence
ctccttacagtgagacagctcttttaatatttctttatcatcaacaactataaattgccaactattactgcgtttggaagagggagacatcaaagcggctttcatcaaggcaaccacctcatcctgagtcagttcttcatcagtaaacttacgcatactgcgacggttctttatcaattcactgaaattttccatatcatttccggtttcatctgattaatgtatgcaaagataatgcaattatactattctcgtcaattctccggtcgtagaatcaataataaatccgtaaactctcacatccgaaggaatcaaaggatggtgtacgataaaatcaacagttcctcttaccgacttctccgtatcttcaaaaccgtccaaccaggaattaaaatctactccacagaaacgcatcatgtcaatataatccggattgatcccccgcgctttcattttcccgatcatctcctcactatgcatgtggcaagccccacagtcagaatgagcaatcaccataatctcttctactcccaactcaaaaatggcaacgagcaagctgcgaatcacactgccgaaaggatgggaaataacccctcctgcattttttatcattttcacatcaccgttctttatacccaacgctgccggaagcaatgctgtcagacgggtatccatgcaagaaagaatcgctatttttttatcagggtacttgttcgttatatactcttcatatcctttcttctctacaaattgcttgttataagctaaaatttcgtcaatcatagtagttattccatttatatattttactaatacacaaaagtaacaaattatccgtttttttgttgtatgagaaataaaaattgtaaatttgtagttgaatgccacttaaactaacaacatattataaaggaaaggatattcctgatttgccgggaaagaatacctttcattccaaagagttgtttctgatttacgaagcgactccgggttatactcctttattgatagtggcaacggaaaacggcaaaccgatggcacgtttactcgcagccatccgcaaagcaaaaagatggctcccctcttcattggtaaaacactgtgtagtatacagtgaaggcgaagggctggatgagtcgctttccaccaacaaggaaaaagctgaggaagtttttggagagatgcttgagcatctcactcaggaggcaacacgcacctgcttccttatcgaattccgtaatctgaataattcaatgttcggttatcgtttcttccgaaacaataactactttccggtcaattggctacgggtacgcaactcgctgcatggtatgaaaaatgtagaagaccgatttagtccgtcacgtattcggcaaataaaaaaaggacttaagaacggagcaaaagtagaagaggcacatacagtagaagagattcgcgatttctcacgaatgctacataaagtctattcctcccgtatacgcagatatttccccgccaacgatttcttccggcacatgaacagtatgctcatcagaggcaaacaggcaaaaatattcatcgtcaaatataaggagaaaattatcggcggagctgtctgtatctattccgaagaaagtgccttcctttggttttcaggaggaatgcgaaagacatacgcattgcaatatcccggtatactggctgtttggaaagcattggaagatgcccatcaacgcgggttccgccacatggaattcatggatgtaggacttccgttccgtaaacatggctatcgggatttcgtgcttcgctttggcggaaaacaaagcagtacccgccgctggtttcgtgtcagttggacttggctaaacaatctgctagtcaaattttatgtctaaatgtaatctcaagattacaaaacagttcttcatatcctatcctatgattttttatgctttataacgcagcaattaaatgcagaaatatttctttattaggtaagaattgtctttctttgtgctgttttatgccatataagcacataattaaaaccaaataaaaaagtatagttatgaagatttcacacattgaacatctgggcattgctgtaaaaagcatcgaagaagcccttccttactacgaaaatgtattgggtctgaaatgttacaacattgaaacagtggaagatcagaaggtaagaactgctttcttaaaagtaggcgaaacaaaaattgagctgttggagccgacttgcccggagagtaccatcgctaagtttattgaaaacaaaggtgcaggtgttcatcacgttgcatttgccgtagaagatggcgtagccaatgccttggcagaagcagaaagcaaagaaatccgcctgattgacaaggctccgcgcaaaggtgccgaaggtttgaatatcgctttcctccacccgaagtccactctaggtgtgctgacagaactctgcgaacattaatcataaactctaaaactaacaagaactcatgagtaatcaacttgaaaaaattaaagagcttattgaacgccgtgccgtagcacgtctcggaggcggtgagaaagcaattgcgaagcaacatgaaaaagggaaatacacagcacgcgaacgtctagctatgttgctggatgaaggtagctttgaagaaatggacatgttcgttgagcacagatgtacgaacttcggcatggacaagaagcactatcccggagacggtgtagtaaccggttgcggtactatcgaaggacgtctggtatatgtgttcgcacaggacttcaccgtttctgccggttcactgtctgaaacaatgtcacagaagatttgcaaaatcatggatcaggccatgaagatgggtgcaccttgtatcggcatcaacgactcaggcggtgcccgtattcaagagggtatcaatgctcttgccggctatgctgaaatcttccaacgtaatatccttgcctccggtgtcattccgcaaatttccggtatcttcggtccttgtgccggtggtgccgtatactctccggctctaacggacttcactttgatgatggaaggtacttcctatatgttccttaccggaccgaaagttgtaaaaacagtaacaggtgaagacgtcagtcaggaaaatctcggtggcgcaagtgttcactctaccaaatcaggcgtcactcatttcactgccaaaaccgaagaagaaggtttcgcattaatccgcaaactgttgagctatattcctcaaaataatcttgaagaagctccgtatgtggattgcacagacccaatcgatcgtctggaagattctttgaatgatattattcccgatagtccgactaagccgtatgatatgtacgaagtgatcggagccatcgtagataacggagaattcctggaaatccaaaaagattatgctaagaatattatcatcggtttcgcacgtttcaacggacagtcagtaggtatcgttgccaaccagccgaaatatctggcaggtgtgctcgatagcaacgcatctcgtaagggtgcacgtttcgtccgtttctgcgatgcgttcaatatacctatcgtatcgctggtagatgtaccgggattccttccgggaacaggccaggaatacaacggtgtaatcctgcacggtgctaaattattatatgcatacggtgaggctaccgtacctaaagtaactattactttgcgtaagtcctacggaggttctcatattgtgatgagttgtaagcagcttcgcggtgacatgaattatgcatggccgactgctgaaatcgcagtaatgggtggtgccggagcagtagaggtattatatgcacgcgaagctaaagatcaggagaatcccgctcaattcctagccgagaaagaagcagaatacacgaaattgtttgctaatccttataatgccgctaaatacggttacattgacgatgtgattgagccacgtaacacacgtttccgtgttattcgcgctttacaacagttgcagactaagaaactgaccaatccggctaagaagcatggaaatattccgttgtaatccaacttttcacattaaaacaagaacgattatgaataaaaccaaaatcggaatattcctttctctgctattactgatcgggctcacttcttgtggagagaaaaagtcgaacagcaagctggtactgaacgaagtcctgatagacaaccaaagtaattttcaggatgactacggactgcacagcgcatggattgaaatattcaataaatcattcggtagcgccgatctggcagcttgcttactgaaagtgagcaaccaaccgggcgatacagttacttactttattccgaaaggtgacgtactgacactgataaagccgcgtcaacatgcccttttctgggcagacggcgagcctaaccgtggtactttccacacaagttgcaagctgaatccggaagccgccaattggatcgggttatttgactccggtaaaaagttaatcgacgaggttgtgatacccgccggtgttttaggccctaaccaatcgtatgcacgtgttagcgacggagcagcagaatgggaagtgaaaggtggaagcagtgacaaatatgttacaccgagcacaaataaccaaactcttgacagcaatgccaagatggaaaaattcgaagaacatgactcggttggtatcggcatgtccatttcagccatgagcgtagtattctgcggacttatccttctgtatatcgctttcaaagtagtaggtaaagtcgccgtcaacctgagtaagcgtaatacaatgaaatccaaaggaatcgacaagcatgaagccaaagagttgtcacaagctccgggcgaagtttatgccgctatttctatggcattgcacgaaatgcaggatgaagtacatgatgtagaagaaactgtactgaccattactcgcgtaaaacggagctattcaccgtggagttcaaagatttatactttgcgcgaaactcctcccagaaagtaagtcaccttataaaaagtaaaaacgatgaaagaatataaatataaaatcaacggtaacttatataaagtaaccatcggagatattgaagataatatcgctcacgtagaagtgaacggtacgcattataaagtggaaatggaaaagaagcccaaagcagccgtaaaacctgtggtagtacgtcctatgcctaatgcaccggccgctcctactcaggtggtgaaaccggccgctccagcttccggaaaatcaggcgtcaaatctccacttccgggtgttatcctcgatattaaagttaatgtaggagatgcagtaaagaaaggacagaccatcattatattggaagccatgaaaatggaaaacaatatcaatgctgacaaagacggtaagattactgcaatcaacgtaaacaagggagattctgttcttgaaggtactgacctcgtaattatcgaataatatgggagatttcataaactttttaggaaacaacctagccgacttctggacctacacaggctttgccaacgctacgacaggacacatagtcatgattcttgtcggcttggggtttatctatttggcagtagccaaagagttcgagccgatgttgctgattcctatcggattcggtatactgatcggtaatatacctttcaatatggatgccggactgaaagtcggtatttatgaagaaggttcagttttgaatatattgtatcaaggagtgacatccggatggtatccgccgcttattttcttaggcattggggctatgacggacttctccgcactcatctctaacccgaaattgatgttgatcggtgcagcagcacaattcggtatcttcggtgcgtacatgattgcattggaaatgggattcgatcccatgcaagccggagcaatcggtatcattggtggtgcagacggtccgacagccatattcttgtcttccaaactagcacctaatttaatgggagccattgctgtatccgcctactcttatatggcactggttccggtgatacagccacctatcatgcgtctgctcaccaccaagagcgagcgtgttatccgtatgaagccgccacgcgctgtttctcatacggaaaaagtgattttcccaattatcggtctgttgctgacttgtttcctggttccttccggtttgcctttgttaggtatgctgttcttcggtaacctattgaaagagagtggagtgacacgtcgtctagccaatacggcaagtggtccgctgattgatacgatcactattctgttagggttgacagtgggtgcttctacgcaagcttccgagttcttgactttcgattctatcaagattttcgcactcggtgcattgtcatttatcatcgcaacagcttcaggcgtaatcttcgtaaagatattcaatctcttcctgaagaaaggcaataagattaatccgttaatcggtaatgcaggcgtatctgccgttcccgactctgcacgtatctcacaagttatcggtttggaatacgatccgaccaattacctgctgatgcacgctatgggtccgaacgtagccggagttatcggttctgcagttgctgccggtatcctgcttggattcttaatgtaaaatcacgatttaaagaaaatcataaaactagaaaaggctgcaacataatggttgcagccttttcttatatatttatattggaataatctgattactgagccaatttgttgtcagaaccgagcacgttaaggattttgtgcttgtacaatttttccatattgtcacgagccggaccaagatatttacgcgggtcgaattcagccggtttttcagcaaataccttacgtacagcagcagtcatagccaaacgagagtctgagtcgatattgattttgcaaactgcagatttagcagccttacgcaattcttcttcaggaataccgatagcagctttcaaagcaccaccatatttattgatagtttccacttcttcttcaggaactgaagatgatccgtgaagaacgattgggaatcccggaagtttttccattacagcgtccaatacttcgaatgccaatggaggaggaaccatacgacctgttttcggatcgatatgacattgttccggagtaaatttgtaagcaccgtgagaagtaccgattgaaatagccaaagagtcgcaacctgtacgagtagcaaaatcgattacttcttcagggtcagtatatgtgtggtggtcagcagaaacttcatcttctacacctgccaatacgccaagttcgccttcaactgtcacatcaaactggtgtgcgtaatcaactactttcttagtcaatgcaacgttttcttcgtaaggaagatgagaaccgtcgatcattactgaagagaaacctgaatcaatgcaagatttgcaagtttcgaaagtatctccatgatcaaggtggagaacgatttccggatgtgcgcaacctaattctttagcatattctacagcaccctgagccatgtaacgcaataaagtagcgttagcatactgacgagcacctttagatacctgaagaatcacaggagatttagtttcaacagcagccttgatgatagcttgcatctgttccatattgttgaagttgaatgccgggatagcatatccacctttgatagccttagcaaacatttctctcgtgtttaccaatcctaaatctttgtaatttaccattttgtttaaagtttattgttagtgaataaaaattctacgcaaaagtaagcattatccaccgaataacgaacatcggaaagaaaaatatagtagaaaaaggtttaaatagaacatctatttcttgccggaaagcaaggtagacattagattgtaatgtctaccttgcaaataaataactaaaagacaaataataactcttcgggcaaatacaccttattatataataggcaatgcgtcataaacaaaagtttttcagcaaaacctttttctatttcacagaaaagcattatctttgcgcactgaaaatgaccattacactatttcttaccaaaatagtaacagaatataaattaaaaaacagatactgaaatgaaaaaaggccttcatccagaatcataccgtccggtagtattcaaagatatgtcaaatggtgacatgtttttgtctaaatcaacagtagcaactaaagaaaccatcgagttcgaaggtgaaacttatccgttgctgaagattgaaatctctaacacttctcacccgttctatacaggtaaatctactttggtagacactgcaggtcgtgttgataagttcatgagccgttacggtgaccgtaagaagaaataattcgatctttcgttaaagatgaaaagaggggattctcagcagggaatttcctctttttcattttaaactacatagagagaacagaaaaatcttaaaaaatatcagcgtacacagtttttaccgaataaagaaactacctttgttagataataaacaaactaaagtaatggaaataacccaattagaacaaatgactaaagaagaagttctcaattttatcagaaagcgcctttctttcggttcggaaataaaaaggcaactcaaacatgtggacgaggatgatttcagcaaagagcatcgtaggttcgaaatgtccggctgtgaacagactacaggatggtgcactcttttcaacactgctatcttaaatgaatttgccaatttaggtatctacgattatacctcttatctttttctcgatttcgacaaaggtactccaactgtctacctcaagtactacgatgaaaatgaaaacctggaatatgatcttaatggttatacaacgacagaaatcatattcaccatttttgaactcacaatcttttccggaagatcgaaaagaccgagaagttaaaacctaaatctttcggttttcccgaacattcatatccataagttgtttattctctgtaataaagagaaacgaaccaacgcaaaaactctaaacatcagtatggtatatgaagaagaaatatggattcgtcctgatagctgcaattttactggcaagctgcggacagaaaaaagagacgaagacaacaacaagtcgtcccgtaaagactgcaattgttgagtctagatcgattatcagaaaagatttttcgggaattgtagaagcagtagaatatgtaaaactggcattccgtgtcagtggacagatcattcaattgcccgtcatcgagggagaaaaagtaaagaagggacaactgatcgcagccattgatcccagagatattgcattacaatatgccgcaaccaaatctgcttacgaaacggcagctgcacaggtagaacgtaacaaacggcttctctcccgccaagcgatctctgtgcaggaatatgaaatcagccttgccaactatcagaaagcaaaatccgaatatgagttgtccgtcaataatatgcgcgacacaaaactgatagctcctttcgacggctccatcgaaaaacgtctggtagaaaactatcagcgtgtcaactccggagaaggtatcgtgcaactagtcaacacacgtaatctgcgtatcaaattcaccataccggatgtctatctctatctacttcgcactaaagatcctcgttttctagtagaattcgacacattcagaggacatatctttcaggcaaaattagaagaataccttgacatatcaacagacggcacgggaatcccggtcagcataacaattgatgatccgtctttcgatcgagatctttatgctgtgaaaccgggctttacgtgtagcatacgtttcacggccgatgtcggtccattggtacaggacagttggacaatcgtaccgctcagcgccatatttggcgaaagtgaagggaagaaaatgtatgtctgggtagtggaaggcaacaaagtacacaaacgtgaagtgactgtcaatgcacctaccggagaagctcaagtactaatctcagaaggtctgaaacccggagaaaagatcattatcgcaggcgtataccagttagtagaaggagaaaccgtaaaagaaatcgagaaatgaacttagctaaatattcattagacaacacgaaaatcatctatttctttcttgcagtattgctaatcgggggaatcacttccttcggtaagctaggaaagaaagaggatgctccgttcgtcatcaagtcggcggttatcatgacccgttatccgggtgccgaaccggctgaagtagaacgactgattaccgaacctatctcccgtgagattcaaagtatgagtggcgtatataagattaaatcagaatctatgtacggactctctaaaattacatttgaactgcaaccttcattagcagccaattccattccccaaaaatgggatgaattgcgacgaaaggtgctcaatatacaaccccagttgccaagtggcgcatctaccccgaccgtttctgatgattttggcgatgtattcggcatttattacggactgacggcagatgaaggttattcttacgaagagatgcgcaattgggctgaacggattaaaacacaggtagtcacagcagatggagtgatgaaagttgccctattcggagtacagacagaggtagtgaatatctatatctcaaccaacaaattagttggcatgggtatcgatccgaaacaacttgcaagtctgctgcaatcacaaaaccagattatcaataccggagaaatccgagccggcgaacagcagttgcgggtaacagccaacggtatgtatactactgttgacgacatccgcaaccaagtaattacaacaaaagccggacaagtgaaactgggtgacatcgctgtaatagagaaaggatatatggatccgccgtccaacatcatgcacgtaaacggcaaacgtgccatcggtatcggtgtatcgaccgacccgcaacgagatgttgtacagacaggagaaaatgtaaaaaacaaacttaacgaattgttgccactcatgcccgtaggtctggagttgcagagcctatatctggaaaatgaaatagccaacgaagccaacaacggattcatcatcaacctaatcgaatctattctgattgtaattgtaattattatgctggtaatgggcttacgcgccggtgtactaatcggctcgtcacttattttttccatcggtgggacgctactcatcatgtctttcttcggtgtaggactgaatcgtacctcccttgccggattcattattgctatgggaatgttggtggataacgccattgtggtaacagacaatgcacaaatcgctattgcacgtggggtaaatcgaagaaaggccctaatagatggcgctaccggccctcaatggggattactcggagctacattcattgccatttgttcattcttaccgctttatctcgctccttcttctgtggcggagatagtaaaaccgcttttcgtggtgctcgccatatctttgggattgagttgggtacttgctctcacgcagaccacagtattcggtaattttatcctgaaagcaaaagtaaacgatggagcaaaagatccatacgataaaccgttctaccacaagttcgcttccatcctacgtgcactgattcgcagaaaagcgttaacattaggttcgatggtggtactgttcattatctcgctggttatcatgggaacaatgccacaaaacttcttcccttctttggacaaaccctatttccgagcagacgtattctatcctgatgggtatagcatccaagatgtcgtgaaagaaatgaaatcggtagaagaccatttagcgaagcaaccggaagtaaaaaaggtatcaatcacttttggaagcaccccgctaaggtattacctggcttccacttcggtaggtcccaaaccgaattttgccaatatattagttgaattgacggatagcaagtatacgaaagaatatgaagagaatttcgacggatatatgaaagccaactatccgaatgcaatcacccgtaccagcctgttcaaactatctcccgcagtagatgcagctatcgagataggctttataggaccgaatgtagatacactcgtggcactcaccaatcaagcactggagattatgcatcaaaactcggatttaattaatatccgaaactcatggggaaataaaatccccgtatggaaaccggtgtatagtccggaacgggcacaacctctaggagtctcccgacaaggaatggctcaaagcattcagatcggtaccaccggaatgacattaggggaatacaggcaaggagaccaagtgcttcctatattattgaaagataatacagtggactcatttcgtatcaatgacttgcgtaccctacccgtattcggtaccggaaatgaaacaaccagtttggaacaagtggtatcggattttgatttccaataccgattctcgaatgtaaaggattacaaccgtcagatggtaatgatggcacaatgcgacccacgtcggggagtaaatgcaattgccgctttcaaccaggtgtggtctcaggtacagaaagaaattaaagtcccggaaggatatacaatgaagtacttcggagaacaggaaagtcaagtcgaatcaaatgaggcgttggctaaaaatttaccgctgactttcttcctgatgtttgtaaccttgctgttcttattcaagacatatcgcaaaccgaccgtaattctattgatgttaccactgatcttcattggtatcgtattgggattattagtacttggcaaatcgttcgacttcttttccattctcggtttactaggattgattggaatgaatatcaaaaacgcgattgtactcgtcgaacagatagacttggaaacagctatgggtaaaaagcctttagaagctgtagtcagtgctacaaccagtcgtatcgtacccgtagcgatggcttccggaacaacaattttgggaatgttaccgctactatttgatgcgatgttcggaggtatggcggctacgattatgggaggattgttggtagcttcagctctgacgctattcgttcttccggtggcctattgctctatccaaagaatcaaaaactaaatataacccttatttagacagaagaaataaattacaatgaataaaatgagaactcaactaataactctgtctctgctgctccttagtcttacagccgaggcacaacacccctttctcagccgggaagcgtaccgggataaagtggaagcttatagtcaaatactcaagcaacagaaactaaaaactatagcaagtgcggaggcacgtaagattgctcataccggtttcctgcccaaaatcgatatcaatgcggacggtacactcaatatgagtgatcttaaagcatggaacgagccattaggggaataccgtaaccacacctatcaaggagtattcgtcgtctcgcaacctctttatacaggaggagcactcaacgctcaacacaagattaccaaagcggatgaaaaactcggcctgctcaatgaggaaatgacaatcgaccaaattcattatcagagcgatgcagtctattggaatgcgtctgcttcacaagcaatgctgcaagctgccgataaatatcaacatatcgtaaaacagcaatatgatattattctagatcgtttcaatgatggaatgattagccgtacagacctactcatgatttccacccggctaaaagaagctgaacttcaatatatcaaagcccgtcagaattacacgttggcattgcagaaattgaatattttgatgggaatagatcccaacacccccgtagacagtctttatactattgacaagacttctgctcctatacaaattctttctcttgaaaatgtattgcaacgacgtgcggattatgaaagtacggaagtgaacatcatgaaaagtcaggcgcaacgtaaagccgcattaagtcaattcaatcctcagttgagtatgtatttcagtggtggatgggcaactggcacgcccaatctcggatatgatgtctcattcaatcctattgtcggcattaatcttaatatcccaattttcagatggggcgcccgtttcaagacgaaccgccaacaaaaagcatttatcggaatacagaagttacaacaaagctatgtgacggataatattaacgaagaactttcagccgcacttactaagttgacagaaacggaatatcaggtgaagacagccacaaaaacgatgaatctggctaatgaaaatctcgacctggtttctttctcttacaacgagggaaaagcaaatatggtagacgtattatccgcacagctatcatggacacaagcacatacaaacttgattaatgcatacttatcagaaaagatggcaatagcggaatacagaagagttatcagtgaataataaaaaccaaattttaaagaggatgtaaattaaactgtgtcagcaaagatt

SEQ ID NO: 11723 - DNA, 23152 bp, Unknown
  gut microbiota DNA sequence
ggtttttggctattatccggatgtagttacacatcccagttcggaaagtgaaattctgaagttactatcagacagctacctatataaagatattttagattgggaacacatcaaaaaggcagacaagattgtaaaactccttcaagcactggcttttcaaataggctctgaagtctcttataataaattactccggagaatatagaagattttttattgtaaaacagcaatatgaacctctctttcatcgcctgtgacatttttgtagttattctaagtattatagggggaaatacaaaaatgttgcaatcctcattatcaaaagtttaagttacaaaacaggggtaaaatagaataagtttacaaaaaacaacaggatgttttcgcttttttccaagagaaaagtgcattttttcattagtgcattacagttgtgtaaccgataagttacacttgtctttccatatggttacacaacagcaactagtcgattactcaactccaactcattaactctatcagacgaacttatcaaaagaccaagatgttttgcataatacaagtagacgagattattaatactacagcacaattttacaaaatgcaacggccttttccacgtatcaaacaggaacattgcacaaaattgaaatactattcaataaaattatccataatcaggctactttactccatatatttgcagagaaataaatcagtactcagaaattgcgtaaactaataattaatactatgagcttcagtaataaattaggtatccacatattgttatttcttatcgccacgtttatagcgtgcactgacaacgacattcaggaaaataataataatcttcctccaaaagacgagccaacccctcctcaggaagaggccgaagaacatttatttgatattctcaatcttgattatccgggattagaagaaataaaatctttatataaaagcggtgagaatgatgcagcaatgcaaaagttacttacctactacagaagcagaacggccattgaaaaccctaatctgactgctactcttaatgacacggagcaaggttatgccgattatgccatagacgaatatcgtttttacgtcaatgacaattacttagaagacaaagaccggaaaattccatattcactgaaaagtaacgaccaaacgattaattggcaatttgctcccgaaggtgctgataatgaatatcaaaagcagttacatcgccataattggataccgatgcagggcaaagcctatcaaaaatccaagaatgaaaaatatatgctttcatggaaagaagtatatacagattggatactcaaaaatccaaagccgaatgggaaaccggacaaattccaatggcaccagctccaaatgtccacacgtattatggggcaaacagaatctttcgagtatttcaaatcctcctctcatttcactccggaatggctttcctttttcctcatacattttgctgaacatgccgattatctatccatgtacaaatattccggagaaaacaatattctactaagccaggcagtagcattggtatttgccggaacattgtttccggaacttaagaacgccccacaatggcagaaaataggatgtgagattataaatgatcaaactacaaagttatttttggaagatggaatgactaacgatctctctcttcattatcatataggcatagtagacggactttatgatctcaaacggcttatccaactgaataaattgccggacaatctgctctcaccacagctcgatgaaacgcttttgaaagccaccaaaattgtcatgcacttcacatacccaagttattttaagaaaggaagcaaacagtgcagtcccgcattcaatgattcatggataaaaacacgcagtgtattaaacaaaaactttgtgaagtatgcggcaatgtttccggaagattctgaattaaagtatatgcaaacgtatggtaatgaaggcactcttcccgacagcagaatcaaaacattcgaagattccggattttatgtattgcgcaacggttggacaccagagtctacaatgctgatacttagcaataacatatcttccaagttacaagactcaagccataaccaacttgataacggaacattcgagttatatcataacggtcgtaatttctttccggactccggagtatgttcatatatgaaagaggatgatgcagaagtaatgaaactacgcagatggtttcggcagaccaaagcgcacaatacaatggtactgggaaaatctgaagatcacgaagatatcggtgccgaaaatatcagcaaggcagaaggcaagttactactatgtgaagaaaatgccgaccaacaactcatagttaccgaaaatcaaggatacaatgatttcaaacaccgccgtgctgttttttatgtaaaacaaccgaccgaatttttcgtattggtagatgaaggatttggcacagcaaccggttatgctaagttatatttccatctttgcgatgaaacatctgtaaataatgttattctggacagtcaagaggcaggcgcacatactacctttgaaaacaataacttattaatccgaagctttggaaatcaggccatcaccctaaagccttttgatggacggatatcttatcagaccgacagaaaatactcaacaagaaaagcctattcacttgttatgaagaaacaaagaagtatccccgtgcgatacattaccatactatatccggtcagtaaggtttccaatcaaaagatcagtgcaaaatttactgatgacccgtcaaactcaaaccatgtttctattgaagtgactatcggtaatcaggtatatccactaagctttcaactcaaacactaaaagttatgcaaaaatatattcaagcaattagttggaatttattatttttattcctatgtttgttagcaacctgtaaatctctcgttaaccttataaaacacaaaaatggcactatgaatattcaacacagatactataactgtatccttctgcttttaatctgccttcgtagtgcggatatttattctatggatatcaagcagaatataaattggcctcaatttatgagtcagcaggatatgatatgggaaagattaccggaatattggtatgactcagcctatctaggtaacggcagattgggactaatgatctacaaagaaccgaataaaaactatatacgcctggaaacaggaaactgtgatgtacacgatcatcgtgcaaaaagagatgtattcggaattccccgactacttactgggcattttgctttacaccctaaaggagaaataatcagcggcaagatgcgtcttgatctttggaacgcagaggcttcaactgaaatcaccactacaaaaggaattatccatctacaaactttcgttcatgctgatgatatgatcatcgtagttaaagcaactaccgaaggagatgaacatgactttcgatgggaatggatagctgctgaagctaacagcccgcgttatctattattcaaaaggcaaggaaaaacgaataagatccccgaaggttacgaactcaatccttcccctactaacagcaaagaaaatgagataaacttatctatacaagaattattggcaggaggagaaacaaccgtaggatggcaagagacaaaaacgtctccacaagaaagaatcttatggataaatcttacacacacttatccacaaagtacttcaaaaaagatttgtaaagcagaaatacgccaagccatacgtaaaggttatgcagcacttcaaaatgctcatcggcaatggtggaactcttattatcccgctagtttcatcagcttaccggatgcaaagaaagaaaatttctactggattcaaatgtataaactagcctcagctactcgtggcgaccgggcattaatagataacaccggtccgtggttatctgaaacaccgtggccaaatgcttggtggaacctcaacgtgcaactcacctactgggcactgaatgcttccgaccatttggatttagccgcatctctagagaatgcactctataatcacattgaccaactacgcttgaacatacctgccgcatatcgtcacaactcattgggcataggtgttgcttcaaatctagaatgcatgacgaccactgtaggaattcccggtaaaggaaaagcgcaagtgggacttcttccttgggcctgccataatctttggcttatttatcgtcataaaatggatgatgaagttttgcgtaacaaattgttcccgttattaaaaggggccatcaattactatcttcatttcatccaaaaaggagaagacggcaaatatcatctacctgaaacttattctcccgaatatggtgtaacggaagactgtaactttgatctcgcactattatattggggttgtcagaccttattggggtcagcacagcgattacagattcaagatccactaatttcaacctggaaaaatgttttggataatctcactccgtatccgatggatgaaaacgggttacttattggaaaagacacaccttatgctttctcccacaggcattattcacacttgctttccatctatcctttataccttattaataaggagcaaccaaacaatacccgacttatagagaaatcattagccttttggcaaagtaagccgaaagctcttttaggttactcatgtacaggtgcatcttctatatcttccgctattggaaaaggaaacgaggctctatcctatctaaataaattatttggcaagttccttagttcgaccaccatgtataaagaaagcggcccggttatcgagacgccactatcaggcgcacaatgtatacatgatatgttaatacaaagttggggagggaaactccgtattttccctgcactgccggacgtttggaaagatgtctgcttctccggtttacgcacagaaggagcattcaaagtttctgctaacagaaagaatgggaaaacactgtttatccacatcaaaagtcttgcaggagaaccatgtatcgtaactaccgacattgttaatcccatattcaaagggaaacgggcgtttactgtacaaactaccaacaacggcacataccaaatcaatttaaagaaaggagaagaagtttttatctatcctcaaggacagattccggacttcataatctcccctattccacctgtttccaaaaatcactttggactaaaaaacgtccaaaccaacacctaaaaatgtacaaaagccttcctctatatatgtacgaggaggttacattataacatacaaaagacctattttcaagtcataaacagttcttttgaacataaatagtatatgattcaacaaaactaatatcaaaaaaacatttttgaacaaagcctgaacaacttcggccaatcgttatatataaagagattacatttgcaaacagtaaaatataacttttaataattaaaacctaataaagtatgaagaacatcttctttatttgcgtgttctcactgattgcatttacaggatgcacagatgacgacgaactctacaaaaacagtggaaaagattctgccgaagaggaaacaagttttcctaacgaggaaatcgaccaacgtttgtttaaagttatcaatttagattatccgggattggaacaggtaaaagcatggtatgaaacaggaaattattactctgcatccaaagctctactcgaatactatagaggtcgaattggtatcattaatccttatgtatccttaaattctattacaacacaacaagcaagatacgcagaattagcattagcagaaaacggttatcgtttttatataaatgccaattacttagaagaaaaagatcttggaaatggcaaagaaaaagttccgtacagcctaaaatcgggaaaagagatcaattgggagtttattcccaaaggtgctgacgacgaataccgtaagcagttacatcggcacaattggattccattccaagccatggcatatcaaaagacacaagatgaaatatatatgttgggatggaaagacgtgtattcagattgggtatcaaaattccctaaaacagaaacagttgtagatgaatttgcatggtggcaattacaagtatctacacgtctaatggggcaagcacaagcatttgaatatttcaagttttcatccaatttcaccccccaatggctttctttctttttagttcactttgcagaacatgccgatttcttgctaaaaaatcgctatccagacgaaaataatattctatttagccaaataatctcaatggtatttgccggaactctatttccggaattcaaagatgctcctcaatggcaagcagaaggttgtagaatcattaatgaacaacttgaaaaacaattcttaccggacggaatgcttagtgacctttccttacattatcacataggtatattagacgaactctataatctcaaaaggctcatccaagagaatcatttaccggaaaatttactcacttccaagtttgaccaaatcctagagaaagcgaccgaaatagttatacattttacctatcccaactattttgaggcaggtagcaatgaatattgtacatctgctttcaatgattcgtggatgaaaacgaaaaatgtattagagaaaaacttcaagaaatatgctgagatgttccccaataatcaagaattagcgtggatggcaactcgtggtggacaaggacatgcaccaagcgcaggaataaaagttttcgagaactccggacactatattctacgaaatggatgggataaaacttccactatgctaatacatagtaataactattcaaatgaaaagatggatatatggagtcacaatcaaccggataacggaacatttgaattatatcataatgggcgtaactttttccctgattccggagtatcttcttatggaggtagtggaactcctaataatattcgcagttggttccgtcaaacaaaatctcataacacaatgattctaagcgataaagaaacagaagacaatgatgaacctaatgcaaaaagatatggagatgaagatataaaaaacaccttaggtaaattaatccgtaaaggagaaactaaccaatatcaatttgtagccacagagaatcaaggatatgccaactttactcatagacgttctatattctttgtcacgcctaaagaaaaaccattttttgtaatagtagatgaaggtataggaaacgcaaccggatttagtaaactatatttccatctctgtgacgataaaacagcagaatctgtttctttagatatagaaaaccacggagcacatactacatttagtgacaataacaacttattcatacgtagttttggtaatgcagatatcacccaaaatgaagtcaaaggatatatttcctacgacaccaaaggtttattccttccccgtaaggcttactcactcgtaatggataaaaaagagaatagtccggtacgatatataaccgtaatatatcccgtcgcaaacgaaacacctgaaatctcggccagattcactgatgatgaaacatttattgaggatgcaataaagctcgaggtcacagtaaatggtcagagatatgaattaggatacactaaataatcaacctataataatataactaatactgatataaaatgagtctaagaaaattaacatttagttttttggcgattctaatagttacagtttcaccgctgttctatgtttcttgttctgatacagaaacaacagactcgtccaacttcgcactttattatacaggattgaccaacatagctccatctatgaccggaacaatcagtaaacctacatataaaggtagtgccccttctgattttacaattaccggtatcacacttaacaatgaagtgtatacaggaaattgttttcagattgattctgaaacaggagtaatttctgtgcaaaacacagaaaatgcagctaaaggacgctacaaaatttccatctcttgcatatccggagggactcgatatgaatataaagatattgtaattgttaaattattagcatccgctcctaaaaacgtaatagtcactcccaagctaatacaggctgattacggggatatcattaacaaaaatagtgaaattgatatgcccatagcaaaaataacaacaactggtgaagaacatatttccatcagttcatacactgtttctgatgtattcaaaatcaccaatgagaatacagaagaagaacctatttacgaattagtgacaacagaaggtgttaaagaatgtttcagtatctcccaagaaggagaatttactattgtacaagatgaaaaatcaggaatcttagagccaggcaccttatatgcggttagtattttattatcaacccgtacagatgaatatttattggatgaaaaaaatagtattaacattaaagtaacatctaagccacttaatttttcctatgaccccgctgaaggagagttagaagaagaaagtacagctacaccagaaggaacaactttcgaatcggtacttccaacgtatcaaggagctacagatggattaaaatatagtatttacgcaattgaacctgccatcgaacaagaaataattaaaattaatgaaaatacaggtaaactatatgtagaagctgggcacggattacaaaaaggaacaacctataagatcagtgtttgtgcaagaaatatgtacaatgaagaaggagaggtaggaacagttattgaaaacgcctattctttaaaaatagtagcatttattgcaaaattcgatcaattttattacgaaaatgaaacaaatacaattgaaagaatggagcttagtccttcatataccatagagccaactatagtaggtggaggtgaaaatattaaatatacacttattgaatgtgaaccagagttacaaaaaaacattgaatttaatacaacaacaggtgctatcactatgaaagagggaaataaactagtgataaatgatgaaggtaaagactcttatacaatgaaagtcaaagttgctaattcaaaatatgaaaaagaagccaatataactttcaaactaactcaaaatgaagataggattacatacattcattgtggtaataatttagatacgaacggtaatgcattaccgggaattcaatacgaaaatcaatttagattcaatagtgaagatgatatgaatagaaccttcactataaaaaccaatgcttattccactgctaagattacatttaaatacgaaaaactttctacatcagtaactgcaaatatcaccaataatgaaattacattctctggttggaaaggagatgcagcaacatccaatatcggaattattactgcaactgtaaatgataagacagaacttaaggtccctgttttcttccatttcaacaattggacaaaatacaatcaagataatgtcaaaatcgaatattatccctttgtattacatgttaatccacataaaggaggaatatcaacatctcctaaaataatccttaaaggaaaatctgacagtgaactttcaggtgatgtgcgtaaaaaattcttattagactaccgtagaaacttcaactactacaattttggaggtaatcatactaatggtgtaccttatgaccaaaaaaatccagataaaatttcaccattcatggctcatttatgggagacttgtggacaaaaaaataatgcaaacaaaccaccgatggcattcttcacaaacagtggatacaaagataacagctctcaatccttaggttatgtaattaattacaatccgaatactatagaatacaaaaaccatgaacattcagtgaatatcattaaagatatgtggaaagatagcgagggatatgctaatggatttatagcagcagaaatgactttttgtactgatggtataataggaaatgtcaacagtggaggtaaagtaacaccactaatcatctggtttgatgaaaattacgaagagtaaaacgaataatctaataattatgcacaatataataaccaatacaattagccatagagggttcatcaccctcttggcactggtcatgtcaatcagtctgtatgcccagaatttagttaaaggaacagttgttgacgaaacagatcttccgttaattggagcaactgttttaataaaaggaaatagcggaggaacaattactgatattgatggcaattattctatcaatgccaaaaaaggaagcaccattgtggtttcctatatcggatataaaacacaggaagtgaaatataccggacagcaaaaagtaaacataaaaatgatacctgacaatcaagcattagacgaggtagtagtagtaggttacggttctatgaaacgcagcgacttgaccggttcagttgcttcggtagccgcaaaagacgttgtaggttttcaaagcagttctgtcattggagctttaggaggccaaattgccggtgtacaaattactcaatccgatggtggccccggatcaggtttcaacatcaacattcgtggtgtcggtactatgacgggagacgcttcccccctgttcattgttgacggatttgaagtagacaacattgataacattgccaactcggacattgagtctatggaatttttaaaagacgcctcttcttcagcaatttatggtgcccgtgctgccaatggtgttgttatgattactaccaaatccggaaaaagcggacggccaacagttacatacaacggttccgccagttatcgtaagatcactaaaaaattagatcttctcagcccttatgagtttgtaaaattgcaaggagaaattaacgaaaaatatccggatacatattataaagaaggaaatgatgacaatggcattccataccgttatcaatcattagaggattatattggtcaaagtggagtagactggcaggatgaaacatttaatcccacttggtcacaagatcacaacctttcaatcacaggtggagacgaaaagaccacatattctcttttattcacacgttataacgaaaatggtattttcaataacagtggatttgacaggacaacagccaaattccgcttaaagcaaaagcttaccaaaaaaatatcatttgatgcaactataaattatgcgcaaacaaatagaaaaggaattggaacaactgcggatagcggacgctttaatatgctggcacaaattttaagcgcacgtcctacaggtgggcttaaattaacagatgaagaattgctggcatctgcaatcgatcctgtaatgttggaagatggaagcagtctggcacaagtaaatcctgtaaaacagacagagtctgtaaccaataaaaaaagagcggaaatgtggtctgccaatgtctctctgacttgggaaattattaaaggattgactttcagaacagcagcaacttataataccacaaacaatcgcattgacaaattctataaagagggttcaaaagaagcattccgtaatggtcaaaagccttacggagacacccaaatgggacgtgatttacgttggaccaattcaaaccagttaacttggaaacaaaaaatcaacaaaaagaacagctatgatatcatgttaggacatgaaatatcttatcgtagcaatgaatatttgttagggcaggcaatggactttcctgttgactatttaggtaacaacaatttagggttgggagctaccccaagtaaagtcgtcacagactttggtgacaaaaagttgttgtctttctttgcacgtggtaattacaactatgacaatcgttacttattgacggccacggtacgtgccgatggttctactgtattctcaaagaaaaacaaatggggattcttcccttcattctcggcagcgtggcgtgtctcagaagaagcctttatgaaagatatttcatggttgtctaattttaaggttcgtttgggatggggtatcgttggtaacgaccgaatctctaattatctctcacttgatttatatcaaaataatagatatggtatcggtaacagtttagtaactgtacttacccctaaacaaattaaaaatcaaaatttgaaatgggaaggctcgtccagtgtcaatttaggagtagatttaggcttctttgacagccgtttaaacttcactgctgatttcttcatcaaaaacacaaaagacttgttgttagctcaagaattagcacatgttaccggacatagtacccaataccaaaatattggtaaaatacagaatcgcggtatagagttaaatcttagcagtactaacattcagacgaaatcattcacatggagtaccaatttcaatatttcatttattcgtaatgaactgaaatcattagagtccggtgctaattataaaacaacccgttccggtttcgacggtaacttcacccaagatgactacatagctatggtgggttcatcattaggcttgatttacgggtatgaatttgatggtatctaccaaagttctgacttttacatagatgggtatacagacgcgaacaatcctaaatatattttaaaggaaggagtagtaaataatactcgctatactgatgcagatggtttacgtcctggcgttgtaaaatataaagatcagaatggtgatggcattattacttcagaagaccgtacagtaataggtaacgcacttcctaaatggtatggtggtattacaaatacattcaactatagaggaatagatttaagtttcatgttccagttcaattatgggaatgacatctataatgctacacgtttgtatgccacacaaactagaaatggccgtagaaacatgatggcagaagtagccgatcgttggagtgaaacaaatgcatctaataaagtaccttcggttaaaggttatataacaaatgatgtatattctcgttttgtagaagatggttccttcttacgtttgaagaatgttactctcggatacacgttaccgcataaatggactaagaaattttatgtatctaaattacgtgtttacgccagtggacaaaatctattctgcatcaatggatacagtggatatgatccggaagttagtacggcaggaagtaatcctatgacaccaggtttagactggggtgcttatcctaagagtagagtatttacattcggtattgatcttcaattctaataaagaacgcaatgaaaaagatattttattatatattattgtcagcgatgtgcatacttcctttctcatgctcgcttgacgaagaatctcggacagagattgataaaaatagattcatgaaaaacgccttagaagcggaaactgtattgttaggcgtttatcaaagtttagtgagtgatgccatgtatggctatcacctctcaattctgttcaatctggcaacagattgtgaacaagtagaaggaagtactactgaaaattaccgtatcattccttccaatgcttttaatgcaagccaagcagaaatacaacaaacatgggctgctttatataaagctatttataatgcgaatgatttcatggagattcttcaacaacggatgaacgatttcaatgaaaccgacaagcaattggcttatatttacatagccgaggcaagagctattcgtggtatgtgctatttcgagttagtacgcagatttggtaatgtgccattaatgactaatacagcaatgtccgaacaagctccaagtactttcgttcaggaaaaacctgaaactatttataaatttattgaagaagacttgttatatgctatacaaacacttccttatgcaatagacgatacaaatcgccaaagcaataaataccgtatgtccaagggagctgctttaggcctattaaccaaagtctatgccacatgggccggatatccggttaaagatcacactaaatgggcagaggcagccaaaactgcgaaggtgctggtcgaatcacaaaaacatgatttgttaaatgactttaaacaattatgggaaaatacttgtaatggtgtttgggatcctactgaaagtttaattgaaatcagtttctacagtccgacagcatccggaggcgccagtgacccgtgcggacgcattggaaaatggaatggagtaaaaacgacaatgcttgcaggagaacgtggaagttgcgcaggtaatgttaaggttattcatcctttcgttctgaaatggagagaaaaggacttgacagacggtgaggtatataatccggaaaccgttaaagacaaacgcctgaacctttcagtagcaaattaccaatatagtccaaacaaagttttatatgctaaaggtaaaagtgatactgataaaaaagcattggaaaatgatgcagatagtaaattaaagaacaaagaaaaacaaaactacacccccgccaaatgggacattgaaaaatacgtaaagaataaattaatcaataatgacaaatcaaatgtcaactggtatttcttacgttatgctgatgtattactgctatatgcagaagctctcaacgaatggaagcaaggcccgactaaagaggcatacgatgctataaacaaagtacgtgaacgtgcctatggaaacaacaaatataatttaaagaacttatcttacgaagacttccgcaaagctattcaagacgaacgcgcttatgaacttgcattcgaaggacaccgccgtatggacttagtacgttgggacatctactataaaactgttaaagaaacatccaatgcaatcacagagtggttctttgatgataatatggccaaaaacaaagcatataataccgcaggaagatatacagtgtttggcaaacatgaactttatcctatcccacaacgtgatatggacttatgtgaacagtttgtacaaaatcctaaatggaactgatcccaattctctccaatatgcctgattatagggcatattggagaatattaaaacctttttcaacaaaatctaaatttgaaaagccttaattgaatgtcttttcgacaatcttgtaacgcgaaattagagctttcacctacttttgcatcagttacaaaacttctaaaaacaatcacttaaaatgaataacatgaaaaagaaactcgttctctttgcttcggttacaattgcgcttgcatcgtgccaaacagcccctaaggaagactacagttggataaaaaaaggactggatgtagcttctgcacaattacagctttccgcagaggaaattaatggcacaggtatgttgccgcgttctatccgcacaggctatgacatggcgtttctttgccgtcaattagaaagagactcactgactttcaaagactcacttcgcgcacaaccgactgcagagcaattaggtaaacgccgtctctgtggcgtttatgactggacaagcggtttctttcctggttctttatggtacgcatacgaactgacaggaaacgatactctgaaagcacaagccattcaatatacaaatctcttgaatcctgtacgctattacaaaggcacacacgatttaggcttcatgatcaattgcagttatggcaatgctgaacgtctggcccctaacgatactatcgcagctgtgatgaaagaaactgccgacaacctctgcggacgtttcaacgattctatcgccgctatccgttcatgggatttcggaacatggaacttcccggttatcatcgacaacatgatgaacctcgaccttctgtttaacgtagcaaaagcaacaggtgacaacaaatataaagatattgccgttaaacacgccatgactaccatgaacaaccatttccgtccggattatacttgctggcatgtagtgagctacaacaacgacggaacagtagaacgcaaacagactcatcaaggcaagaacgatgattcttcatgggcacgcggccaggcatgggctgtatatggttacacagcttgctaccgtgaaacaaacgacactactttcttgaactttgcagtgaaagtagccaacatgataatggatcgtgtgaagactgacgacgctattccttattgggactatgacgctcctgtgacagaagagactccgcgtgatgcatccgccgccgctgttactgcttctgcattaatcgagttgagcactatggttcccgacggacagaaatatctggattacgcagaaaagattctgaagagtttgtcaagcgatgcataccttgcaaaagttggcgacaatcaaggatttatcctattgcactctgtcggctcattacctaacggttctgaaatagacactccactgaactatgccgactactactatctggaagcattgaagagattcatggagttgaagaagttgagaattgagaatggagagttgagagtgattcaataatataagagtaagaatccaatagtaaattttaaaatcgtaaagtatatcatgaataaaactttaaaatatatcgtcctactgacatttgcatgtctcgtaggcaaaggttatgcccaagagttgaaaagcgaagtattttcacttctcaatctggactatccgggactggaaaaagtgaaagcacttcatcaggaaggtaaaaatgcggatgcagccaaagctttgcttgattactatcgcgcacgtacaaacgtaaaaactccggatatcaatctgaacaaaatcactatcggtaaagaagaacagaaatgggcagacgacgcgctgcaacatactttctttgtacacaaaggttatcaaccttcttataattatggagaagacatcaactggcaatattggccggtgaaagataacgaactccgttggcagttgcaccgtcacaaatggttcactccgatgggtaaggcttaccgtgtatccggtgatgagaaatatgccaaagaatgggctcatcagtacatcgactggataaaaaagaatccgttggtgaagatggataaaaaagaatatgaaatgttgagtgacagcaaacttaaaggtgaagtggaaaacgtacgttttgcatggcgtccgttggaagtgagcaaccgtctgcaagatcaaacctcacaattccagctgttcctcccctctccttccttcactccagatttcctaactgagttcttggtgaactatcacaaacacgctgtacatattttgggtaattactcagatcaaggtaaccacttgttgtttgaagctcagcgtatgatttatgccggtgctttcttccctgaattcaaggacgctccggcatggagaaagagcggcattgatatcctgaaccgtgaaattcatgtacaggtatatgaagatgggggacaattcgagcttgacccgcattatcatcttgccgcaatcaatatcttctgtaaagcactaggtatcgcagacgcaaacggattccgcaaagaattcccacaagactatttggatactatcgaaagcatgattatgttctatgcaaacatctcctttcccgactacacaaatccgtgtttcagtgacgcaaaactgacaacaaagaaggaagtggtgaagaactacaaatcatggagcaaattattcccgaaaaaccaggctatcaaatacttcgcaacagaaggtaaagaaggtgcattgccggattatatgtctaaaggattcttgaaatcaggtttcttcgtattccgcaactcttggggaacggacgctactcaaatggtggtaaaagccggtccgaaagctttctggcactgccaaccggacaacggtacattcgaactatggttcaatggcaaaaatctgttcccggattcaggttcgtatgtgtatgcaggcgaaggtgaagtaatggaacaacgcaattggcaccgtcagacttgtgttcacaacactgtgactctgaacaacaaaaatctggatacaacagaatctgtaactaagttatggcagccggaaggaacaatccagacgttggtgactgaaaacccaagctacaaaaacttgaagcaccgtcgttccgttttcttcgtcgacaacacatactttgtaattgtagacgaattggcaggcagcgccaaaggttccatcaaccttcattatcaaatgccgaagggagaaatcgcaaacagtcgcgaagacatgacattccttactcagttcgaggatggaagcaacatgaaactgcaatgtttcggtcctatcggcatgactatgaaaaaagaaccgggatggtgttctacagcttaccgcaaacgttacaaacgtatgaatgtatcattcaacgtgaagaaagacggcgaagaagctgtacgttatatcactgtgatctatccggtaaagaaaagcgcagatgcccctaaatttgacgctaaattcaagaacaaagcgttcgatgaaaatggtctggaagtagaagtgaaagtaaacggaaagaaacagtcactaaaatacaaaatatagtaattgatgaaaaccccctctaccctattcctcccgttggctgcattaagccttgcttcatgcggtggtcaaaagaaggaagaagccaaacagccgaacatcattttcatgatgacggatgaccataccactcaggcaatgtcatgctatggaggaaatctgatccagactcctaacatggaccggattgccaacgaaggtatccgtttcgataattgttatgctgtcaacgctctctccggtccttcacgtgcttgtatcctgaccggtaagttcagtcacgagaacggctttaccgataatgccagcactttcaacggtgaccagcagacatttccaaagcttcttcaacaagccggatatcagactgccatgatcggcaagtggcaccttatcagtgagccgcaaggtttcgaccattggagcatccttagcggtcagcatgaacaaggcgactattacgatcctgacttctgggaagacggtaaacatatcgttgaaaaaggatatgcaacagacattatcacagataaagccatcaaattcctcgaaggccgcgacaagagcaaaccgttctgcatgatgtatcatcagaaagcaccgcaccgcaactggatgcctgctccccgctatctgggtatcttcaacaatactacctttcccgaacctgccaacttgttcgacgactacgaaggacgtggaagagcggctcgtgaacaggatatgtctatcgaacacactttgactgacgactgggatctcaaactgctgactcgtgaagaaatgctgaaagatactaccaaccgtctttacagtgtgtacaaacgtatgcctgcagaagtacaggacaaatgggattctgtgtatgcacaacgtatcgcagaatatcgtaagggcgacttgaaaggcaaagagttgatcagttggaaataccaacagtatatgcgcgattatctggctaccacattggcagtagacgagaacatcggtcgcctgatgaattatctcgaaaatattggtgagctggacaatacaattattgtctatacctccgatcaaggcttcttcctcggtgaacatggctggttcgacaaacgcttcatgtatgaagaatgccagcgtatgccgcttatcatccgttatccgaaggcaatcaaagcaggaagcgtaagcaatgcgatcagcatgaatgttgactttgcccctactttcctcgactttgccggagtggaaataccatcggatattcaaggtgcctcgctgaaaccgatattggtgaacgaaggcaaaactcctgccgactggcgaaaagcagcttattatcattattatgaatatcctgccgagcactctgtaaaacgccattacggtatccgtacccaagatttcaaactgattcatttctacaacgacattgatgaatgggaaatgtacgacatgaaagccgaccccagagaaatgaataatgttttcggcaaaccggaatatgcagaaaaacaaaaggaactgatgcaacttcttgaggagactcaaaaacagtacaaagacaccgatcctgatgagaaagagaaagttcttttcaaaggggatcgccgactaatgaaaaacagataaactaattactaaaaccatggatagaagaaagttcttaaaaaacacaggctggtctttcctcggattggcagcttcgggcagcttattgggtgcttgtgcaccgggcagcaaagatgcaaagaaaatcatgccatcggcaagcgacctcaaaatgtattggggagacttacataaccactgtaacatcacatacggacacggcgatatgcgcgacgcttttgaagcagcaaaaggacaattggattttgtcagcgtcaccccccatgccatgtggccggatattcccggagctgacgatcctcgtctgaaatgggtaatcgattatcatacaggtgctttcaaacgtttgcgtgaaggtggttacgagaaatatgtagccatgacaaacgaatacaataaagaaggtgaattcctcgcttttatcggctacgaagctcacagcatggaacatggtgaccatgtggcattgaactatgacctggatgcaccgcttgttgaatgtacttctattgaggactggaaacaaaaagccaaaggacataaagtatttatcactccgcaccacatgggttatcaaggtggttatcgtggctacaactggaaatgtttcaccgaaggagatcagactccgttcgtagagatgtattcccgtcacggtctggcggaaagtgatcagggagattatccgtatctgcatgatatgggacctcgccaatgggaaggaaccattcaatacggtcttgagttaggcaataagttcggtatcatggcttctaccgaccagcattccggttatccgggaagttacggagacggacgcatcggagtgcttgctccatcgttaacccgtgatgcaatctgggacgcactccgtacccgccacgtatgcgccgcaacaggtgataagattcttatcgatttccggttgaatgacgcctttatgggagatgtagttcgcggaaacagccgacgcatctatgtgaatgtaaccggtgaaagctgtatcgactatgtagatattataaagaacggtcagattctggcccgcatgaacggtccgttgactccggttgctccggaaggtgacacggtacgttgcaaagtgaagatggatttcggttggaaccgcgaagaacaatatgtacactggcagggtaaactgtctttggataaaggaaaattgcacggtgtaactccttgcttccgtggtgcggccttcacttctccgcaagaaggtgaaacagaattccacacacacgtcaaccgcatcgtttccgtgaacgacaaggaaaccgaactggatatgtacagcagcaagaatccgaatactaccacagcggctatgcaggctgtaatacttgatgtggaaatgccgaaagacggtaagattatcgcagaattcaatggcaagaagtttgaacatacattaggtgaactgcttgaaggttcacgttcacactttatgatcggctggttgagcgaagcgatcctcttcaaccgcgctatgccggaaagttgcttcacggtagaacattacatggaggataaagagcctcaacgtgatacggattattactatgtacgcgcccgtcaacgcgacggacaatgggcgtggagttcaccgatctgggcagaaagagtgtaaatcaagtattaaaatgatatggaaaaagaatacgctataggaattgaccttggcggaacttcagtgaaatacgcccttattgataatgaaggcgtatttcattttcaagggaagttgccgtcgaaagccgatgtatcggcagaagcggtcatcggacagttggttgccgccattaatgaagtgaaggcttttgcaaaagaacaggattataagattaacggtataggaatcggaacaccgggtatcgtagattgtacgaaccggatcgttctgggaggtgcggagaacatcaagggatgggaaaacctatgtttggcagaccgcattgaagcagaaaccggcattccggttttattgggaaatgacgctaacctgatgggactaggtgaaactatgtacggggcaggcaaaggagcgactcatgttgttttcttaacggtaggaaccggtatcggcggtgcagttgttatcgacggtaaattattcaacggttttgccaatcggggaacggaattagggcacgtacccttaatagccaatggagagccctgcgcttgtggttctgtcggctgtctggagcactatgcttctacttccgctctcgtacgacgtttcagtaaacgaatagcagaagccggtatctcctacccgggcgaagaaatcaacggtgaattgattgtgcgtctttacaaacaaggcgataagattgccaccgaatcactgaaagaacattgcgattttctgggacacggtattgccggattcatcaatacgttcagccctcagaagattgtgatcggcggaggcctttccgaagccggtgatttttatatccggaaggtaagtgaaaaagcacaccgttatgctatctccgactgtgccgtgaatacggaaatcatggctgccgcattaggcaataaggcaggaagtatcggggccgcttccctcttctttaatggaaagttaaaagttgaataaactctcgacttccaattgtcaactttcaacttattcaaaattatgaaaagaaatataggaatgctggtgctgataatggcgttttggttcacaatctcgttatcactaatattctgggaccacttattccggacatcattcacaacttcaatttaaatgacctggcaatggcgggttttatcccgacctctttctttctggcttatgccatcatgtccattcccgccgggttactgatcgaccgtttcggtgaaaagccggtattgttcggcggattcctaatgccgtttatcggaacgattctgtttgcttgtatgcatacctatccgatgttgctggcttcttccttcatcatcggcttggggatggctatgctgcaaacggtactgaatccgcttcaacgtactgtgggaggggaagagaactat

SEQ ID NO: 11724 - DNA, 47679 bp, Unknown
  gut microbiota DNA sequence
ttgttaacgcggcctaccatgtaaacaacctttccttcggtccggaatacttcatcccgaaaccggtagacccacgcctcatcacagaggtgtcttgcgctgtagcaaaagctgcgatggaaagtggagtagcccgtacggaaatcaaggactgggacgcatactgtgtacatctgcgcgaattaatgggttacgaatccaaactgacccgccaactgtatgatactgcccgccgcaacccgcaacgtgttgtatttgcagaagggatccaccccaatatgctgaaagctgccgttgaagcaaaatcggaaggtatctgtcatcctatcttattaggaaacgatgaggctatcggtaaattagcagaggagctggacctaagcttggaaggtatcgagattgtaaatctccgccatccggacgagtcggaacgccgcgaacgttatgcccgtattttagccgaaaaacgtgcacgcgaaggctttacttatgaagaagccaacgataaaatgttcgagcgcaactacttcggtatgatgatggtagaaaccggagacgctgatgcgttcatcaccggactttatacaagatacagcaacacaatcaaggttgccaaagaagtgatcggcatccaaccgggattcaaacatttcggaaccatgcacatactgaactccaagaagggtacctacttcctggcagatacattaattaaccgccaccccgataccgacacattgattgatatagccaagctgtccgacaaaacagtccgtttcttcaaccatactccggtaatggccatgctatcctactctaatttcggtgctgatacaacaggaagccctgtaaaagtgcatgaagccgtaaattatatgcagaaagagtatccggaattggctatcgacggtgaaatgcaggtaaacttcgccatgaaccgcgaattgcgtgataccaagtatccgttcacccgtctgaaaggaaaagatgtaaatacattgattttcccgaacctgagttcagcgaatgccggttacaaactgctgcaagcaatggatccggatacggaatttatcggccctatccaaatgggattgaacaaaccgatccatttcaccgatttcgaaagctctgtacgtgacatcgttaatattacagctgtagcggtaattgacgctatcgtagacaagaagaaaaaagaaggctaatgagaagaccgttatccaaatcacaaatagtttgcattagcctgctttggttggcgctttgctatttagttctcacaaaagccgaacggatcgatgggatgacagtagtaatgcttgtcatttcggcagcattagtattcattcctgtttataagtcgataaaaaggaataaataaatatcttttttcctatttttaatgcgataaaatatcaaatttgatattttatcgcatttttctttataaaatgtttgctagtttaatttttatctttacttttgcaaccgcataagagaaatagataatcgaattttaaacaaccaataaaagaaaaaaagattatgaatgcagcaaaggtattagacgatctgaaaagaagatttcccaatgaaccggagtatcatcaagcagtagaagaagtactttcgactattgaggaagaatacaacaaacaccctgagttcgataaagtaaacttgatcgaacgtttgtgtatccctgatagagtatatcagttccgcgtgacttggatggatgataaaggtaacattcagactaacatgggttaccgtgttcaacataacaacgcgattggcccgtacaaaggcggtatccgtttccactcatccgtgaatctttctatcttgaagttccttgcctttgaacagacattcaaaaactcactgaccacattgcctatgggtggcggtaaaggtggttccgacttctctccccgtggtaaatcaaacgcagaagtaatgcgcttcgtgcaagctttcatgttggaattgtggcgtcacatcggtcctgagacggacgttcctgccggtgatatcggtgtaggtggccgcgaggtaggtttcatgttcggtatgtacaagaaactgactcacgaattcactggaacattcacaggtaaaggccgcgaattcggaggttcactgattcgtccggaagcaacaggttacggtaacatttacttcctgatggaaatgctgaaaaccaaaggtactgacttgaaaggtaagacttgcttgatttccggttccggtaacgttgctcaatacactgcagaaaaggttcttgaacttggcggtaaggttctgactatgtctgactctgacggttacgtttatgatccggacggtatcgaccgtgagaaactggattacatcatggaattgaagaatctgtatcgtggccgtatccgtgaatacgcagaaaaatatggctgcaaatatgtagaaggtgctcgtccttggggtgagaaagcagatatcgctctgccttctgcaactcagaatgaattgaacggtgatgatgctaagaaattggttgctaacggtgtgatagctgtatccgaaggtgctaacatgccttctactccggaagctatccgcgtattccaagaagccaaaatcctttatgctccgggtaaagctgccaatgcaggtggtgtatcagtatccggtcttgaaatgactcagaactctatcaaactgagctggagctctgaagaagtagacgagaagttgaagagcattatgaagaatatccatgcagcttgcgttcaatacggtactgaagctgacggatacgtaaactatgtgaaaggtgctaacgtagccggattcatgaaggttgccaaagcaatgatggcacaaggtatcgtataatcagccacagatataaataagctatagttaaaaactcccgccttccgaaaggaagaacgggagttttttatgcacaaacaatttgtacgacacccgggtgtcgtgcatactgagacccgggtgtcagcatacatgagacccgggtgttggtatgcctgagacccgggtgtcgtcacaactatctttgcatgctcttttaatagtattcatctctttggaaaaaataaaaatctaatcattataatcatattccaaagtaaagtcatctacccacatcacactttgatcactaccgaaaaagtagtctccatatttactggacgaacatactaccaatatatagttaggaacccgattggtgtcacgatattccaattcaacctcaaaaggttcaaagttattaattgtttttccctgagtaaattctccgtaggcaatgacgtgaggatcattctgatcgaacattttacgtttactggaagtcttagcagtgataatatctatcggagcatcccaatctcccaaagcaacccaaatgatgcaagtatcatctttatcctttaataaaggatatagttcatcatacttatccgaatctttatccatttgattaaccgggccagtagtatatttataatatcccgtcaacctcgtgggacgctcggtaaacggacgaccaaattttaaatgtccatctgtaaaactaccttcagcaaaatcgtaccaataaccggcaaacagatttccggcagcaaatttgataacagcatacatagattccatctttacggaagttcccgtctgtccattccaagtattcgttccgtctggtgtcgttatactccggagaatggaagctcccttgttaccacttccccaaaactcctcaccaccttctgcccaaaaattataaactttgcctttcaaatgccattcatcaaacttagcattcggcaattgtttggctattccagtagtaaaaggcaactcctcactataatcctcacctgaatacgcacgacaaacataagtcgtttgttccttcaaatgcggtatgcgagcggaaaaggctgcaccatccgctgtaatatatgaattatcaactttcctccactcttcggttgtggtttctcgaatctcaaatccattatcagaaccttctataccctccgcatacagccatgccacgtttacccaaccgtctgcgcgcttcatttccacatctttatctttccgataaacacgaagctcccaattttcttcaaagaaatcctgatattgcacctttacctgtgcagaggcataattggaatagagtgtccattttagttccggcacttccgtttttccattatatgttgtacccttcggccctaatttcagctccaagaggtctagttctttccatttagtatttttcctcacattggcaatagcaactttcgtatccggatttatctcagacagtcctacttggtttgccattttaaatatacgtacaatatcttgctgagcaataactttccatcgatattcctgataaagagataatatcacctcataaggattagttaaatctattatatcttgtggagcaagtgtactcttagctccctctgtcaccgaaagcttagtcacatgaacttttcgcagattgacattctcttccaatttcaaagtcacagtgcggtctttctccgagattaccgcattttctttttgtccctctacttgcattccggttatggacaaagctatttgtggataatcgatatcatttttgatacacccctgtaataaagtaatcacagcagcacctagcaataaattatatatagcccgcattttcattacatacaaaaggttaaacctatatttatattaaaaagatttatcttaaaattggcgccgctgtctctacgtttaccctcttcacccagattattcttttgtttctctgtacgatatttaaatccgacaacgccaaaggataattcagcacaaacattttgcgtaataaataccgccaatccgggattaatgcccaagtgcaactcatttatcgttgtgtcagtgcgtttaaattcttcaccttctccacgtgagaaactagaagaacctcgtttgtaagtcagcgtagtctcattaaacaagccgaaaagtttaccacggtcaagccctacatatgagcgatgaaatatgccgatcgatcgtaaattttccgtataacggatattgtctaatgagaaattcaaatcatcatcaatattcaacgacacattacccaaatcagcaatcgtatgactataacctagtttcataccgacaatcaaattatccgccaacgcatatccgacgaacggattaacagagaacgttttgaaattacaatcaaaatctttcaatattgagaataacagtctactgtcatcactgtcaaaattaacataagagaaagtcaaaccgcccatccattttttcttcggaataaaacgatagctgatgataccacggtcgtaacgtccgatcggtttgattcgaatcagtccggtattgtcttccacaatatccttttccgcatgcacctgctccaactccgccttatccacatatacggtatcatgtattacaatggtatcccgctgctgtgcccggatctcctgtatgccaaccaacagaatgacagcacatatatagattaatctactactcattttctcctttttttataaatagaatgcaatacctaaaccaatggaaaacaggttaatcttgaaatttgccgaactggaggaacgttcaccgacatacacttggtctgttgtttgtttcaccttgctgaagtcaagtccaagaactccgacactgacttccacagcagtataattattaataaaagcaacaattccaggtgcaactcctaatccgaaatcagcagtagtcgaataagtaccgctcaattttccaccattcttcgttactactttcgactggcttcctcccatctcaagacgtgtctctgcaaaaagagcaaatcgcttactagtacctatatttatatagttcctcagaatactaatcacgctataagaatgtttcaactgatataggtcatttacatcaaaattagtatcatcatccagattcaatgtcaccccatccaattttgtcagcgtacgtccgtacgaaaaacgtcctccggcagccaaattatctttcaaagcataacaaaacataggacttaccttaaacgtgtatccgtcagaattaaaaccatcaacaatcagaaattgataattttgttcattatgctcggaataagaaacagagcttcctacaatccactgccctttcggaacaaatgttcgaggttctatattgcgtttaaactcttgtgcctgagcagttatcccccagataaacaacaagaataataatatttttttcactctataatcattataagtttattcttccaattcactctcgtcatataccaatttcaagttgtctaaccacatagaactgccggtacttccctcaaaataatctccgtatttactcgccgaagccaccactacaatacttgtaggaatacgttcaagactgtaattcaaacggataacaaagggatgcatattctcaccttcggtagacgaatcccatgtctgttcaccataagctataacgttatctcctttcggatcaaaaaaagtagcagcatctctcgtatccacaatcaacggccaagtttctccaccgtaagtttgtccttcccagtctcctagtgctataaacacttgccctttgtcttgttctccattttcgatatactttcctccgttatctacagttcccgaagtataacgtatatatccggtcaatgcaactggacgggaggtaaacgaacgtccccatcccaaaattccattcattttttgtgtatccaaatacttaccgatgaacagatttcctgcggcaaacttaataactatttttttagactgtaatttcgcagaatacttgccttccactttcacagaagaatccgctgttgtcaaatctgtagcaaaagcagaaacagaagaggaaccatgattaccactatcccaaaagaaatcactgcttgaagccgcaatatacataggcttacttcccgaccactcctcaaatccacaattctccaattggagcgtcttttctgtcgtgaactgacattttacattggatgccattgccccctccataacttgatattcatattctgagaaaagttcattatcactattcttcaatccagtcacctcagcagtaagtacagaaccgtttcgtaccgcaggcaccgtctgccattcagtagttcccactttccggtagcggaatgacaattctgattgtggttctcgttccggcagcacttcaccgaacaaagtcgcctttgttgcccatataagatatttcttatcatccggaatagcgactgtttgtacagcaatatcagaagccacaatttgccagtctactatacgctgatagcctctctggtctgttacagaaaaacgaatactacgtgtaccattctccgctgtatatttccggattagtgaagcggaaagatttatatccatagcatgccccaaagaagcttcttttttatcgatcgtgattccgccatttgcgagcagatcttcttcctcagttgtcagatttttcaagtcaaaagtctgttgcgcagtaggtgcaccaagaaaatccggaaactgttcagaggctatttcaatctgcgtcagttttgtagaaccctttatcatcaccgtcatatcctctccatcacctattttcatgtatgcaggttgtgtcaagactaaattttgtccccccatttcagctttaactgacggtcggcgataaatcgtctcttctgtttccacttctccaataggagttacatccaccaccaaatttatcattccccctccggtatccggcacttccacttccgattccttaaattcataagtcaagttgtaaagtgtagccgacaccacatcgggaatcgtatctatatgtacaaacggtgctccggtaagcttattggttgcctcaaatgtacaaaatagcgtatcgcaagcaacaggaacagagaaatatcctaattttccgacatcatctgccgtaaaatcaagaattccattttcagcctttacagccacccccaccatgcaattttcaaaataaggattcattgtctctgcaaaagctacagtagccactgtattacctacattagccacgacatcaacttttacatctgccccttttgttatagtaaaagactttataccctcataaaatttcttatcgaatgatgcagaaaccacctctccagctgtcacctttacttggtaatcaccggaagcaagcaaaatatcatcaggtacattttctactccttgatacttacgtaccagtttcaaatcctctttttcacgttggtagatacgaaccttacagtctttctccaagatagcttgttcttccgatgtaagagcacgggtagctactactttcaaatcattcttcatcccaatagacaaccgaagactcccctcaccatcagtcgcagtatattcgtcacgctgacatcctgtgaaaaagaaaagaagtaataaccaatataaataatattcttttatcttcatttcttacctatttattcttttatagtaaatgttaacgtcttcgatacactctgccctttccgatcaattaaagtaatatggaatttgtgtggtttctcacttggaaaattcctcaataacggtgtaaattgagtaattacaaaatccaactccgtttttcctacaacctgctcttccacaggaaaaccgagacttgtcaatgtttccttatattctcccggttcagccaaatcaaaagttccagcttcaccaaacatcattttgatagcatctccaaacaaatcatcacccgcttctatttgcacattcacatgtccgatagtttccgacgcattaagtttcacaataatctccaatgggttctcttcagtcacagtctcatcaagaacgtaatcaaactttttgcaggtaatcgtaggctctccgtccacatcacccccaccatccgggaaatcatctatttccggttcgtcaggacgaacaccaccatttatattttccacatcacagctattgtccactttcacagaagcattagcatcacctccagtattcggatcaccgtcagcatcgctcaatttataagtcatggttacaagataaccgattgatacaccggataccgaacgcgtattcactgtctgtacttcatcttttattccatcttccgttagagtgctcaaaaatttgaaatcgacaatattaccgctttcattggcaggaaaataagcagcacgtacttcatctcccatcttaaacgtaagttgatcattgctatttattgttaccgtaacttcggtatcgtctcccaaaagcggtttcaattcgtccgtataacctatttttaccataatacaatgcaacttgcactctatcttagcaacattggtcacttgatctttttgtatctcaatactctgcgaaccttgacaataaggaacatcaaacactggttctcctccatctggagaatgggctatgattttgtatttgccgactttcaattgaaatatttcaggcatatcactatacttccattcggaaattaaagttgttccgtcttcattgtaaataccaacgatataactaccagcatctactgtgacagcacgagacagtggtgtcgcatttacatccacagaaagttgcatggaggacaattgaatttgtccataaccatccgattcgttgccgaagtccatcttttcacgatcgcaagcagagaggatgaaaaggcttgctacaaatattgctaatatttttattttaactaattgtttcatattcatcaattcactttaattcattatttagcatactctaaatgtacatcatctattactaagacatttcctataccacgagtatcggcattaccactccaagtattaatctctccactatattctttaatagccggactagaagaggttgatgacaaaaacacgatagatatatgtgtcggttgtaattcttcatttgaataggatatatttaaagtagccttatcagtgttagttgtcgataaattcatatatccatttcctaaattaacaatattatctccttctctatgttctatttgaatcgaagcggaagcagcttctccattatatgagtaaaaacgataattaaaagtcatttgcgtagggcgagaagcaaaagtatgtccatgaacttctcctgttgatatatcatattttccaatatacaaagtgctagatgttttcttgttacaactcaaacctccccaaggtaatcctgttgtacaggtactgccttccccccatccaatagttgctatttctgcggaatatgaaccattaattggagatgtagataatttcattctagtactagccgaccaagaagaattcacataagtagttcctggatatgctacataataataagagtaaatgcctgctttagctgtagtcaaatcattctgtgtactccaccaaggatccaaatcactatcctcataagggtaaaaagtataaatatctatgctgccaggttttcctgttcctttccacacaaacttctcactccacgtttcaaaatccgaattaggaatctgcaattctgcttccgtctcaatactcaattgattcgaagcccctacaatatcaccttcttcatcttttttggtaaattgataagtgtagccggtagccggaattaaattagtcaaagaaatggtagaaccagacaaaggacaatttatagcattccatacaccatcatttccgtcattatccttctgagagcataggaaattccatccatctacattgccttttaactgcaacgtagcctgtttcgtccaaacatctcctggatactgcaaactaagtaccacaggatctcccatagccgaattcaatgtccctttacgtcgcaaataccgagcctccatctgaatatcagcatattgggattcatcaaacttaaacagcaaatcatgtgatgttccattcgactttatggaacttggcactacttgctgttctgtctcgcctttcttcaaccaataggtcaccttggcgggatcaccgtcaagagtcaaattagccttcatctttgtcgtaccataaagaactgattgtcctgcactcaccgcaaacagattatccttactggaaactctaaatttcaatggttccacattctctttagacaatttatcagtagcccgcagttcaaaaagatgttctgtaccctcttccgtatattccaaaaaaggtactacatttgtaaagtcaatctttgcaatcttatcttttttgtcacccaatcctgccatctgaaaccctaacttctgcattgcgctcagactttctgcagacacactagtcaagtccacagtttcaggccatccttgttcgatcaacgaaaaagaatgggtcgtcaaataacaatgagctattccaccggctgcattcaaataagcatacacttctgaagcttccgctgattttccttcaacaacgtcaatcggttggtcatcattaaacccatttgctgtaaaataaggtgccggagcacttaaagcctcatccgaaacagtgattttcacaggttcctgattaggaatatcatcactaaatgatatattaatagaaggagtacctgcatccaaatcaagtgtcagaatataggcatggcgagcttcaagagcataatcctcaccaactttcaaagttacttcctgtgaataaccctccttcttttttaccttcacacgtacttgtacttctcccggcttgaaataggcataacgtgtttcatcagaaacatagttcactgtattgccaagcgaagtagtgacttcagccgtatactcagaaaagtagtccttaaattcatctgtatagacaatcgacaatttagcatttgccagataacaggtcacttccacagtggtggtctgtccccgctttataacaaacggctgatttccctcataataaggcaactcgaaaccttcattattgacatcgccatacgaagccttcgctacatagttattaccagaccgaagagtcaactcatcatcagccaaaaactcagctaatgtagcccactctccacgaagagtttctcctttaaatatagaaaaagagaaatcattgacatcgggcacttcctgttctattccatcattaacccgagtatttgttcccactaatacttcggcatttgcactaacttgtacacgtaatgttccatttccttcacttccctcatcacgttccgaagaacaagaaaaaaagaaaggtaggagacatacacaaaaagccagttttactaattgtctgttactcatctctctagaatctctttatatcttaaaaaacgaccgcaaaaatacagttttctttctttataataaagtatccaaagaaagatttatcccgaaatatgaaaatgagaacacaattagcctgcccgaccttaaaaaaaggccatatttttaagcctatcacaaaagaatttcaccttttagatgaaaaacagaacgttaccccctacatttattgaatataagacctattgattcagacacgagtgttattttttttaatagactcataatataattatagttcctctttatttccaccaatttcatttttatataaagccacctatactcccggcatcagcaccaccccaagtttcttctttccatccatcttgaccactatcggtttctcaaagcggacatggcggaggaacttcgtttcttccacagccggttgcgcattgaggaactcttggttgtagacaccatcattcataaaggcattgatcgtgaagtaacccactccgaacgaggtaagattctggaagaaatgcgtaccctggctgggatcaacgcggtaattagtcagtcccgcctccactatcacacgggctgccgagatgtgcggccacttcaccggaatacccagccacgtgtcgctgcttccccaacgtccgggaccgacaagcacatagttcttcccctcgttcaagaactgctgattgatcttttctatctcccaagcaatagcctgattattggaagcactgtagccgtctgtcttcacatagacaacatcctgaatctcgttcataatgccatgtcccagcgaattatacgagcgaagaatcacctcatcatccggtatatcgttcaaatcctcatccagcatctccttgctatccacaatcggacggatctgcaaaagatagaaagtacccgtcttatcctgatcacgacttaacgttgccgcaaactcaatctcaaccggacgacgcatctcctgttccccgtatttcaaaaccaactgtaaaatacgagccaacgggaaaacatcatgttgcaggatattagcaaacgtgatcaccttgcgtcctcccggatacaaaccatcccggattatctggtcgtacgggtcgtatgtagaagcgatatactgcaaagcaccgtcattttccgcctctttcacatgaagtttcaacagattaaagccgtcatcgatcgaaaagtcatgccctgcattcttcaagtccaacgcatagaaacgggtctgagtctctttcaaagctatttccatctcgctggtctgtaacacctgattgggatgataaggagaaaaacgaagtgtcataccgccatccacaatatattttcccaatccaagagccagattcaccgttccttcctccgccttttcatcacccagcggataataattgagcgagcgtgccacaccggacatggaaggataataacgttctccgtattgattaccaacgacttcctgcaaaataacagccatcttttcctggtctatcacgttcgacgtagcttgcatataagccttgctgtcacggaagtataccgaagcatacactcccttgatggcatcggaaagcatacgcagcatctcatagcgatcgtccagataaggaatcatatacgtattgtaaatccccgcaaacggctgataatgggaatcttccaacagagacgaagaacggatggcaattggtgacttcaccacatcaaagaaagtaaagaagtcttccaccaaccggtccggcaacttcgctttcaggaaatacctcagaatcaaatcatcatccgcatccgaaagggcaatctgatacagattgttcgtgtccataaactcatcgaacacatccgtacaaagcaccaccgtcttgggaatggctacccgtgcattctcaaactcatcaaactccggatgacgcttcaccatgttatctatgaaagccagtccgcgccctttacctccgagcgaaccgtcaccgatacgggcaaaattggaataacggtcgaaacggtcccgtttaaagacggcaacgactccctgattcttcatcttgcgatatttcacgatcgcctcaaaaatgatgcggcgatgggcgtccacatcctgaagactgctccatgttatcggtttcaaaaactccgccacgggaaacatagcccgcgaataaagccagcgggacacatgattacggctaatgtgatataagaatgattccgcaggaacggcaaacagaatattctgcaactctttcagattccgtacacgggcaatctcctcccccgtctccggattacggaaaacaaaatcaccgaaaccgaagttatcggaaacaatacggcgcaggtctacatccatcttcttggaattcttgtcaataaagctggctccgtactttgccgcataggaagcattctccgactcggaagactggataatcaagggtacgaacggatcattcttacgtatctcggcacatagcttgatacccgccagaccgtctttctctccccgctccaccttcgggaaacgtacatccgtgatcacccccaatatattattctgatacttacgataaatattcattgcctcctgatacgtacgcgccaacacgattttaggccgtccgcgcatacgaagcgtacgctggtgtgcattcagagcctccgtagagaactcctgactctgcttcaacacgaacttatacagattgggaagaatggaagaatagaagcgaatgccgtcttccacaacaagtatcaactgtactcctacctcctgcacgtcatgctccagattcatcttgtcctccatcagcttaatgatagaaaccagcaaatcggtattgcccagccagcagaaaacgtactcgaaagcactcagatcctcattgataatccgtttggtaataccgtgactgaaaggagtcagaatgacgataggaatgtgttcatatttctccttgatatgccgtccgatgtcgaaactgtcattatctcccgtgctcggcatacaaatcaccaggtcgaatgacatactttccaactgcgccaatgcctcctcttcggtagacacctgcgagaaacggggcggataacgcagagagagcgaagtatattcattaaaaatcttctcatcgatacgtccgtcatcttcgagcatgaaagcgtcgtacgggttggctatcagcagcacgttgaaaattcgccgggtcatcaaattggcgaactgggtatctttgaagtaaagctggtttaatttatatttactaagcatagaattattctcctttcttataccaaatcgtcttgtttcaaaatcacattttgcaaagttaattctttaaatctcattttccatcatcttctttataaagtttacttgtttatctcttattattttgtagttttgtaccaataagtttattcaaaaagactttttattcacatgaaaaaagtaactttattaatgagtggaatcatggtaatgtcatgcgctccccaacaaaaaaagccggtctaccccgagacggcaaaagtagacactgtagacgtgtatttcggtacgcaagttcccgacccttacagatggttggaaaatgataccagcgcagctaccaccgcttgggtagaagcgcagaacaaagtgacaaatgagtatctgagccaaatacctttccgggagaacctcttgaaacggctgacggaactggctgattacgagaagatcagcgctcctgtcaagaaacacggcaaatattatttcagcaagaacgatggtttgcagaatcaaagcgtgttctacgtacaagattcattggacggcgagcctcgcgtgttcctcgaccccaacaaattgtcggatgacggcacagtggccctcacgggactttatttctcacacgatggcaaatacaccgcgtacaccatctcgcgaagcggctccgactggtctgaaatctacgtgatggacaccgaaagcggcaagttgctcgaagaccacatcgaatgggccaaattcaccgacgctgcctggcagggagacggattctattatagtgcttacgatgctccgaccaaaggaaaagagttctccaacgtgaacgagaatcataagatctattaccacaagatcggcgaaccccaatcgaaagacaagctgatttaccagaatccggcttatccgaaacgtttctacacctccggcaccagcgaggatgaacgtattctattcctgaccgaatccggagccggaagagggaacaacctgttcatacgggatttgaaaaagcccgcctctcctttcatccagctcaccaccgacctcgattaccaatattacccaattgaagtaatcggcgactggatttatatctacaccaactacggagcaccgaaaaaccggattatggtggcggacatcaaccgtccgaaactggaagactggaaagaactcgtacccgaatcggaagcagtgctctccaacgcggaagtgatcggtggcaaactgttcctcacatacgacaaagacgcctccaatcacgcatacgtttacgacctcgacggcaagcagttgcaggaaatcgaactgccctcgctcggttcggtaggattcagcggcaacaaggacgacaaggaatgcttcttcggatttacctcgttcaccattcccggcgctacctataaatatgatatggacaagaacagctacgaactgtaccgtgccccgaaagtgcagttcaactcggacgacttcgtaacggaacaggtgtttttccccagcaaggacggtgtgaagattccgatgttccttacttataagaaagacttgaagaaagacggcaaaaatccggtattcctctacgggtacggaggtttcggtatcagtcttaatccgggcttcagctccaaccgtatcccgttcctcgaaaacggcggtatctatgcccaagtcaacctgcgtggcggcagcgaatacggtgaggagtggcacgtagccggaaccaaaatgcagaaacagaacgtgttcgacgacttcatctcggccgctgaatatctcatcagccagaaatacaccgataaagacaagatagcgattgtcggcggttccaacggcggtttgttagtaggcgcctgtatgacgcagcgtcccgacctcttccgcgtagccatcccgcaagtgggtgtgatggatatgctccgctaccacaagtttaccatcggctggaactgggccagcgattacggcaccagtgaagacagcaaagagatgttcgaatacctcagaggttactctccattgcacaacttgaaaccgggcacaaaatatccggcaactctggtaaccactgccgaccatgacgaccgggtagtccccgcccactcattcaagtttgccgctaccctgcaagccgacaatgacgggaccaatccgaccttgatccgcatcgacagcaaagccggacacggtgcaggcaaacctatggcaaaagtactggaagagcaagccgacatttacggattcatcatgtataatctgggcatgaaaccgaaattctaaagaccggctttctatttgcgaacacatagaagccccgttacctgttttttacatcacaggtagcggggctttgcgcttcttggactccaaaactgtcattttatcattatttaatcaaaataacgccttaaaaataatcacatttcaaatatttccctatatttgcagatagttagttgacattttatcagaattaaccttttaaactatagtatcatgaacatccaaaaaatcatgtcctctctggaggcaaaacatcccggtgaatctgagtatcttcaagctgtcaaagaggttcttctgtccattgaagatatatacaatcaacatcctgaatttgaaaaagccaaaatcatagaaagactggtcgaacccgaccgtatctttactttccgtgtgacgtgggtggacgataaaggcgaagtgcagaccaatctcggctaccgcgtacaattcaacaacgctatcggcccgtacaaaggcggtatccgtttccatgcttccgtcaatctttccatcctgaagtttctcggcttcgaacagactttcaagaacgcactgaccactctgcctatgggtggcggcaaaggcggttccgacttctcaccacgcggcaagagcgacgctgaaatcatgcgtttctgccaggcgttcatgctggagctgtggcgtcatctgggtccggatatggatgttcccgccggtgatatcggcgtaggaggacgcgaagtgggttatatgttcggtatgtacaagaagctgacacgtgaatttacaggaactttcactggcaaaggattggagttcggcggttctctgattcgtcccgaagctaccggtttcggcggtttgtatttcgtgaaccagatgttacaggcaaaaggtattgatataaaaggtaagaccgtcgctatctccgggttcggaaacgtagcttggggggcagccacgaaagccaccgaactgggtgctaaagtgattacaatctccggaccggacggatacgtttacgatcccgacggtatcagtggcgaaaagatagactacatgctggagcttcgggcttcgggcaatgatatagttgctccatacgcagaaaaatatccgggtgcgaccttcgtcgagggcaagcgtccgtgggaagtaaaagctgatattgcacttccttgtgcaactcagaatgaattaaatggagaagatgcacaaaatctcataaaaaatgacgtactttgtgtcggagaaatttctaacatgggctgtacgccggaagccatcgatctattcatcgaacataaaaagatgtacgcaccgggtaaagcagtcaacgcaggcggtgttgccacatccggactggaaatgtctcaaaacgccatgcacctcagctggagtgccgcagaagtggatgaaaagcttcatgcaatcatgcacggcatccatgcccaatgtgtgaaatacggcacggagcccgacggatacattaactatgtgaagggagccaacattgccggattcatgaaagtagcccatgcaatgatgggacaaggcgtcatttgataattaaaaattaaagattaaaaggtagaaaatagaaggtggacgggagctggttggcttgggattcacaaattatttaatttttagtttctaatttttaatttctagattcatttagaagactttgtttagttgtatttgtatttgtggtttgcgccactcgcctcctgtgacaggacgcgggtggcgctatttttatgagattaacgttattttcgatgggaattaattatctttgcagcattatcgaataaataaataactaaataaaaatgctacaacccgaattaaaattccgtcgcgataagattcgcagtctgatggcgttgcagggcattgacgctgcgctcattacttgtaatacaaatctgatttatacatacggctgcgttgtcagcggttacctttatcttccgctccattcacccgcattgttgtttttcaaacgtcccaacaatatcacaggcgaacattcgttccctatccgcaaaccggaacagattgtcgatctgctgaaagaaaacggattgcccatgccaaccaagctgatgttggagggcgacgaacttccttacacggaatattgccgtctggcaagtctcttccccgagaccgaagtggtgaacggcactccgctgatccgtcaggcacgtagtgtgaagacaccggttgaaatcgaaatgttacgccgttcgggcattgcccatgcgaaagcttacgaacagattccgagcgtataccgtccgggaatgacggatatagaattctctatcgagatagaacgtctgatgcgcctgcaagggtgtctgggcattttccgggtgttcggacgcagcatggaaatcttcatgggcagcgtactcacgggagacaacgccggatacccttctccatacgacttcgcactgggcggacaaggtctcgaccctgccctgccgggaggagccaacaagactccgttgaaagaaggacaaagcgtcatggtcgatttaggcggcaacttcaacggatatatgggcgacatgagccgggtgttctctatcggaaaactgccggaagaagcttatgcggcacatcaggtctgtctggatattcaggaaaagatagcttctattgcccgtccgggtgtttcctgcgagcaactgtatgacaccgccatccaaatagcgacggaagccggattcagagacaaattcatgggaaccaaccagcaagcgaagtttatcggccacggcatcggcctcgaaatcaacgaagctcccgtactggccccccgcatgaagcaggaactcgaaccggacatggtgtttgccctcgaaccgaaaatcgtacttccgggagtaggtcctgtaggtatagaaaactcttgggtggtgacgaacgaaggtatcgaaaaactaacgaactgccgtgaagaaatcattgagctgagttaaactcgtccggacacaaaccttattcaaacaacccaataatatgaattacgcatctgtttcattcatcggcagtgctttacttttgcctacattatccatccatgcgcagcaaagaaacgcccaaccgaatattttatttattctctgcgatgacatgggatatggagatttggcctgctacggtcaaccgtttatccgcacccctcatatcgacgctatggcaaatgaagggatgcgcttcacgcaggcgtatgccggtagccctgtcagcgcaccttcaagagcttcagtcatgacgggacagcacagcggtcattgcgaagtgcggggaaacaaagaatattggaaaaatgctcccaccgtgatgtatggggacaataaagaatacgcggtagtagggcaacatccatacgatccggaacacatcatactgccggaaataatgaaagacaacggatatactacaggaatgttcggtaaatgggcaggaggctatgagggctcctgctccactcccgacaaacggggtatagacgaatactacggctacatctgccagtttcaagcgcacctctactatcctaatttcttaaaccgttacagtaaagcattgggtgataccggagtggtacgcatagttatggacgaaaacatcaagtatccgatgttcggtcccgaataccggaaacgtcctcaatattccgctgacattatccatcaaaaagctttggaatggctgaacagacaagatggcaagcaaccgttcttcggcatattcacctacactcttcctcatgcggaacttgtacagccggaggactcgattctgaacgaatacaaagcggagtttagtcctgataaaattttcaaaggtagtaaatggtcacgttataatgcggttacccatacgcacgctcaattcgccggcatgattacccgtctggattattatgtaggcgaagtactgaaaaagctgaaagagaaagggctggacgagaacacattagtcattttctccagcgacaacggtcctcatgaggaaggtggagccgaccctactttcttcggtagagacggaaagttgcgcggattgaaacgccagtgccacgaaggcggtatacgcattccgttcatagcccgttggccgggacgtgtacccgccggtgaagtgagcgaccacatctgcgctttctatgacttaatgcctactttctgcgaagtggcgggtatcaagaattatgaaaagaaataccgcaataaaaagaaggagaccgactattttgacggaatctcttttgcaccgacattactgggaaagaaaaagcaaaaacaacataaattcctgtactgggaattcgacgagacagaccagatagcagtgcgcatgaacgactggaagctaatcgtaaaaaaaggaagtccctcattgtataacttgaagacggacatccacgaagacaacgatatagccctccagcacccggacattgtaaaaaaaatgaaagccatcatctttgaacaacatactccgaatccacatttttcggtaacattacctagccgataaccggtgtcagccccatcttctttgcccgtgccaacataaaggtgcgggcagcttcatattcattcgggatcactccatccagaatcgcatcctttatcgcacttttcagagtccccacctcccggcacggttgcaatccgaaagtttccatgatctcctcaccgctcacagggggctggaaattgcgaatccggtctttttcctccaggtctttcagcttctgccgcaccagttgaaagttattcaggaaacgttgcttacgttccatatttttagaagtgatgtccgcttcacagagcgtcatcaggtcgtcgatgtcatcccccgcctcaaaaagcagacggcggacagccgaatccgtcactacatcatccgctatcacgataggacgcatatggagactgaccatcttctgcacatacttcatcttctcattcatcggcaacttcatcttccggaaaatattcggaatcatcttctcaccgataaaattatgattatggaaagtccatcccgccttcggttcccaacgtttagtcacaggtttggcaatgtcgtgcagcaaggcagcccaacgcaaccaaagattgtcggtctttttgctgatattatccagcacttcgagcgtatgataaaaattatccttatgcgaacgcccgttccgggtttccaccccttgcaaggcagccagctccggaaaaatcaacgggagcagcccgctacggtccaagtcaataaaacctttcgagggaatcggtgaaagaattatcttattgagttcgtcggcaatacgctcgcgcgatataatttcaatccggtccttattgcggcaaagagaatcgaacgtgtcatcgtcaatataaaatcccaactgcgtggcaaaacggatacaacgcatcatccgcaacggatcgtcactaaaggtgatgtccggatcgagcggagtgcggatcgtcttctccttcatatcctccagtcctccgaacgggtctaccagttcaccgaagcgtcccttattgaggcagacggcgagggcattaattgtgaagtcacgacggttctgatcgtcttccaacgtcccgtcctccacaatcggcttgcgagaatcccgttggtaggactctctgcgcgcccccacaaattccacttccgtacctttatatttcacctgtgccgttccgaagttcttgaagacagagacatgagcgccgcgtcccagatgttttccgagcgcttccgccatcgctatcccactgcctactaccaccacgtctatatctttagagggacgttgcagaaaaatatcacgaacatagccgcctacgacgtaacactccagaccgagcgtatcggccgtttcggctatcttcccgaagatgggctcgctaaaatgctgcttcaattcctcttgagtcaactctatcattcttcttagttataagttttgaggggacaaaattacaaaaataagggatatattcgtacttttgccctaaataaccaaatagtaaacagaatttgtgatgaaaaaactaacaatcttcttttgcggaacactggcactggctgcctgcggaaatggaatcgagaaaaaagccaatgagaaactgatggttgcccaagcggcctacgaacgtggcgattatgaagaagccaagtcgcagatcgacagtataaagattttgtatcccaaagcgttcgagacacgcaaagcgggacaggcattgatgctggatgtagagacgaaagcgcagcagaaaacgcttgcttacctggacagcgccctccgggccaagactgaggagtttaatgccatcaaagacaaattcatccttgagaaagatgcggaataccaacaggtgggcaattatctatggcctacgcagactgtcgaaaaaaacatgcaccgttctttcctccgctttcaggtggacgagctgggcaagatgagcatgacttccatctactgcggttccggcaacattcatcacgtaggggtcaaagtgattgctcccgacggcagcttcgcagaaactcccgcctccaaagacagttatgagacaaccgacatgaatgagaaaatagagaaagcggactataaactgggggaggacggtaacgttatcggcttcatcaacttcaacaaggacaaaaatatccgtgtggaatttatcggcgaccgctcctataaaacgactatgagcccgaccgaccgccaggctgcggcaaatgtctacgaattggcgcaaatcctctccgccatgcaggagataaagaaagaacaggaagccgccaacttgaaaatcggatttatcaataagaagaaagaacggaaagcacaggaagaaccgacggataaataatgaaagccatcactctaagataaaaaagacagacgggtcacttcacccgtctgttcaattgattattagcctttccgggctttgatttccccactcgtttaccggagcctttctttttcccggttcctgtctttgcctttccggcaaaagggttgttatttttcttgatcggcataacgctacctattagtccccctcataaaattctctcagaaaccagcgagccacgaagtcccagttgtcgtgaagcaatgcctttccgttctcaaacgggaattgcgcctcgggcaacaagttatgttccatgccatacttcaacaaatcgaacgggcacaatcccccttcacagaacatctcgtatgcttcctcctccgttgtcgcagcgtcatacaacggattattccctgctgcaaagtatttggcaacatccggagccaccagcacgcctttcggattgccatagacaacgaagttgtcaaactccgccagttcgggcaacaaagtctcttcatcgtcttcccatttcagagaatggacgaagaaaaacttcagggcatcatacgagtcaaagaacatgagcggttcgcctttaccggcttccagaaaatgttccacatccgtcggcaatgccgctcccggcacaatctcaggcagaggttcacgttccttttccatcagcctcctgtccatcatccagttcgaagccagcttatcactgataggagccgactcgaaagccgcatccagacgttcgtaaagtacgtccgccaactcaagcaacgtctcatccaacggattctccacgtcgttgaacgggcaactgtcactgctcttcgaactgagcgtccacagaagaaaagcgatatcctcacggttaatctcgtccggcaagtaatcctccgtcaacgaatagaacggcagataacgaccataactcctcttatgccaatggataaattcccgccagtttcccgcatccgccacgcagtcctccagatacaaagcgcacgtcagagccaaccggcgctggtcttccgctacgtccgggtttccttcatacaaagggaaagtcatcaccaacggcaacagctcattggccaaccccatgtaccactcgtccgtatccgttttcttcgtccggtgatgaatctcaagccacgggcgcatataaatctttgattgcttcatcattataatcgtttcaaagccagtttaataaccttttccaccggagcttccggctcttccttcaagatagccagcaccaccttctgcgaaggcgcagcagcaaagccaagcatcgtcaatgcagccacagcttcctcctgcacttccgcgttggcagcctgcagcagcataccaccaacggcacttccaccggcagcggacgctcccattgtttttatcttatctttcaggtcgacaatcacccgttgcgcagtcttcagcccgattcccttcaccgtcttcaacaagttcgcattctcggtactgatgacgtttaccagctcggcaggcgaaagggcggagaggatcatacgcgccgtattcccgccaatgcccgacacggaaatcagcaacaggaaaatctccctctcctgcttctcggcaaatccgtagagcacataagcgtcctcacgaatggcttcatatatatacaacttacaggttttctttccctgaatggccgaataggtgttcagagatatattggcggcatagcccaccccgttacagtcgatcactgcggttgccggactaagttcggcaagctcgcctctaatgtattctatcataacgggtacaaagataaaacaatttcaccacagaggacacaggggccacagagttttttcgatgcagcacatcacaccctgatttgctttcatgcggaccggtattgcctgctagtgaaaaaaaataaaatattaaagctgacgaaccaaagttagtagtaatttgtttacttttgtagtcaaaagaaagaaatttgttcattaaaaccaagaaaagaatgaaaaaagtaagagctgccatcgttggttatggcaacatcgggcattatgtacttgaagcgcttcaggcagcacctgatttcgaaatagccggagtcgttcgccgtgccggagcagagaacaaaccggaagagttagcaaactacgcagtagtgaaggacataaaagagctgggagaggtagacgtagctattctttgcacgccgacccgcagcgtagagaaatatgccaaagaatacctggcgatgggcattaatacagtggacagtttcgatatccataccggcatcgtagacttgcgccgtacactaaacgctaccgccaaagagcataaagccgtatcgatcatctctgccggatgggatccgggaagtgactccatcgtacgcaccatgctggaagcaatcgctccgaaaggtatcacgtacacgaacttcggtccgggtatgagcatgggacacaccgtagccgtgaaagcgattgacggagtgaaggctgccctttccatgactattccgaccggaacgggaatccaccgccgcatggtatacatcgaactgaaagacggatataaattcgaagaagtagctgctgccatcaaggcagatccttactttgtgaacgatgaaacacacgtgaaactcgttccgagcgtagacgccctgctcgacatgggacacggcgtgaacctgacccgcaagggcgtatccggcaaaacccagaaccagttgttcgaattcaatatgcgtatcaacaaccctgcactgaccgcacaggtattggtgtgcgtggcacgcgcttccatgaaacagcaaccgggatgttacacaatggtagaaattccggtaatcgacctccttccgggcgaccgcgaagagtggatcggacatttggtttagtcgggtttagtcgagggacattgaaaaacaaacgatatagtaaccgggaagaatgggcgaacaccctcagtcatggggcaggcattcttctcggaatcgtagcaggatatttcttactgcgaaaagcttccgttgctgctgatccgcgatgggcagtgccctgcgtgattgtctatctggcggggatgctttcttcttacgtcagttctacctggtatcacggcagtcgtccgggagcgctgaaagaacagctccgtaaatttgaccacggagctatttatctgcacatagcaggcacttatactccgttcacactactcgtcttgcgccatgcaggcggttggggatggggtattttcacatttgtctggctgtccgccattgccggtttcatccttagtttcaaaaagctgaaagagcatagcaatctcgaaacggtttgttatgtgggtatgggggcatgtatactggtggcaatgaagcctcttctcgatcagttggaaatggccggtgcctcccccgctttctggtggctgataggcggaggtatttcatacattacaggagctgtattctattcgctgcgcaagccttatatgcacgccgctttccatctgttctgtctcggcggaagcgtaggacacatcgtggcgatctggctggttttatagatatcagacatccgttaacattcaacgcagttaaatctgaaaattaacaaataacccatcataatatagacaagaagaacaacggagagtttcacacaacttttaaagaataacttaaagaaaagtttcccaaaacggaaaactttctgtatcagcaagaaagaaaagtttcccaaaatttaatgttaaaagcgaaccaagctattggattatctcctatctttgtatccggtttcggaactaaaaagaggtttagtcaatgagggaacgctgtgcaaatcggcgacagtacccgctgctgtaattctctaagaatccgcacggtaagccactgcatcggcaacggatgtgggaaggtgttgcgggggagggataagtcagaagacctgccggaatcagaatcaacttattattaatcactttcgggagttaaagttatgaactacgcggaaatttgtatcatcaaacgtgatggtaaaagagaagatttctctatcagtaagatcaagaatgcgatcagtaaggcattcaatgcaaccggtatccaagatgaacagcagttggtggctgacatcacgatgaacgtaatcagccaatttgccacccctactattaccgtagaggagattcaggacctggtggaaaaagcattgatgaaggtgcgccctgaagtagcgaagaagtacattatctatcgcgaatggcggaacacggaacgggacaagaaaacccagatgaagcacgtgatggacggtatcgtcgccatcgacaagaacgatgtcaatctgagcaacgccaacatgagcagccacacgcctgccgggcaaatgatgactttcgcctccgaagtgaccaaagattatacctataaatacctgttgccgaaacgttttgcggaagcacaccaactgggcgacatccacatccacgacttggattactatccgacaaagacgacgacctgcatccagtatgacttggacgacctctttgaacgcggattccgtaccaagaacggaagtatccgcacgccacagagcattcagagctacgccacgctggcaaccatcattttccaaaccaaccagaacgagcaacacggaggacaggcaatccccgccttcgatttcttcatggcgaaaggagtagcgaagtcattccgcaaacacttggcttcgttcatcaacttctacgtggcgatggaaaacggaagccaggcggacgaaaagactatccgcacgttgatcgaggaatatcttccctccatcaagtccaccgaaaccgaacgcgagacattacgcatcgctctgatagccttgcagatcatcatagacaaggagcacctcgcaagaattgtggaaaaggcttatcagcagacccgcaaggacacgcatcaggcgatggagggatttatccacaacctgaacacgatgcactctcgtggaggtaaccaggtggtattcagctcgataaactacggcacggacacttccgccgaaggccgcatggtgattgaagagttactgaaagccacaatcgagggactgggcacacgaggtgaagtgcccgttttccccattcagattttcaaggtgaaggacggggtgtcttactcggaaaaggattttgaaaaggctatgaaagcggagaatatagaagaggccatgaacgaccgttacgaagctcccaacttcgacttgctgctgaaagcctgccagacaaccgcaaaagcgttgttcccgaacttcatgttcctcgacacgcctttcaacacgaacgagaaatggaaagcggatgatccgaaacggtacatctacgagttggcaacgatgggttgccgcacccgtgtgtttgaaaacgtggcaggagaaaagtcatcattggggcgaggcaatctgtctttcaccacgctcaatatgccgagactcgccatcgaagcccgcatcaaggcggagaatctgatagaagacgaacgcaacacggctgccatagaacagaaagctaaggagattttcattgaatccgtgcactctatggctgctttggtggcagaccagctttacgaacgttatcagtaccaacgtacagctcttgcacgccagttccctttcatgatggggaataatgtatggaaaggcggtgcggacttgaacccgaacgagcaggtgggcgacgtattgcgcagcggaacgctgggaatcggattcatcggcggacacaacgcgatggtggcactctacggagaggggcacggacacagccgaaaggcatgggacacgttatacgaagcggtgatggaaatgaataaggtagtagacgaatacaaagcgaaatacaacttgaattactctgttctggctactcccgccgaaggactctccggacgtttcaccaaaatggacagacggaagtacgggaagattcccggagtaacggaccgggattattatgtcaactctttccacgtggatgtaaaagagccgatcagcattgtagagaaaatcaagtgcgaagctcctttccacgccatcacacgcggtggacatatcacgtatgtagaactggacggcgaagcacagaaaaatgtacgcgccatcgccaaaatcgtgaaagtgatgcacgacgagggaatcggctacggctcgatcaatcatccggtggatacgtgccacaactgcggttacaaaggggtgatttttgataaatgcccggtttgccaaagcgaaagcatcctccgtatgcgtcgcatcacaggctatctgaccggtgatttaaactcgtggaactctgccaaacgagcagaagaaaaggaccgggtaaagcacttgtagaagttgagagttgagaagggagagttgagagtgaagggagatgatgttttaactcttaactctcaactcttaattcttaactcccaactctcaactctcaacttattaactcctagctcttattttttcacttaaatcactttatctcaaacagttatgaaaactctcaactctcaactctcaactctcaacttattaacggcctatccggagacgatagtagatggtgaggggatccggtattctatttaccttgccggatgttctcatcactgtcccggctgccacaatccggaaagctggaatccggaagcgggggaacggttgacagaggagaagattcaaagcattatcaaggagattaaagccaatccgctactggatggggtgacattctccggtggagatccgttctataatccggaagcattcctgtcgctcgtcaggcgggtgaaggaggaaaccgggatgaacgtgtggtgctacactggttatacttacgaagagattcaggaacaaccccgcttgaaggcaatactaacctatatcgacgtactggtggacggacgttttgagcagtcgcttttctctccctatctggagttcagaggaagcagtaatcaaaggattctgaagctgaaccgttaaattttaacatagagtccggcttcttgcgggacaaggcgggaagggaaatggagaaagggcggttcttggtagagagaaaaggcggttccttaaatacaaaaaaggcgttttaacacagtgttaaaacgccctttttgtatttaagagaacagggatgttagtttgttgattataagctatttgctatacaaatacgctcttgcttccctgtaatcggaaggtctttctacttttataaagtttcatgaagttgctgaaatcgcaacttcatgaaaacaggatttccttcaagagattcagaagaagaacctcaaaatatcattgaaattcgcccatataagaagaccgaagagcaggaccataccggtcatctgggcatactccataaacttgtcgctcggtttgcggcgggctatcatctcgtagaagaggaagagcacatgaccaccgtccaatgcgggaataggcagtatattcatgaaagccagaataatggacaggaaagctgtcatgtaccagaactgatgccaatcccacgttgcggggaaaatactgccaatcgttccgaagccacccaactgcttggctccttctttagaaaagaggtacttcatatttccgacatagccttccaacgtcttgacaccgagcgagatacctgcggggaaagattcgaggaaagcatactcctttttcaccatcggcaacaaacggtcggtcaacacgcaagcggtcacacccatcaggtaagcggaatccacacgcatactcagcgtgtcctccacaccgccacgtacataagtgagggtgatcaaacgcgggtcgatactgtcattgagaagcgcagcctcgtttttcttacgttccgccatcatttccttgaaatcggagaaagagataggcgttccgttcagggcaatgatactatcgcccggcaaaatacccgcttgcgcggcaggagagttgaccatgacgctatctacaacgtacggaaaacgataggaggcaaaacggacactgtccaccaggaggcgttgcataaagtcttcgggaatgtagactgaggctttcgcaccgttgcgcagtacgcttacttcgcgggcgtcggcaatctgactcaacatatcaccgtcatatcgctcgaaaggaacaccatcggcagaaagcagtatgtcaccgtctttgaagccgacagacttggcggtctcgttgaagtccatgccgagaggagcttcctgtacctttatatactggtcgccccatgcaaaaagaatcatcgaatagataaacagcgccaacaggaagttgaacagcaccccgccaaccataatgagcaggcgttgccaagcgggtttggaacgaaactcccacggttgctcaggctgcttcatctgttcggtatccatcgactcgtcaatcataccggcaatcttcacataaccgcccaacggcagccagcctacggcatattccgtttcgcttttcttgggtttgaacttaaacagagtgaaccaggggtcgaagaataagcagaatttttctacacgcaccttaaacagacgggcaaaaaggaaatgcccgccttcatgaatgataacgagcaaagacaagctcataatcaattggagggcacgaatcaaaaatgtttccatgtttattatattacaatttatattttacgaattactatttactttttactatccacacgaatgaatagtttttttgggggaggaactaaagactttgccgacccaccagtccggaagcaattcgccgcgcttccgcatcggtagctacatagtcatcgtacgtggggttggctacaaacgtagcctgctccatcgtcttctctatcacatcactcatgccgagaaagctgataccgtctttcaggaaagaagcgactaccacttcgttggccgcattgacgatgcaaggcatattccctccccgatacatcgcttcgtaagcgagagcgaggttgcgaaaccgtttcgtgtcgggctgttcaaacgtcaggttcgtgcatttggagaaatcaagcctgtcgaaagaggcactgatacggtccggataggagaaggcgtattggataggcagacgcatatcaggcataccgagctgcgctttcaccgccccgtcttcaaactgcaccatagagtgaatcacggattgcggatgcaccacgacttcaatctggctgggctgaacgccaaacaaccacttcgcctcgataacctcaaaacctttgttcatcatagaagcggagtcgatggtaatcttggcccccatctcccagttggggtgtttcaaggcttgcgtcttggtcacggacttaagctgctccagcgtgcaggtacggaaaggtccccccgaagcggtcagtatgactttctctatcggattgccgacttctcctgccaaacactgaaaaacagcggaatgttcggagtccaccggcaaaatcggtgtacggtattgctgtgccagttcattaatcagttctcccgccacgaccaacgtttccttattcgccaatgcaatggctttctttgcccgaatcgcattcatggtaggtttcagtccggcgtagccgaccatcgccgtcaataccatatcaatcggcccggcctccactatctggcagatggcgtcagttcccgcgtatacctttataggcaggtcgctcaaagcttctttcagttcggtatatttctcttcgttggctatcacgacaacttccggctgaaacttccgcgcctgagctatcagcagctccacacgattgttggccgtcagcgcgtatgcctcgtacagatcgggatgttcctctatcacctgcaatgcctgtgtgccgatagacccggtagagcctaaaatggctatttgtttcttctttttattagtttctatattcatttcttatatattctcctcactaaaaaacgatatacttctcaggattcaccggatggcctttgtaccaaagctcgaaatgcaggtgcggacccgtgctgaaagttccactgttgcccaccaaagcgatggcttcgccccctttcacacggtcaccctctttcttgagcagagagccgcaatgcttataaaccgatatcaaatcctgactatgttgcacaccgatcaggtagcctgtttcggcggtgtaggtactcagaataacggttccgtccatcgttgccagcacactttcattgggattggcggcaatatccgttccgtagtgtttctttttcgcatcgaagcgatcggaaaccattccccgcgtcgggcggtacaggataagtcccgtcacatccggctgggaggtgatggaagtcaggttgtatttctctgtttcttcgtattgacggcggaattcctcttcgcgcttggtgcgttccatcaaggtgtctttgcggacggtagtcagcgagtcgagcgtctgcacactgtcgacgggtatattgccgctaaaaatgtcctgaatgttcataatatagaggttctgccggttgagtacctgttgcagagagtccacccgcaaggcgttacccacgatttgggaacggacctcactgttcatataacccggaaggtagttgcgcaaaggggtgaaagcgatgatgcaggctgcgatcagaaacagcaccgtcagtacgctgagcaacacggaaaggccattgagtttggacacacgaagcccgacaatctcttcaagcgtgttttcattgacaatcgtcagtttatacttgaacttgaaatttttccagaaagctttgcttcgtcttctctttggcatttgaacaattaaaaattaaagattaaaaattaaaaaggaggaccgatttatattcctcttcagatacggattatacgggacaatccgtatcctccgcgtccaaatcttccaaattgagcaacccttcgggaagctctacggtgatgagtttccgtctctggtctatgcctacgataaattcctcttgggcgggaaccagcagttcctcaccgtctttctcgactacgaaaagggtgttgacggtagcggtatccacctccgccacctcacccaaaagtccgtgacgagtgtcctccatgcggaaaccgacgaaaaagttccaggacaattcaccgtctccgacttcttccgcatacttcacagggaaatagacttcgacattggtaaacgcccgggcacgttcggcggtatcgaccccctccagcttcaccaaagcggtggagtcggaacggaaacggtattcttcgatgaaaaagggtacaaaaattccgtcgagcaggcagaccagatagtcgcagtccacacggtcaaaaatatcatccgtaaaggtaaactgcaactcaccgtgaattccgtgcggcttattgaacaatcctatcttatatacttcttctttctttatcatatccgggtgattctggctccgatggcattcagacgtccttcgatgttctgataaccacggtctatctgttcgatgttactaatggtactggttccttcggcactcatggcggcaatcagcagggcgataccggcacgtatatccggtgaaatcaggcgggcgccgcgcagcttgaagccgtggttgtggccgatgactacggcacggtgagggtcgcagagaataatctgcgctcccatatcaatcagcttgtctacgaagaacaggcggctttcaaacattttctgatgaatcagcacgctgcctttggcttgtgtcgccacaacgagcatgacactcagcaagtccggagtgagtcccggccaggtggcgtcggctatcgtcatgatggagccgtcgataaaagattctatctcgtatgtttcctgtgcgggaacgtaaatatcatcgcctctctgttcgagcttgatgcccagacggcggaagctctcggggatgattcccagattctcgtaagaaacattcttaatggtgatttcacttttcgtcatggctgccataccgataaaactgccgacctcaatcatatcgggcagtacggtgtgctgtgtgccatgcagtctgtccaccccttcgatggtaagcaggttggacgcgataccgctaatcttcgctcccatccggttgagcaagcggcaaagctgctgaacgtaaggctcgcaggctgcattataaatagtggtagtgcctttggcaagcacggcagccatcacgatattggctgttccggtgacggaagcctcgtccagcaacatataattgccccgaagttgtttggcggtaatctcgtagattccacgctcctcatcgtagcggaagtctgcccccaaattctgaatgccgacaaagtgggtatccagacgacggcgaccaatcttgtcccctcccggtttggagatcagtgctttgccgaaacgggcaaccatcggacctatcagcatgacggaaccccgcaggctggaacatttcttcaggaactcatcgctttcgagataagccaaatctacattttcggccttaaagctataagtatcaatgcctttctttgcaaccgtcactcccatctcacgcaagagctgaatcaagttgttgacatccaaaatgtcaggtatattgttcaccgtcacttcctcttcagtcagcaacgtagcgcagatgatctgcaaaacttcgtttttggcaccttgcggatgaatctcgccgcagagccggtgtcctccttcgattacaaatgaagccattgatgttcggggtattaatttttttaatatcgtctcttgttattctgacgattgttattgtagttcatcttcgggcggtagttctggctcaaacgctcggccatcaggcggatgatgtcatcggtcatctggagtttgccgtcggacagttcataaaggtcttcggctatcttccggtcgtccaccgtgtctttgttccacgccatgtaatccttcttcatgtggttgcagatcaaggctatcaagttcctcttttcatttccttcgggaaattcgatggctttcttgatcagtatctccaaagtgtgaccgtaatgacggtaacgcatacgggcagtagagtaaggtatgtgttccggacgggtcaccagattgtctttgcggataatctcgtaagggtaatcgatgtccagctcaaaaccggacataatggccaaatgatcccaaagtttatgcttgaaatcgggcacgtcacgcaaatgagggaacatattgcccatgatatttataatcgtgttggcacaacgctgacgttccgcacggtcttgtatagtcaacgcatagtcaaccatattttgtatgctgcgcccgtattcgggaagcggcattcttttctgttgggtattatattgcataatcttaaaaagttgaaagttgaaaatcactttcgtccattattaattgtttattgctaatcaagttactgctaattgctcatcaccaattcatcaaaggagtttcttcggtgtggacgcaacgaattccttcaggtagaaaggttcgaagtaggccacgtccttataatcctctttcgctattgccttctctgcaagcgggaacatcattttggctaacggatgcaccttgtcgataaaatgcgcgttgggatgcgttatcttctcgcggcatttggcagccccgttaccgaagaaataaaccgggcgttcgttcaggaactccagataggaattttcgtccactatatcggctgcaacggcacgcttcacatctaaggcacggtcgtaaacggctgcataaacttccatacgtcgggcgtcgatcataggacagagcaaagcgtcttcgggaagattctcatgcagcaagaccggaacacacagcacctcaagcgtcggaatcccgatcaacggaatgttgcgtccgtaacagattcccttcgccatcgaaaccccgatccggagtccggtgtaagatcccggcccgcaactgaccgcaaccgcatccaacgggatagcatgactgtcgataaatgacaatgcctcatcgacaaaaactcctaaagaaacggcgtgtgaagggcctttcaggtcttcttccacaaacggaaccattccgtcctcactgattgccaccgagcaaacggaggtggaggtttcaatattcagtatacacgacataaaaatcagcttattaaattgtcgcaaatttacatgataatttccaattcttaaaataatcgtgtaaatttgcacaaaactttaagatttatgatacaatcgatgacaggttacggcaaagctacagccgaactccctgataaaaaaataaatgtagaaattaagtcgctcaacagcaaggctatggatctttccactcgcatcgctccggcttatcgtgaaaaagagatcgaaatccgtaacgagatttccaaagtgctggaacgcggcaaggtggatttcagcctgtggatcgagaagaaagagggggcggaaagcgctactcctatcaatcaggctcttgtggagggctactacaaacagattttggccatctcggaaaatcttaatattcctcttcctgccgactggtttcagacattgctccgcatgccggacgtgatgacaaagactgaaattcaggaacttacggaggaagaatggaaagcggtgcacgctgctgtagcggaagcgatcgggcatctggtggatttccgcaaacaggagggggctgcactggaaaagaagttccgcgagaagattgccaacatcacaagcctgctcgaaaagattactccttacgagaaagaacgtgtggaaaaggtgaaagaacgtatcacagacgctctcgaaaagacgctgagcgtggactacgacaaaaaccgtctggagcaggagttgatttactatatcgaaaaactggatgtcaacgaggagaaacaacgcctcagcaaccatctgaaatattttatcagtacgctggaaagcggcaacggacaaggcaagaaattgggatttatcgctcaggaaatgggacgtgaaatcaatacgctgggcagcaagtccaatcatgccgaaatgcagaaaatcgtggttcagatgaaagatgaactggaacagattaaagaacaggtactgaacgtgatgtagacgaacgtctctcatccttcatccttcattcttaattcttcattcttaatttaactatgactggcaaattaattatattctccgctccgtcgggttcggggaaatctacaatcatcaattatctgctgacgcagaatttgaatcttgcgttttctatctccgccaccagccgtcctccacgcggaacggaacagcatggggtggaatatttcttccttactccggaagagtttcgtagccgcatcgagaacaacgaatttctagaatacgaggaagtgtataaagaccgttactatgggacgctgaaagagcaggtggaaaagcaattggaagccggacagaatgtcgtgttcgacgttgatgtggtaggcggatgcaatatcaagaaattttacggtgagcgtgcgttgtcagtatttatccagccgccttcggtggaggaattgcgttgccggttggaaggacgaggcacagacactcccgaagtgatagaaagccgcatcgccaaagcggaatatgaattgagcttcgctccgcaatttgactgcatcatcatgaatgataacctagaaacggccaaagccgaaacgctgaaagtgattaaggagtttctggagaaataaactaaagttggaaaagggagttaccagttaccaatccaatggaaaaagtagcttataacaaggaaggaagcaaccaatgaaaaaaagccatcgactgaaaaccggaatattcagtgggtctttcaacccgattcatatcggacacctcgcattggccaattacctttgcgagtacgaaggcttggatgaaatctggttcatggtcactcctcaaaaccctctgaaaacgcaagatgagctatggagtgacgaactgcgtctccggcttgtagaactgtgtatcagcgattacccccatttccgtgcttcggattttgaatttcatcttccccgtccttcttacagtgtatatacgctcgaaaaactgcgcgaagcctatcccgaccgtgagtttcacttcatcatcggttcggacaattgggcgcgtttcgaccgttggtttcagtcggagcgcatcattaaagagaaccacatcattatttacccccgtcccggctttcccgtagcggcggaagaattgccggaaactgtccgcctcgtccattctccagtgtttgaaatcagctccacattcattcgtgaggcgctgaaggcgggaaaggatgtccggtatttcctgcatccgaaggtgtgggagcaaatagaaagtgtacttactccttcaaccgatgcagagtaatcattataacctccgccggagcaccgatacgaattggtaattgggaggttccgatcccgttggttacaatcaaaggaattttagccgaattacaagccagtccggtgaggaaacgtgtgccgtaattcgagttcaacaccggagcaatcccgaacacacatacttgtccgccatgcgtatgccctgccaaagcgagatctgtattgactacagaaacatcttccacgtagtccggagtatgcaccagcatgataacgaaatctctgggagaaagggctaacgtgggggactttccgttctgccccaagtcaaaaggattgcgcacaccggcaatgataatttgctgaccgtccttgcggagtgtgtccacttcgtgttccaacgggtgcattccataatgcttcatcgtgcggataatctcgtcatgacaacgctcgtaatcgttattccccatcaccccgtaggtccccatcggtgtcttcacccgtgcaagcgccgaaaacaaaggatctacatactcacaaccttcctgataatcgccgcccatcaagagtacatccgctttctgggcaatcagcagacgaaccaaatcattcagccctttctctttcaacaaactcttataatgcaaatcggagataaaagcgatgcgaaaaccctcgaaggcttcgggaacgtcccggtgggtaaagtcatatttcacgacacgatccacccctgaatagacggaggaaacgtccacttcggaagaagttattttcgtaccgcgaagtacccagtcctccgatttatatgcatcagcagaagatttatttttcttggctctgcgtttcctgcctttcgaaacgttcagatctttgagttgcgagtgatccggagcaaacagtccggctatgacgttggacgtatccgcaacaatggagtctgtgttcaaaacaagacgcggcaaggttgctaccatcctctttttcgacttgcaggaaacaagtaaaagcagcgtcagcagtagaaacggataaatagatttcttcatcttctcttagtttgaagtttttaggggcgcaaagatacgaaaaatcatgtatctttgtccgtcaaaactctttataaaatattaaagcatggaagaagtaaagcgtaattcactgaaagcatggctattagccgcacgccctaagactctcacaggagctatcactccggttttaatcggtacagccctagcggcaatggacggacgtttccattggttgcctgcccttgtctgctgcctgtttgccggtctgatgcaaatagccgcgaatttcatcaacgatcttttcgacttcctcaaaggaaccgaccgtgaagaccggttgggtcccgaacgtgcttgcgcacaaggatggatctcaccgcaggcaatgaaaaccggaattgccgttaccgtcacacttgcctgcctgattggttgcacgctattactttttgccggatgggagttgatcatcataggagcgctttgtgtattattcgccttcctttacactaccggaccttatcccctctcctacaacggttggggagacgtgttagtcatcattttcttcggatttgttcccgtaggcggaacttactacgtgcaggcactgacgtggacaccggatgtcaccattgcctccttcatttgcggactactaatcgacacgctgttagttgtcaataattatcgagaccgcgaagcggatgcccgtagcggaaaacggaccgtcatcgtccgtttcggtgagaagttcggacgctatttctatctgctgctaggcatttcggcttccctactctgcctatatttcttacgcgaaggacatatttacgctgcccttcttccacaactttacctggttccccacgtcctcacctggagacgaatggtaaaaatacacagcggtaaaaaattaaacagcatattaggcgagacctcgcgtaatatgctgtttatgggaattcttttagctatcgggatgattctttgaaaacgagatcattccccatttaatcactttttttaatctactttccgtacatcttttcgtaatatccctgataatctccgctggtcacttcttccacccaagcttggttgttcagataccactcgatggttttcacgatgccgacttcaaatttcgtttcgggataccagcccagtgcatttgttatctttgttgggtcaatggcgtaacgttggtcgtgtcccagacggtctttgacgaaggttatcagttcttcgttgatccaatcgatggaaatctccccgttctcatctttcacccgtttcttgagcacctggcgatattccggatgttccgtcatcaaccgatgaatagtagagattgtcagcttcacgatttcgaggtttgtcttctcgttatgcccacccacgttgtacacctcgccttcttgtccttcacgcacaacaaggtcgatagctttacagtggtcttccacataaagccagtcgcgcacattacttccatcgccatagacaggcagatgttttccttcaagtatattcttgataatcaacggaatcagtttttccgggaaatgatacggaccgtaattgttggagcaacgggtaatcgttaccggcattttataagtgtcgtgataagccatcacaaacagatccgcacttgtcttggatgcgctgtacgggctatgaggacagagcggagttgtctccgtaaaatacccttcggctcccagcgagccatacacctcgtcggtagacacttgatgataacgcactccttttctccaagtggggtatccttgttcatccttgcccatcacccatgcgcgacgtgcgcaatccagcaagttctgtgttcctaaaatattggttatcaggaacagttgcggattctcaatactacggtcaacatgactttcggcagcgaaattcactacataatcaaagcgatattcagcaaataggctgtctaccacatcgcggctcccgatatcacctttgataaagacgcaacgttcattgtcaatgtctttcgcaattgtccctaagttacctgcatacgtcaatgcatccaatatcacgacttttatatcgctatgcttcgctaagatgtatttgatgtaatttgcaccgataaaacctgcggcaccggtcactagataagttttcatattttactttttatgttgattttaggattgtttcgccagttctatcaaatatttgccgtactcggtcttttcgaggcgttgtcccagcagcagcagttgttcggtcagaatccacccctgacgccaggctatctcttcaatacaactgacatagaaaccttgtcggttttggatggtggcaacaaagttggaagcctccagcagactgtcacagtttcccgtatccaaccacgcgaatccgcgtccgaaaagttccactttcaaagtgccttcttccagatacaggcggttgaggtctgttatttcgtattctccacgtgctgagggccgaagagccgccgctttttccgtcacggtggcatcatagaaatacaatccgggaacggcgtaattgcttttcggcactgccggtttctcttccagcgaaataacctttccctgttcgtcaaattccaccacgccgtacgcgcgagggtctttcacataatagccgaatatacaagctcccttctctatattggcagcccggcgaagcatggcggagaaaccttgcccgtaaaacatattatctccaagaatcaggcagcccggttctccattcaggaaatcggctcccaacacgaaagcctgcgccaacccgttaggctgctcctgcactttgtaagagaaagacatacccaattcctcacccgttcccagcaaatcgcggaacatcggcaagtcacgcggagttgagatgatcaaaatctcacgaattcccgccagcatcagtgtagacaggggatagtaaatcatcggcttgtcgtagacaggcattatctgtttggagatcgctttagaaagcggatagaggcgagtggcactgccaccggcaagaataattcccttcatgttcgtcttcattattcataaactgggtgcaaaggtcggaaagaaatccgagatgacaaaaataatatgaaaaattatttatctgccaactcgataacttccaagtccttaaacgttccccgctcgatgacaaagcgcaccaatgtacgcactttatgaaatcctgacatccccgcagctccgggattgatgtgcaacatatccaacgtcttgtcgtacttcacctttaatatatgagaatgcccgctaatgaacaacttaggcgggcgtgtcatcagacttccaattatcgaaggatcatactttcccggatagccgcctatgtgttttatcagcacttcggtgtcatccaccgtaaaacggttcacctgcggatacagcttcctgatagcctgcccgtcaatatttccgtagactgcccggaaaggacggaacgccgccaacctctccgccacttccaccgaaccgatatcaccggcatgccaaatctcatcgcacggctcaaaatactccaggtatttctcatcccaataagcatgggtatcggataataatccaattcttatcataaatttctttgtttaatcctacaaagatactatatttggaaaaatcttaaagcatatggaaaacaaatataaatatttcaagcgagatatcagttggctatcgttcaactaccgcgtgttgctggaggctttggacgagcgtctccccctttacgaacgcatcaactttatttccatctactcttccaacctcgaagaattttataaaatccgtgtagcagaccacaaagctgttgcttccggcgcaacggaaagtgatgaagaaagcgtacaatccgcccgcgaacttgtagaggaaatcaacagggaagtcaaccggcaactagatgaccgtgtgcgcatctacgaacaaaaaatattgcctgccctacaaaagaaccacatcatcttttatcaggacagccatgtagagccgttccatcagcagtttatcaaagacttcttcaaagaagaaatcttcccctacctgcaacccgtacccgtttccaaagacaaaatcgtctctttcttacgagataaccgactctatctcgctatccgactctatccgaaagaagaaagaaaagaatcccccatcctcgagtcctcccgtcctcctctttacttcgtgatgaagcagccctacgcaaaagtcccccgtttcatcgagttgccgtgtcatgaaaaaaatcattacctgatgtttgtcgaagacatcatcaaggcgaacctcgatctaatttttcccggttatgatgtcgagtcgtgttacagtataaaaatctcccgtgacgccgacatattaattgacgacaccgccagcagtgccgaccttgtggcccagctcaagaagaaagtaaagaagcgtaaaataggagacgtctgccgcttcgtctacgaccgtgccatgccgcacgactttctggattttctcgtagacgcgtttcacattcaccgcgacgaactcgttcccggcgacaaacacctgaacctggaagacctgcgccatctccccaaccccagcaagtcactccacagccccgaaaagccgaagccgatgaaactcaccatcctcgacgaaaaagaatccatcttcaactacgtcgcccggaaagacctgctgctctattacccctatcactccttcgagcacttcatccacttcctttacgaagccgtgcacaatccggaaacccgtgaaatcatggtgacgcaataccgtgtggcggagaactccgccgtcatcaacaccctgatagccgctgcccagaacggcaagaaagtcacagtatttgtagagttgaaagctcgtttcgacgaagagaacaacctggccacggccgaaatgatgcaagccgccggtataaaaatcatatacagcattcccggtctgaaggtgcacgccaaggtagcccttatccgccgtcgtggactgaacggtgagaaaatccccagctacgcctacatcagcaccggcaacttcaacgagaaaaccgccacactttatgccgactgcggactattcacctgtcgcaaagaaatagtaaacgacctttacaacctcttccgcacccttcaaggcaaagaagatccgaagttcaccaccctccttgtcgcccgtttcaacctcatcccagagttgaaccgcctcatcgaccgtg

SEQ ID NO: 11725 - DNA, 12378 bp, Unknown
  gut microbiota DNA sequence
attttccactccccatttctcattcggttgatttcccattgtgagtttcaatgtcccacctttatagagttcatcccggtacaaccagcactgttccaatggtttgccattcagcgtagccgactgtacataatatgcatccggggtattacctgtcgtttcaatcacaaacgtttttccagttgcattcaccggactaagtttaatttcaatcttatcaaacaatggactgcccatctggaaagtcggccgttcacaagctcctccctgtacatcgaacaatcccattgctgccatcacataccaggctcctaactgtccctggtcttcatcctgaccataaccataaccatgttctccgtttgttccataaaactcatcacagatcaaacgcgtccatttctgtgtcaggtaaggcttaccggagaaattaaacaaccaggaaatatgaagactgggctggtttccgtgattataagggctctgtaaaccagagaaagcatttactacttttccaccaccaaaaatcgacttacgggcttctgtgaagatagaatccaaccgattgttaaactcatctttgccgactttttcaatcaaacgagccggattctgcggtacaaagaaagtatattgcattgcattcccttcctgaaaacctctccatgattccaatggattaaagttatcaataaactcaccattgggtactctcggacgaatcatcttcagcgaatcatcaaacaacttttcccaacctgcagaaagctccatcaaacgcttataatcttccgtacgtcccaaagcttttgcccattgagccactgcataagcactaaaactatattctaatgtgtgagatacggagaagctcgaaccttccggatgtgtgccgaaatgaacactgttctcataaggcacataccctctctctacaaactgtttcacatccatcttgcctgccccttcaatgcggccttcccagcctaattcattcttcaaggctgcctgataagcagtttccacatcaaagttacgaattccgctattataagcacctgctaaagtgatgctcaccatattggttcccactccggaaacatacttgctggtagcaataccatcccctagccaaccggcatccttatacaccagcaactgactgtttacaaagtcattatagtactccggatatgccaatgcccaaagagaagtcagattccagtaagctccccaaaccgcatccgtattatagtgattatattccggtttaccatccttagtcaaaggtatctgaccaatggtaccgtcatttttaggataagctccgttgacatcgctggcaagccctctacccaataatgcatgatacaacccggtatagaatttgattttgctatcttccgtacctccagaaaccaagatgcggctcaaagactcattccatttatccgtagtcgctttcatagcctcatcaaaagccaagtctttcgcctccgattccaaattcactttcgcattttctatggaagtatacgataaacctatttttacattgactatctcgtctttctttgttttataattcagacacatgatagcacccggcccttttatttcattacgagccatcaaagcactatcttgatagaaaacttcgacagattccggcgcacggtccaattttgcataaaaatacatggcaaccgaggcacctgcctgatatttcttcacatattccggctctgtaatcacataaccttcaatagtatttccatctacctgtctgatgtacgcatcacgcacagctccactttcgccctggcgattgccgatattaaacaatatatgggcattctccgattccgggaatgtataacgctggaatccgacacgagccgtagcagtaagttcagcctttacctgataatcctttaataacacagaataatatcccggacgtgcagtttcatcttttttatcaaagcgggaacggaaacctttatccggttcttccagctttccggggtttgttttcacttctcccgtaacaggcatcagtgaaattcctcctatctgaaactcgtgcaagcagggaaaaccatcaatagaagcatgaccgtcctcataacctacagcctcccaaccttgattatttccgtacgtgccgtttgtagatgcacccagcttagctaaaccgaaaggctcggcagccggagtatagaaaaaccaccgactatgaaccgtaccaatattcggattcacatactctaccagattgggacgatcaggtgttttgcaccctacaacacctgccagaatcaacaggctacctatccattttaatttcatcatttatttcatttttctgtttgtaacttctcctttaattattgccacacgtgcataatattccggtacacacgaagcgtccaataaccatttcggcttacgtttttcatcagtccgccctgtccagtcatgatacatcagtcccgcctgatcacgtgcatgatcccaagcataatccagtccttttatcatcgtatccacatattttgaatcccccgtaacattgtacagatcgtgataacctctaaacaaaaccaaattaaaccaaggcaaatctgcaatataaggaataccgtcttccgtgtatttaaagaacactttgtaacttccttctgccagaaatttagcattattcagatacgcctgctcacccgtataattatataaagctacagctgcttgtaacaaagtacctgtattgtaagtatacaaatccgggcatactgctgaagtcgttgttaaccatgagttccaaacgactcctctttccggatctttcagatatttatcaatccaatgatagaacttctttcccacctccagataatactcatctttagttgcttcataaagttttaaagccaacaccatcgcttttccgttagaacaggcaggtttctgatctttcactccttccagccaggaaacagctccttcaaagttctcatcccaaccacttaaaataaaggtcaatacctgtttcgctttctccagataatgaggatttttagttaccaagtaagaatcaatataatcaatacccactaaaccattgtcatcataatagcggtctacctttccaaattgaacagggtaagcctgataaccgaaaggaacgcgtgttgtatcataataatgttccatcgccatcaccatcgaatcgacataaactgtatatttctccggttcgatggcagccatcaatactgctgaagaaaagacaccactcataggccataggtaagaaacctcttgtgcctgtcgggtagaatcattaaaataagtcagatcaggacgatgactaccgggataatattcagagaagagaccgtatttgggaacccgatagagttcccagacacgttgaaacatttcttccgccttatctttgttcggagtcgctttgggctctcctgcacaagagaaaagcatggataccgctgatacaaataaaactatatttctaattttaccattcatacactattcttccgtcacagtttcccctttatacaaagctataattcccagagattctagtgcagcatcctgcatcaacaactgttcagcccgtttcgggtctgttccagtccaatcttcataaaacagtccgcttgacaaacgagcattctcgtatgcataatccaagaagttaatgaatgttttgatataattacctgcatttttgtaataaggttcaatatcaataaaggcacggatcagttttgttgtaaaccaaggatcatgatcaggataagctaacgccaacccattaagcggacgtacaaaataattatacgcaccttcagaagaagcaatggcattgtccagataagtttgttcacctgttattttatacagacggactccgttagaaatcattacaccagtattgtaagtccattttgttttattaatagatccgtccgcttgtttatcattccagtagcaagcatcttccggatcacgcagattattcaacgtccaagcatataaacgttttgccaaagctaaaacatctgctttttcctcttgaggacatactgaataatattcaagtaagaatagtgttgcatatccattggcacacgtaggcttattggaatcaccaactccctgctgtcccttctgatcctcattccaccaaagacctcctccaaatgtatcatcttcaccttcttgcaaaaatgccacgattcttttggcctttgtcaaatagtcttgattatttagcaaattaaaagcctctaccaattcaatccctacaatagagttatcatcataaaaacgcgttccactaccagtagtaccattagtttgagaaccataaccacccacagctccatcaggggttgaataataaacttcaaagcggtcaaccatagttgcataattcacatcatagcccaaagaatgtaaagctgcgacccctgataccagtccgtcatacggccataagaaagaagccgagttatcaccatctttcttgggataattttcattatacaatccttctgtcgccccactattgatccggtaacactgattaatcaaatcaaactgctctttagcgcgtttatgataaacgacttcctctccgggttctgacggagtaatcggtgtaggcggaatatatttctctacgtcatctccggcacaggagaataatagtgccggaagaatagctaaaatagtctttatctttttcataacttagttttattaattaatcggagtcacattagtaaatgtatgtatcatcaatccatccgcgttcgtatcgatagtgatagtcgcatgcgtataatccagactacctttcattttccaaaggtgttcccattgactccattggaactcatacaaagcatagaaagaagcaggttctccacctactgggcgttcggcactcacgccatcgcctctaccccaacacatagttctatcattcacttgagctaaaaagtaataacgctcctctatccaaccaaaaggaggattagtttccggttttgccggatcatagaaacgaatatcaccttctcctacaaatttaccgttaccagcatattccagtacagctatatcagcaaatgttgctccccagacgcaacgaacagaagaacctattttttctgtcgtcatagccattgtattaaagtttacagtcagacgggttacctcttcggaggcagttactgccgtttcaccatcaccctctctcaacttcgaactatcatcaatataataactgaatgtttcacctgtcgtagcagacttaaatgagatatttccagcagacaattttgtataaatctggaaaactccctcttctacacaacggaacggaattccgccttgtccaccgttctccgtagccgaaccatataaatacaattctgccggaatattatcaattccctccccacgagtcacagtgatattagccaccttatcggacttcttcaccactcctcctttcgaagcagtcactgtccatttaatatcccctgttcccaaaggataaataccagcatttctggcaatcgtattaatagccgcatgagtaatcgacaaactgggattggctcccaaatcacttttcattgtagccagtggctttgaaaagtctccgtctgctttgtcaaacaaaacctcgtacaatacaattccgccatctgccgcaccgcctccggaccatgatagcacaacaggtactgaagatgacacatccaactggatagaggcaggggaattcaattccgtagggactgtaaaatccgcattcaattcataatcttcctgacaggataccattgccagaaatactgaacatattaataatatctttttcataattgttcctttttgagtcgttaaaccaattaccaattcggattctgcaccaaattaccattcaagtcacgttcagcctgtggtataggccacaaataatgtttatttgcattaaaagctctattttcaacccgaacgtatccgttatccgtacctaccacttcattcgtcttcaatccgtgacaccatccgttcaatacatcatccgcaattctccaacggataatatccttatgacgatgaccctccaatgccagttccgaacgacgttcattccgtacaatctcaatcagtttatctttagaagctccttccgggaattccactgccgaagcaagtgtaaatccggctctatcacgaattggtttaatagttgcatcccaagccgtcttatccagttcacctaactctgccaatgcttccgcattcatcaatagaatatcagcataacgaatcaaaatcggattcaaaccggaataaagagtagcacgatacgtattatcccagtatttcttgatataataaccggtagccgaacaatccgatcctacaccgtatccatctttaccttctcctttctcacagttgataacgacttctgttccgtcagccaacgtatatgagttcccagtatacatcactgttgctttcaaacgtggatcacgattagcatacggattactttcgtcaaacgatgttcctgtctctcttattgtttttccatctagcataatataactgtctaccaactcctgcaaaggagaaagctgggaatatccccccaatgaaggtggcaggaaagcatacatcatctgatgttcacggctggtcggacgatactgtgcatccaaaattacttcagagttgtattcattagcaatctcaaacaatcctgcataacttccaaagagcctaaaacctccctccgtcataatggtggacgtgatatttttcacttgcgtccagttaccttcgaacagataaattttagctttgatagccattgccgcccaacgggtaatccgtcctttattatccgcatcataagaagtcggcaggtaattaccgttaatcacttcatccaaatccgccaacatattagcaatgacagtagctctatctgtacgtgcgatagacatactttccttaatagaaagcactttcgttgtataaggcacatctccgaacttcgtatacaattcataataattataagcacgaagcactttagcctcaccgatataacgtttcttcaattccggatctaaatcaggaacccggtcaatattttcgagcaactggttgcacatacggatacccgtataacgtccgtcccaaacctgtttcacgtaagagtcggctgtagaatatgaaccattaccaatattttgtgtaaaatcattaggttgtttggtatatgcattgtccgtcatagcttcactataaagctgttcgtccatatttcccaaatacgtatagcaattattcaacgccttgacagctgcttcaggatcttcttcccaataagtcaggtccgtttctctgtcatacggtgccgtatccaagtcaacacaagaggcaccgcccactaccaaaacagcagataaaatcaaattctttatagttgttttcatcacggtacagtttaaaatttaacattaagtccaaatgaatatactcttgccacaggataagcacgaccactgccgtctccggtatattccgggtcccatccacctttcatattcgtgaaagtcaacggattttgcacgctggcaaaaattctcaaattcttgacatagagttttttcatccattgctgtgggaaagtatatccgatctgcgcatttttcagacgcaaatatttagcgtcctgaatccagaaatctgattttgcagcattattagccgattctgctcccattgtcagacggggataagtagcatccggattattcggagtccagcgatcctgatggaaatccattaccggaccttcattattattatggaaagcctcaacagattcaccacgcatccatttgttacgtcttcccactccttgccacatcatcgagaaatcaaagcctttatattccagcccataagtaaagccgaaagtatatctcggaaaatcattacctacgataaagcggtcatcatccggtttaatcacaccatcgccatttttatccagatagcggatatctcccggtttcggtgtaataccttccaggtgcggtcctttctgacattcttcctcattctggaaaaatccgtctgaacgatatgcataataagaatacaaaggataaccttccttaataatagtctgtacatccgaaccaccgataatttccgtaccgcgtgtatctattacttcattaaagctatccgaaatatttccggagaagttatgcactactgggccagtcttcaagcgatagctcactgacaactcccatcccctcgtttctactttaccagcattctgaataggcgcaccattaccaaacaatccgggaaccggtaaattcaccaaaatatcttttgtacgattattgaagcaatcaaaagtaatattcaaatcattattcaacaatcccaattcgaagccgatattagccatacgggtagtttcccatttgagatcaggatttgtagaagcaaatgtagccgtctgcgccaatttatctccgaagctgatgccgttagtcacagacaccgtctgcatgtattgataggcaccaatacggttattacctaccaatccccaggaacctctaatttttagagaaggaacatacggtttcaatacagaccagaatttttcctccgaaatacgccatcctgcagagaaagaagggaagactcccgaacggtttcctttagcaaaataagaagagtagtcattacggatattaaattccagtaaatatttctcatcataattataagtggctcttgcaaaaccggaatagatagcccagtcacttcccgaacctgtattacttaccttatcaccactcaaatcacctacaaaaatgtcgtatttagaatcttccgtcaaacgactggtagagaattgtttttcagagaaaccttcataagcataccccagtaatccaccgatagagtgctttcctatcttcgtattataagtcaccatcagattggtagtgatattcttggaacggtagaattgctcggtcaacttgttttcagtatctcccgtaccttcaaaagctttccggttttcatgcaatttattattccacacgcgtccaccagcacttccaatcagtttcagtcctttatatacttcccattcggcttgtatggttcccaataattcatcattcacattctggcgataaccgccttcttccaaacgttgtaaaccgtttgagttacttccggctggataattataactaccatcctcattcttgatcggataaatcggtggcatgcggtttgcctgctcgataatccattccgtccagtaagcatgttctttaatgtcattacgggcaaattgagaagtcaaattcaatgtaaagttattcgtcaccttatggcttacattcagacgtgcattgtagcgcttataaccataatcaggtcccttgaacatactactctgatccagataacccagagaagccatataagacaactgatcgttaccgcctgtcatcgaaacattgtgtgaactttgaggagaattacgattataaagttctttcacccaatttacattcggaccaccatttctatattgcgcaatctgctcgggagtgaattttgcagctcttcccgaattaacagccgcttcattatacagttcagcgtatacccacgagtctgctatcttaggcaatgaagtaggttgctgaacaccatacataaaatcataagagatttccaccttaccagcttttcctttcttggtagtgacaagtaccacaccattggaagcacgtgaaccataaatagcagtagaagaagcatctttcaaaatagaaatctgctcaatatcagccggattcagattggcgagcgatccttcaattccgtcaataatcaccaacggatcattgttgttcatcgtattcaaaccacggatattaatagaaggtacactacccggagtagaacttccctgctgaattaccaaaccgggagtcgttccctgcatcgcttccaatacattggaaatcggctttccttccaattcatccgtagaaacagaagacacagctcctgtcaggttgactttcttctgcacaccgtagcctaccactaccacatctttcaaagcaaccacatccgacttcaacaccacattgataaactggcggccgttcaccggaacttcctgtgtttcatatccaattgaggaaactaccaataccgcttttgaagcaacattcagtgaaaaatttccatccatatccgtagccgtacccgtagatacacctttcaccagcacggtagccccaatcacgggttccccgtctgccattaccttacctttcactgcgattgtattagattgtgcatacagtttggaaccaacagccacattcatacaaacaatcaacataacagccaataattgccaactcgaaaatgccgttctgaaaagtcggcgggcaaattgcgcgttcaatagattagattgtttcataacattttatatttgaattaatagaagagttatcatatattataagatattaagttgggacaaagcaaaggaataagcccctaaagcaacggctctgcttgctcctaatgtagaaacagcaatgcctattttcttgtgacaggcataatgcacctctctctccgaaaatggtattttcaccatcttgtctttttcctccagaaatttatcaaatgcctctttttcggacagattgaacacctccatctgcaaacaagggaaagaagctcctgcaaatgtgccgatctgccgattcatctcattcatgattcccggaagtatgtatttagccgctccggccactcctccgccaatcaccaccaagccatcaacaatattcaatgcacggatgatagcatcaccagccatttctcccagttcgttaaaactccggacagcagcctgctgatctccctctgcgatcccttcggcaatatcatatatatctttgggagttaaagaagaagcatcctttccggtcaattcctgatatactcgcctgacagccctgatgctgacactttcttccgcgatcatttcgggatatttcttattccgcataatccagacgtcgccgccgcaaccgttgtctccggtcagtaaccgactgtcaatcaccactccggcaccaaaccctgtacccagcgtaattccgagcaggttcttatataccttactgctgcctgcttctttcaggcgcttatttacttcaggtaaagtgcccgccaaagcttcaccataggcgaacaaattaccatcattattaataaaaaccggaataccaaattgctctttcaaataaggtccgagtgccactcctcccctgaaagccgggaagttaggcaagtcaccaataattccatgctcatagtcagcaggcccgggaaaagcaaaactgatagctaccggaagtttaggcaatcgtttttcaacttccaggaagccttctacaagaacagacaagcaacgctctaagtcgtcggacgctgccggaaggcaaataggttccactatttcgcgacagccctgtatggctgaaaacacgaaattagtgcctcccgcatcaagcgtcatcacgactcgttcatcatgttcgtacataggtttcaagatattagatgattgaattatttcattattaaaagcgtacgtaggcttttatcgttacacattcttttcctgccgatttaccatacggagcaatggtatattctttcactccggcaggaatgataaatgtttccgcataatgcaccacaaaaggttcaaaggcgtgagtaggactctcaacgacggcctcttctccctccagcagattcagcacatttacactatcgtttgtgtgatgcagcaccggtgacgagaaacggtgacgacgggtttcgataaattcattcggatgcaatccggtacgttcctcaatccacccatccccggaagccacttccttaaactggttgcgaagatgttcatttacatattccgtatcccggttccagttgattacgcatttaccacgttccacattgattgggcgtggttttccatccagtcccaagcgttgccagtcccatagtttgaaagtaaagaggttcggagtcgaactgatttcaagtaccatactattcgcaccggaacaatgaatcgttcctcccggaatcaggaagtgatcgtgtttctttgtcggaatcttgttgacatacttttctgcgtcgaac

SEQ ID NO: 11726 - DNA, 27463 bp, Unknown
  gut microbiota DNA sequence
gtatttggattgggagtagattataaattctaattgacctgatcttttttataacagaaattgagttaataatgaggaaagggagatagcattttcatctgttatctccctttttgttttttagaaagaatactgcatcagcaaatttaaccggttcgcgtgacgggttgaagagctgaaatctgtacgccaccctctcagatattcaactccgacctgcatattgttgctgacattccagaaggcattggctacaagatactggcctttacggtatgattccggatttccgcttgggtatccgttttcggaatatagtctggacaggctgtacgttccggagacaaagaaacttgggcagaagttgtactgtaatcctgcataccatcctaacataggaagaacctgcattttaccttcattgtccgggtcggggacgatatctacattcagattactcaagtcgttaagataagagccgattcccttaccatagtttaactgtccgtaagcttgtaatttttttgtgacattgaatgttgtagacgcttgcaaaccgaatccggttttggaataagctttgtcgtacacattacttgaataaatcatgctacgtattatagcgcttagtttgatatggctgctgctgttccagttatattgtgcggaagtggcaaagtccggcatacgttgcgtgttgatggaaatatcactgttggttgtaccgtctaccgaaggcatttccatagcgacaccgaacttccagtttttcaacttatcgcacatatagcttaattgtgtagtacggtagaatgctgaaccgttagggcccgcaaagtcgatagtgggagggagagcgacgaggtccatgaacgaaccgtaactgtaaccgatggtgaaaccgagaaattgtgcataagcattttgtaattcaaatgttttcccgtctccacgaaagtttccggcagtatagacaacaaagtctccgagatgcttcgtacgtcctaccaatttaaggaagagggtagaagtggtgatgtccatctgaaactgatttttagcgaaatttccgcttccacgttgcgggatcaacgccgggtagaaatccacatcatctacgataccgccaaagtcatattctgctgtcgcacggacgtagcctccgatacctaaagcgaattttcctttctggtcagtcagcaggaagcggggagcattcggatcatggaaacgcagttgcgaacggtcgttcataatccggatgatctcgtctcctgctttgtcacgggagataaacatgatggaattaggttcctcgtcttcgatgattacctttttctgcgcattggcacagagggggaaaattcccatccccagtagcattgctaccattttgaaactagtcttcattatcagttaagttttaggtgaatgcccaaagaacaactaaaaaaagaaatggttgagagaggcaaaggaaaaattgccaaactaatcggaagaattgctatttataatcattctaaaaagacggatctttgtaccgtagtaatcagataaagaaaatacgacgatggaaaaagtagaatttactcaaggaatattagcgatacagccggatttacatcgctttgcatataagttgacggcagaccgtgattctgccaatgatttggtgcaggattgtgtgttgcaggcattagataatcaggagaagtttacgtatagtaagaacctgaaggggtggatgtatacactgatgcgtaacatttttgtcaataactatcgccgtactgttcgcgaaatgaatatcatggatgataattattctatcaatcaacaatatcagattgaagatgaagatgcggatagatttgaatttacatatgacatgaaacatctgtatcgtgtgatacattcgataccggaagaaatgaaagttcctttccagatgtttgtggcaggatttaagtatcgggagattgccgacaagttagggttgccgatgggaacggtaaagagccgtttattctttatccgcaaacggctgaaggaggaacttaaagacttctctgcttaaagcaaagttcttgattttgagtggtgtgcctgtttttctatatatggataatagaattcggcagtcttgatgcgcttgtttcagttttattttctatctttgcaccccgaaagataaaataaagtatgatgccgtgaatagcggtcgtgtattctagaacaccacgtaaaaaacaggaattatgaaagaaaaagtatccgtaccttttatgctgctgggcattttatttaatgtatgccttattgcggcgaatcttcttgagacaaaagtaatccagattggtagtctgaccgtgactgcaggattgttggttttcccaatttcttatattattaatgattgtatcgccgaagtatggggattcaagaaagcccgcttgataatttggagcggttttgccatgaatttctttgttgtcactctcgggctgatagccgtagccattccagctgcccctttttgggaaggagaagaacatttcgattttgtattcggtatggctccccgtatcgtagctgccagtctgatggctttcttggttggctcgttcctcaatgcgtatgtgatgagcaaaatgaaaattgccagtcaagggcgtaacttttccgctcgtgccattttgtcaaccgttgtaggtgaaacggcggattcgttgatattcttcccggtggctttcggaggaatcatcgcttggaaagagttgtttattatgatgggtattcagattgtgctgaagtccatgtacgaagtgattatccttccggtaactatccgtgtggtgaaagctattaagcaaatagatggtagcgatgtttacgataccgatatatcctacaatgtactgaaaatcaaagatatttaagatagatttatgaatagagaagcagcattggttgtgttcagtggagggcaagactctactacgtgtctgttttgggcaaaacgcaactttaagaaagtgtatgctctgagtttcctgtatggtcagaaacatcagaaagaagtggagtttgcacgggagatagcccggaaagcggaagtggaatttgatgtgatggacgtgtcttttgtcgggcaacttggacataactctttgactgacactacaatggtgatggatcaggaaaagcccgcagatactgttcccaatacttttgtgccggggcgtaatctgttttttctgagcattgcagcggtatatgcccgtgaacgcggtataaaccacttggtaacaggggtttcccaaaccgatttcagcggttatcccgattgccgtgattcctttatcaagtctctcaatgtaacgttgaacttggctatggatgaacaatttgtgatccatactcctttgatgtggattgataaagcggaaacatgggctttggccgacgaactgggtgtgttggagttgattcgtaatgagactttgacgtgctataatggcgttcaaggggatggctgcggacattgtccggcttgtaagttgcgtcgggaaggattggagaagtatttaaaaagtaagaatcaataatatctctacacagagattaaaatgtattttttgctgtcatctgtcacattcttatagataaacaattgattataaattgtatatcttgtgacagcaagcagtgacagcagctaaatttgaagttttgttgtcacatctgttgtcaccggtaagctccggctagcaaatgatagtaagctttgtatctacggtagttttgtccgataagcggtggtttaaattagtttcaacagcttgaaactgttgtttcatcggtgagaaactaaagtttcagtggcatgaaactaaagtttccggtgcttgaaactattggttctgctgtaagaaactatctgttctccagtgtgaaacattctgtttcatgccgtgaaacacaccgtaacaagtaagatgaggataaagcaaacgtgggctgggagttgatggtgataggtgatagagaaaatacgttttttgtttagtgtagagctcgtaactagtaagtgcaatgactgaattaaaagaccagctttccttattgggaagaaaaaccgagtataagcaagattatgctccggaagtattggaagcctttgataataagcatcctgaaaatgattattgggtacgtttcaactgcccggagttcacaagtctgtgtcctattaccggacagccggactttgcggaaatacgtatcagctacattcccgatataaaaatggtagaaagcaagagcttgaaactctatcttttcagtttccgtaatcatggagcctttcatgaagattgtgtgaatattataatgaaagatttgataaagttgatgaatcccaaatacattgaagtaaccggaatctttactccacgtggtggtatttccatttatccgtatgctaattacggtcgtccgggaacaaagttcgaacagatggcggaacatcgtttgatgaatcgggagtaactgataaattgtatttggaagaaaaagggagataaatgatatttcccttttattacaacttattggggaagcttttttagcaattccaaagtattgggttcgatagtcttgtccatgtctgcattggatatgtctatatcccaaaacaagtggtgggatagttttgatatgtaatccttactttcttgcatattatccattatattctttacaaagaaactgttttatttgaaatcagccaaacagattgactcttttaacatgacaggctatgtttttattcgtgatgatacggccctccatttaatatagtcatagctcgataaatctgctccacgaatatcagtcggatcatctggtgcgagaaagtcatctttgacattgaaatcttttcgtgtgccgcttgatatactttttccgaaaagccatacggtcctccgataatgaaaaccagtcgtttattcaccgtattcattttccgtttcatatactcggcaaattcaagggaacgcatctctttcccgtgctcatccaataataccaccacatcacccggttgaagggctttcagaatcagctccccttccttttctttctgcacctccatcgaaagactttttgtatttttcagttcggggatcacttccatatcaaaagtgatataacgtttcgtacgctgtatatagtcgttgatagctgtaatataatgctgttctacggttcgtcctacgacgagcaaggttgttttcatatctttgcaattgtatttaattgcacaaaaataggcattttttatgttattctgcaattaatgcttacctttgcctatcattagttgaaagtttaagtctttaaactacaacttaaaagcttgtatttatgaaaaaacgagtgctcgtaggaatggccgctttgcttctttccttctcgttgctaatggcgcaggagataccggcaggagtgattacggcatttaaaagaggaagctcacaagagctgagtaagtatatgggggacaaggtaaacctggtgctccaaggtagctcgacaaacgttgacaaacagaaagcgaccgctgtgatgcaagacttcttcacgaagaataaagtcaatgggtttacagtgaaccatcagggaaagcgggacgggtcaagtttcgttatcggtacgttggccacaacgaacggaaactttcgtgtgaactgctttctgaaaaaagtacaggataaatgtttaatacaccaaataagaattgacaaaatcaatgaataaggaaaaagaactgatcgacaaactgatcgatcttgcttttgcagaagatataggtgatggtgaccataccaccctgtcatgtattcccgctacggcaatgggaaaatcaaaattgcttatcaaggaagtcggtgtgctggccggtatcgaagtggctaaagaaatcttcaatcgtttcgacccgacgatgaaagtcgaagtgtttatcaatgacggtgcggaggtgaagccgggtgatgtggcaatggtggtggaaggtaaggtgcagtccttgcttcaaaccgaacgcctgatgttgaacgtgatgcagcgcatgagcggtatcgcgaccatgacacgcaaatatgcgaagaaacttgaaggcactcatacccgcgtattggatacccgtaagacaactcccggtatgcgtatccttgaaaagatggcagtaaagattggcggtggcgtaaatcatcgtatcgggttgttcgacatgattctgttgaaagacaatcatgtggattttgccggaggtatcgacaaggccatcacccgtgccaaagaatactgcaaggaaaaaggtaaagaactgaagatagaaatagaagtccgcaacttcgacgaactgcaacaagtgcttgatttaggtggtgtagaccgtatcatgttcgacaacttcactcccgaaatgactaaaaaggcagtagaaatggtggctggcaagtatgaaaccgaatcttccggcggtatcacctttgatactcttcgtgattatgccgaatgtggcgttgactttatctccgtcggggctttgacgcattccgtgaaaggactggacatgagcttcaaagcgtgctgatttttttcaccacagaggacacagagtacacagaggaataatgataggaaattcttcctataaagtaagtttaaatcctctgtgtactctgtgtcctctgtggtgaatctgtttaacttcttttagcaatatccattgcagcattcctcaaattcttgcgtctaatgagtaaaacgacgcagacatacgtccgattttaaaaaggtaattgactttggaaaacgagatagaactgataaagggctgtcgggcaggaaaggattcagcccgaaaggaactttacaccctctattccaaacaaatgctggcggtatgtttccgctatacgggtgatatggatgtggcgcacgatgtactgcatgacggtttcatcaagatttttaccaatttctcctttcggggcgagtcttcgctctgtacatggataacccgagtgatggtgactcaagcacttgattacctgcggcgggagaaacgggtaaatcagttggtggtgcatgaagagcaacttcccgatatccccgatatatcagattcgggaggaggggcaggtatctccgaagagcaattgatgacatttgttgccgaattgccggatggttgtcgaaccgttttcaacctttatgtgtttgaagagaagtcacacaaggagatagccaagctgcttcgtattaaagagcattcgtctacttcgcagttacaccgggccaaatatttgttagcaaaaagaattaaagagtataggaaccatgaagaaagaaaatgatgaaataaccgatctgtttcgcgcacgtctcgccgataccgggatgaatgtacgggatggtttttgggaagagctttcgcaggatattcctgtggcttgtcaacatcgtcgtcggctcctgctcttccgtgtggcggctgcggcgtccgtactgcttgttctggcagcttcgtcggccactttcctgtatttctcacctaaagaagagatggaggaagcgtttaccaagatagccgcgacgaatggagggcagatggatggagacgggatacgtgtcaatcaactgccgctgccggtagaaccggtattgcagaaaccggctcctcagtcattcggaatgttgtcgcaatatacggaagatgaggactcgcttgcctttactttctcgatgtcgttctctttctcgtccacggctacagggcatgagcgcccttacggtaacgaacgccatagtggttattggcaggcagcgaatggaaatacggaaacttctgtcggccgggaggaagaacgggcggatttacctgtgacttcggagaaaataatgaagaaacgttgctgggctgtgaaagctcaagtaggcatggcgcttccggcagaggacggtacttacaagatacctgtttccgcaggagtaacagtagaacgaaagttgaacgactatctggggatagaaaccggactgctttattcaaatcttcgttcggctggacagcatttacattatctgggtatacccgtgcgggtaaacgtgacactggtagatacgaagaaagtagacctttatgctaccgtaggcggagtggcggataaatgtatagccggtgcgtcggataacagttttaaggaagaacctatccaattggcggtaactgccggtattggaatcaattataagattaatgaccggcttgcggtttttgccgagcccggtgtttcgcatcatttcagtaccgattcgaaactggctacggtacgcacgaagcggccgactaactttaacttgctctgcggacttcgcatgacgtattaacccttatgaaaatgaaaaaaacactattaatgctgtggatggctgtttgcctgattgtatcttttgcgggatgcagtagcgaagaaatggattataacaatccggatgttgatctctttgtgaaacaattgaaggcgggtacatataaaatgaagaatgataaaggagtggtggaagtgcctcatttcatggaggaggatattcccgaacttttgaaatatgcggaagatctgacaattattccttcgtttccgtcggtctataatacgaacaacggtaagatccgtttgggtgagtgtatgctttgggtgattgagtatatccgtcaaggtacacctccgtcgttaggctgcaagatggtgctggcaaatgctgaaaattatgaggccatctatttcctgaccgatgaggaagtgctcgatgcagctgcctgttaccgtagctggtgggaggaacggcaatatcctaaaacccggtggacgattgacccgtgtcacgatgagccactttgtggaacaggctatcgttggtggtaaaaaggagagagccttcggaagataaaaaacaataaaaaatgaggaaacgtttatttatatcggcagtctcactgctgctgacaggggtatgctatgcccaatggtctgcgcaagattcgctcaaactgcaaaatttgttggagggcagtgaggaactgaagttgaatccgaaggcggtcaagcagattgatttcggtggtgcggtgggtactccccgtatgtcggaggaaaagcgttggatgttgcccgatgagtcgcttcccgaagcactgcctaaaccgaaagttgtgttgactcttatgccgtataaggcaaatacccgctataactgggatcctgtttatcagaaaaagatcagagtgaacaagaatacatggcggggagattctttctatgaattgcgtcggcagagattctatacgaaccggacacgtaaccggaaagcgaatgaaatacggataggggagaatgtctcagtttgtggcggaactattagcgggcttgatttgatggctgcctttacgaaagaattctggaacaaaacaggaagagataaccgtatccgcacgttagaagtgttgaaaacttacggagattcaactaccgtgttgataaataaacctatcgaacagattacccggtaaaatcgttatataaatgtattgatacattatttattatgaacagaataacttctcttctagggatccggtatcccattattcaaggtggtatggtttggtgtagcggttggcgactggcttccgcagtgagtaacgcgggtggcttaggactgatcggtgccggttcaatgcatccggagactttgcgcgagcatatccgtaaatgccgtgtggcaacgaaatttccttttggggtgaacattcctttgatgtatcctcagatagaagaaataatgaatattgtggtggaggaaggagtaaagattgtctttacttctgcaggaaacccgaaaacgtggacaggatggttgaaagaacgtggtattacggtgattcatgtcgtttcttcttcccgttttgcagtgaaatgtgaggaagcgggagtggatgcggtagttgccgaaggttttgaagccggcgggcacaatggacgtgaggaaacaacgactttttgtctgattccggccgtgcgtgaagctactacattgccgttgattgcggcaggcggtatcggtacgggtgaaggtattctagcagctatggtgttgggagccgagggggtgcagatcggaacccgttttgccctgacggaagaaagctctgccagtccggtattcaaagactattgtttgagtttgggtgaaggagacacgaaattgctgttgaagaaactggctccgacacgtttggtgaagaatgcttttcgggaagctgtggaggaagcggaggatagtggtgctactcccgaagaattaagaattttgctcggacgcggtcgtgccaagaaaggcatattcgaaggtgatttggaagagggtgagctggagatcggtcaagtatccgccattatatcccgcagacagtcagtatcggaagtcatgacagaattggtggaggcttggcaacgggcggcggagaagaaatatttctagtaaaggctgtatcataattcaccacagatttacacggattttctcagattagattttaatatatcaatatctattatccgtgtaaatccgtgtaatctgtggtgaaaatgagcgttaaggcagaaggctgtaggctgagatgaaatgaatgccggagtggttggttacagacattcgctgccctgcttattgattttcatgctttttccatagagacccgctcgggctatgttgttataaaagggttctgctatatcgtatttaaaaggaagtatttcttgattttctttgtctatgtatccccattgtattttacctctggccggagctaatccctcagagaaatgaccgattgccgaaaaacgctttttcttattagctaccctgtaggctaataaagatgcaaaaaactttgtaataatgttgttcattttacgattgtttgttgtggtagtatgcgtccggataccgtatatatacaaaagaagcgtggacgtcgttagttcatcctgttcagggctctggtaagcctaacggtgaatgaacaacagagtccacgcccttgcatataacaaagacgtgaacgcttagttgccattatcccaccgttaatgaatttaccagattctgaacagagataatattctaaacgcttctacgttattaatcgtaataagtggaaacaaagatattgttttcttgttgaataacaatgcttttggaggataaatatgaaaaaagagtagttttaattcacctgtttgggataatcacttggtgacatacctgttattttcttgaatataaggctgaaatgctgtacattcggatagcctaattgacgggaaacggcagtgggtgtggcaccgtatttcatcagcattcgtttggcagtctccaatcgtttgagttggaaatactgttccaaagtcttgcctgtttcaaatttcagcaggtctgtaaaataaacaggagaaagattgagcctttccgccagatagtcgggtgtagggagtttgccattttgtaatttccccaactctatataattttcaagcaactgttccatttttctaagaattgtcttattcttgttttcacgggtgataaattgacgttcgtagtaacgagtgcagtaatccagtaatagttcgatatgccgtgaaaggatagtcctgctatgtgtatcaatcgaatgatgcagttcttcctctatattccatagacagcaggtgactttctctgtttcacgttgtgatagatgcaatgcctcttctttgtggtagtggaagaaggtgtaattattgatatggttcttcaatgtggtctgaaacagcaagtccggatgaaacaccagcaaaaagcctttgctgggtaaggtcttttccttgctcattcggaaaacttcacccggcttaagaaagaccattgtcgcattggaataatcataatacttccggccgcaacatgaacattcgtccggacagtcttctatcagtaagatagcgtagaactcgaacttgacagtatcctgctccaggcacggattctctaaattaataagactcacctgaggatgcaatgttttgcagtccagacaacgattgcattcatgtacggtatttaagtccaatgtatttttctgtttcatattcttttcacagattattctgtatacggtattcgttaggagtacatcctacccgttttttgaacaggcggcaaaaatgctgcgggtactggaatcccaatgagtaggcaatctggctgactgtatcttctgtgccgatcatacgttcctttgccatttcgattactttttcctgaatatgttcctgtggtgtcctgccggtttctttctttaccatatcgccgaagtaattgggggaaaggcatattttgtcagcgaaatatttgacagtaggtaagccgttttgttctgcaaaagttcctgaaaagtagttgtcaagtaattgctcgaaacgtgtcaacacatcatggttcgctttactgcgggtgacgaattgtcgttcatagaaacgcatacagtagttaaggagcagttctatatagtttacgagcaatgttttactatgcttatccactccgtgctctagttcaaggcggataattctcaggcaatccataataatattccgttcctcttcagaaagatgaagggcttcgtttacttcatacgagaagaacgtgtatttcttgattgtcttgccaagtgatgttcctagtaataaatccggatgaaaaagtatgccaagcgcattcacttgcacgcgatctgtgatcaatgtcgtttccgcatcctgtccgggagcaaaacatacaatggttccttcttgataatcataattttgccgcccatatctgatgtcacacgctttttcgagtttcaggtaaagtgcatagataccataatgccagtgtgcataattcatctgccgggtggctttatttaaattgatcacactgaccaacggattcaaagtttcaaggccgtataatttattgtattggtctacactgcccaagttgaatatcttgttcataattattgctgtttaatgttttaaaagcacttccgttgtatatcgtttacaaaaatacgggataattctgtcattctaacaaccttaattacggattatataacctcagttacggattccaccttacttacagctttcgtcagtattataaaatctgtaattcaggttatgattgagatgtagtatcagtaatttgtctactggggttaggcataaatctatctaattttgcaacattcctaaaagggaatagaaaaatgattgataacataaataatagaatgtatgagacgaacattgaacttttcgcgtgtagtaatgacagtatgtctttgtattgcaggcaagctgttgtctgcaggtaatctttctgacagaaataataagtttacggaaaagaaattaaacctgattcaagagtgggacaagacgtttcccgaaaacgataaagtacgtcactcgaaagttacttttcacaaccgttatggtatcacgcttgctgctgacttgtatatccccaaaaatgcagaaggtaaattgtcggcaatcgccattagcggcccgtttggtgcggtgaaagaacaatcttcgggactgtatgctcaaacgctggcagaaaggggattcttgacgattgctttcgatccgtcttatacaggtgagagtggtggtgagcctcgttatgtggcttcaccggatattaatacggaagatttcagtgcagcggtggattatcttgccaaccgtgacgatgtggatacggatcgtatcggtatactcggtatttgcggttggggtggtatggcactcaatgcggcggctatcgatactcgaatcaaagcaacagtaacggttacgatgtatgacatgagccgtgtgaatgctaatggttacaatgatataatggatgctgccgcccgttatgaattacgcaagcaactcaatgctcagagaaccgaagactaccgcgatggttcttatacacttgccggaggggtgattgatccattaccggatgatgctccacaatttgtgaaagaatattacgactattacaaggccgaacgcggttaccataaacgttcactcaattctaatgatggttggaataagacttcttcgctttcgtttatcaatatgcctattctgtcctatagcggcgagatacgtagtgcagtgctgatgattcacggagaaaaggctcattcccgctactttagtgaggatgcgttcaagaaactgaaaggtgacaataagggattattgattattcccggagccaatcatgtagatttgtacgataatctgcaagtaatcccattcgataagatagaacagttcttcaataataatttgaaatagcagaataaatatgatacaatgaaaaaactccctttgctgatgagtttgcaaagggagtttatagtgaatatcagaacaactctaattggagagattcggattagcttcaatagcactttgaggaatgcgtaaggtatagcgttcgtcattctgttccaaaatgatggtctgtccgctatataaagttttttctattctcggacgggtagtacggcgtaagtcaaaccagcgatgaccttcgaatgccaattcgcgggcacgttcatccaatatttcagaaattagaatctcttgttccatcttatttatctcattctttttcagctcatatttttccggattatatctcttttccattaattgtaataagcggtttctagcttctggtaaatgacctagacgggcagctgcttctgcagaattcaagtaaagttcaccgacacggaaactacatttataatctacacttccgtttgttttaattatgggataataatcaacttcattgtccttttctccgaaatatcttatggggcgtaaatctccttcactaaacatatctacaaatgattgtgtagcttttgatgcatctaatgtgctggttggctcataaattctctcatacgcagtaattgattcaacagaggtatataaattggctttggcatccggattattgtaatcttcgagtgtcgctttttgttttaagacacgttctgctgcatcgtatgcaagttgccattctcctttgtaaaggcgtacccgtgcttcaaaagcatctacggaaagagtgttgaacctgtaattataacctaattcccattctttttttgtaatgagatttcgtgcgctttctatgtcctcaagaatagaagtatacacttcttctactgtattgcgtgatggaatctcttcaaggtcgagggttagtttcaatggaatggattttgtcttcggtgcaccctctttagtgtaaggttgcccgtagaagttgaccaaaaggaagtgcatatatcctctcattaaataggcttctcccaccaattggttgatgtcctgttcgcttccttccgttatttcatcttgcttgtcgatgatggcattggcataatatatattttcataataatctagccagccgaattctctggcagatgtactattgtttatccatttttctatatcgccgtaattattttggtctatgttgtctttttttacggtgatgtcttttgtacgcatatcacaaacactcctgtctaaaaggtcttttgagtatgccgtagtcatcaatgctctatattcttctagagtgttggggatgacttttccgacaggctgtatgtcaaggtagttactacatgatgtcatgacaatgcaacctgtcaatacaagaaatctgtatattgattttattcttttcatattggagaattacttaaaaattaagactgaggttgaatgttactgatttgggcactggagtggaatagagattgctcattgattccgggtccatatagtttttataactagagccaaaaactaatagattacgtccttctacagcaacagtcgctccgttgatgttgattttacggagccattcttgcggtaacttatatgctagtcttatattctgtaggcgtacatagttgagacgttttacccataagtcaaggttcttataaatggcaggcagatcaccgaaaagtgcataatcggcaggataattattttttgtgagtaaagccggaaactttccactatggttttcgggtgtccagcgttcaaggatatcctgatttgtattatgtccggggtcaaatccgacaatatcgtaagaaggatttgtacgtacatgtgcaccaaagtaatatgaaaagttgagattcaattcccaattgcggtagttgaatgtattgattaaaccacctgtgtagggagcgtcatttgttccggcatattcgtataggctttgttggaattctgcagtcgcatcatactcataaaagcctccaagtcctccggttaggtctaccatttcgaataatttttcaacagtaacagcttcatcgcttccttttggatagataagtatgcgtcctgtttccggatcaaccttgcttttgattgcaaaaatagtacctactgggtaaccttccagtcctggagtcgggctgttttcctttttatgatctttaagtactttgttgttgttataagcaaaattgaatgtagtgtaccaagaaaaatccttagttgttatattacgggtttgtaggtttatttctactcccttgttctccatgctggcccaattgattgcttgtgaggagaagccgttttccaaaggcaagtccttgtagccgataaggtcacttccccttctgtaataatagtctatactgagattgatggctgatttgagtacggagagatctattccggcattgtaagacgcagtcttttcccaacgtagtttgtcgttgggagctgaaccgatggttataattgtctcatttttatcaattactgtttggttactataattaccgagtaagaaaggagaagtatttttatcaatattaccttgcagaccgtaggataatctcaaagctaaattatccatccattgattagccggtttcaagaatgcctcattggagattctccataatccactgatagagtaaatgggtaagaaacggtacttcttgtctaccccgaatagatcggagccatccatacgtacgcttgctcctaatgtgtagcgtttcataagtgtataggaaccgttagcatagaaagatgcaaaagcgttttctgtataagattttatgtgcagcgggtaatcgtcagcgtctctcgggtcaatgttaagtggctttgttgtgagtgtcttaggatcataaccataagcggtggatgcaagtgcatcataccaatttttgcgtatttccgaaccacccataatttgtacctcatggatatctttgaaagtctggttccattcgccttgtatcttccaagtgatttgcgaggtagtggagttgcttactttatgcattcctccttccggaataatatagctctctccatctttgctctcttcgcgcatataacgcatggagaatgtgtttggaccgatatattgttcaactttagactgctcccattgcaatccgacttgtgaagtcactttccaatgatcattgaaacgtaaatcaacattgaagatcgaattgatagcagttgtcactgtctctttactcgtattgttacgttcttcaaggatattgaaccctcgtttggggtccggttcgttatcacttgtcgagcggatatcgtagtcgtagatatagttattttccgcatcgtatatttcctgatatgggtttgccacacgcgaataataaattggatttgagtaaccgtatttgtcacttacaaaatcttggttcttccgtcggttggcaaatatggaagcaccgatttttagcattcggtttacctgataagaggttttgcttgtcaggttaaaacggctcatatcaacacctggtacattaccattttctttagagtaacttaatgaattgtaataggtggttttttcgctacctcctgaaatactgaaattgtattcttgggtaaatgcacttctgaacaagaggtcgttccaatcagtattaattgttttcaatcggttgatagcgttttgagcctcactgcttaatccgtcccatccttgctgttggtaagtttcaaataaattgtattgccttaagacagaagcgactcctcccttgcgataaaaaggatgggcagtgaatatgtcatccggttctttcatcaattccaattccaaattgactttctgttcggaatttaatagattcaatcgcgaagtattcaaattgggcgtataactcaatcttgtgttgaaattgactataggtttacctgtgcgtcctcttttggtagtaattacaattacaccgtttgctgcgcgtgcaccgtaaatggctgttgcagcagcgtctttcaaaattgtaatactttcaatgtcgtacggactgattccggcaattgatgattgtcctatatttacaatatcattatccgtatcactgtctaagtccggaatatccgtcccttccaatggaattccgtccaacacccacagcgggtcttgcgttccgtttaacgacgctgtaccacgaatacggatacgtgcgggggcacccggagcaccggaggttgtcgtaacggatacaccggctatttgtccggctaatgcctggtcgatactttttgcggcacctaccattgcatctgtaacatctactttggcaatggaggcggtcagtttgcggcgttccaactcttgataaccggttactactacgtcccctaatgtatgtgatgaggcttgaagtacaatatggtaattttcttttccagactgtaatggtacactttgttcttcaaaaccgatgtagctacaatgaatccgggttactttttccgggacagacaaggaaaactttccgtctatatctgtaatcgtacctagagatgtttgtggtactccggcttttttcagttcatcggctgatacgtaaactgaggcgccgatgagtggctcattatcttcaccggagattacgattccggtgatagtgcgatttgctgcattggcaaaaaacaatgcgttggcgaaaaggcatatcaaaatacaaagatgtctttttctcattaattgtaaatgtttagtgattgatttgttttatttgactcctagagctgtgttaattcgtaaaatcatatcttcataatggtagcgtgtagccgtatcggaagttccgagacgattctgcaacagcttcttgatacgtaacaactcaccgcgctttactgagattgcatctgagatgcggttaagctggctaccgtagaagttgagcacacgtggagctcccatgcggtcttcctggcgaagtgcccgttgttcagctgcataacaactacagaacggagtggcatggtcaagcaagaagtgctcatcggcaatctttttgttgatttttactgcttcgggttctgctgcggctgtcagcaatgcatcaaggaaattcttttgtaaagaacgttccatgacattggggacacctccccgttcggtaactccaaaaatatttttatgaagtccatccatcagttctactaccgtaaaggcttttttcccattgacggattcattttcaatcatacgcatcaagcgattgttgcccagtaaatcccaaagaatgtaagcctgtgcatttttgagaatctgagtaggagcgttctcctgttttcccaccggagtattacgcagaagataggtgtactgtcccacttccgtgtcaaacaaccatttaggataggtcaatacctcattcaacaggaacttaagtgcggcctgctgcttctctttttctacgaatgtataggtcttgatgccatctcccacagttgtattttcgatataaataccaccgatgttggcgagtacatgatataagtagttgttccactgattgatgacagcataatagaggcgtgacgcttcttcataagtctgtcccttttctccggttgtagtccattggagaatctgtggcacaatacgtttcaggttttcaatacccagtagggaggaacgaaccgggtcgtcacctaaatcttcattttgtgcgcgcggatctactgcgtcacgaacatcttgtgcttcgctatatttatagaggcggtcggtgtgtttgctcaaaaagttaaataagagagttttttcttcttccggagtatttttcccataccaacggtaaccgtattcgatagcgaacatatcgtatggaccgatgtgtggagaaagaaccttcacaccgtctcccggttgggcgatatagttgaagcgtgcataatccataatggatgaagcagtagaattcattctggaagtgaatgtttcggaacgcaatgaatccgtcgggaaagcccacgatcccatcatgttatgacgtaaccccaatgagtgtcctacttcgtggcaggcaacgaaccggatggcgtctcccatcaagtcatcaggcagttgtactttgcgtgcttcggggcaaacggttccggtctgtaccgtaatccattcacgtaccatagaaagcacgttgtgccaccacatgatatccgcttccagaatctctccggaacgagggtccagaagagaaggtcccattgcgtttttcttttccgaagcagcgtatgtcagcacggagtaattgacatcatccatgtctacgtgcatactgtccgttatttctttggcgataatcgcatttttgaaaccggctttttcaaaagcgacctgccaatcttcgattccttttttgatgtacgaacgccattggtagggagttgagttatcaatataaaatacgattggtttggcaggctccacaatctgtccttttagataggcttcacggtcttccggtttcggctccatgcgccaacgggtaatgtattgtgtcttgtccgttccttgttgggcgtcgctaaagttcaataaagggttggtgaagtatccgactttctgattatcaaaacgtcccatcatcggcgtttcgggtaataaaagaatggaagaactgacttccactgtcacatacactgttgtagttccttctgtcactctggttgtcagctcggaagttgccacgacattgtttgagaaagatttgatagacaggatacgtgataaatttttgatagccgatgtgcccaggttgatattggtaaacacattattgatactggtttccgtgccgtcataaatatcattcactttgattaccaatgcagtagaatcggcattgacagcttcgattttgaatgcggcaatcaatggagaaataaaattatcttgtaccgaacggaaaatggcgtcagtgcggggcgcaagaggtaacgggcgttgttggcggaacatcagtttgccacttgctttgtcccattccatgcaaaccatctgattctcgtagtttactccacgattcacacctgcctcattcaattcggctggaacccgttgcagtttattgacaaccaataaatcgcgtcctaaaagtgcggtaggaatttcaaaatagaaatcatttttcttttgatgtacagcaaacattccttttgtcgttttgctgccttccactagtttctcgtagtcacttttactcttctcttctctctcttctggttttttctttttcttcttaaaccaactcagattttctgtagcgggggtaattgcaaatgccgaaagggcttctccactcagcaatatacatgcaatgaccgctgccattactcttacatacattctcattgagttctttatatttaattataattaaaaaaacggatacaaaaatacaaatataatggatttaaggcaataatgaatctaataataaaagaattattaactagtctcttattgcatcattctttctggatatttcgtaatttagttggaatagtgtacatttgccggaagtaaaaaagagaatggaatgataaaacaatatatcactgctttgatgttggctggctgcatcggaggttatgggcaggaaaaaaagcaagcgacttttatacccccttttgattttcctcttacattgagcggaaatttcggtgaaattcgttccaaccactttcatggcgggttggattttaaaacaggaggtgtgatcggcaaaccggttcgtgcccttgccgatggttatatctcgcgtattcgggtgactaacggttcggggtatgtgcttgatgtctgctatcataatggatattctactattaaccgacatttgagcggttttatttctcccattgccgaaagggtggaggaacttcaatatgagaatgagagctgggaggttgagattattcccgaaccggatgaatatccggtaaaaagcggacagcagatagcttggagcgggaataccggatattctttcggtccgcatcttcatttggatatgtttgaaacggaatcaggagattatatagatcctatgcctttctttaaatcaaaaataaaggatacacgtgctccgaaagctgatggtattatgttttttccgcagcccggtgagggagtggtagacggaaaacaagggataaaaacgatactcccgaatagtgaacgtccggtggaggcgtggggggtgataggtacgggcattaaggcatacgattacatggatggcgtaaacaaccattacggagtatattccgttattcttacggtggatggtaatgaggtgttccgtagtacagtagaccgtttctctcaagaggaaaaccggatgatcaattcgtggacgtacgggcaatatatgaaatcttttatcgatccgggaaatacgttgcgtttgctgaaagcctcaaatgaaaatcgcggtctggtcacgattgacgaagagagggattatcaatttctgtatactttgaaagacgcttttggaaatacttcaaaatatagctttgtcgtgcgtgggcgaaagcagccgattgaacctttcaattatcgggaaaagtatttctttacttgggataaaaccaattatctgcaagaaccgggattgagcctggtggttccgaaaggaatgttatataaaaatactccgctcaattatcaggtaaaagccgatagtggggcagtggcgttcacctatcagattaatgataaatccattccgcttcatgcgggttgtgaactccgtatcggactgcgtaggaaaacggttgctgatacggccaagtattatgtggcacgggttactccgaaaggaagtaagtacagtgtaggaggaaaatacgaagacggatacatgaagacgtctattcgtgaattggggacttatactgtcgctgttgatacggttccaccggaaattatccctgtcaataagaatcagtggggaaggaatggaaagatagtctatcggttgaaagataaaggaagtggcgttgcttcttatcggggaacgattgacggaaaatatgcacttttcggacggcctaatattgtaaagtcttattgggaatgcaaacttgatccgaagcgtgtgaagaaagggagaaaacatactgttgaatttacggttgtcgatcattgcgggaatacgagtattgcccgtgaaagttttgtctggtaattataaaaaatgaatgatatattatgaagagaagtattattttgtgttttgccgtatggatgacggctgtggcgaatactttcgcctgtactaatttgattgtcggaaaaaatgcgtccgctgatggttcgaccattgtttcctattcagccgactcatatggcttattcggagaactttatcattatccggcagctacgtatccgaaagggaccatgttgaaagtgtacgaatgggacaccggtaaatatctgggagaaatcgagcaggctcgtcagacttataatgtggttggcaatatgaatgaatatcaggtcactattggggaaactactttcggcggtcgtcccgagttgacggattctacgggtattattgattatggaagtttgatttatattggattgcaacgttcgcgtactgctcgcgaagccataaaaattatgactgatctggtacaggaatatggatattatagtgggggtgaatcttttaccattgccgatccgaacgaagtatggattatggagatgattggtaaaggtcccggcattcgcggagcggtttgggtagctgtccgtgtgccggacgattgtatctcggctcatgctaatcaagcgcgcattcatcagtttgatatgaatgataaggaaaactgtaggtactctccggatgtcgtttcttttgcccgtgagaagggatattttaatggagtaaacaaggattttagtttttcattggcttatgcccctcttgattttggtgcacgtcgcttttgtgaagctcgtgtatggagttatttcaacaaattcactgatagaggaaatgaatatcttccttatatcgaaggaaaaaccgatactccgatgccgcttttcgttaagccgaagcagaaattatccgtgcaggatgtgaaaaatatgatgcgcgatcattacgaaggtactccgcttgatatctccaatgattttggagccggtccttataaaacaccctatcgcctttctcctctgaactttaaagtcgatgataaggaatatttcaatgaacgtcctatctctactcaacagagcggttttgtatttgttgcacagatgcgtgctcatatgccggatccggtagggggagtactttggtttggtgtggatgatgcgaatatgactgtatttactcctgtttattgttgcgctactaaggtgccggtatgttatacacgtgtggatggtgccgactacattacgttctcatggaattctgctttctggattttcaattgggtgtccaatatggtttatccgcgttatgatctgatgattggggatgtgcgggaaacacagaaagagatggaaagcacattcaacacagcacaggctggtattgaagaaatggcagtcaaactattggaaaaggataaggatgcagcaatcaatttcctgacaaattatgctaacatgacagctcaaagtacttttgatacttggaagcaattgggtacgttcctgattgtaaagtacaacgatggggtagtgaagcgtatgaaagacggacagtttgaacgtaattctatcggacaacctgcaggagtgcttcgtcccggatacccgaaagagtttttgcaggagtatgtgaaacaaaccggtgacagatatttagtgaaatagttatttaatggataatcgataattatccattaaataactaggaattgtaaacttattattttacatttgtgtgctcaagaaaatagcaatgaataattcattaaccaataaataacaatcgaaatggaaaatcaggaactaattaaacaggtcactgagaaagccgaaaaatggctgaccccagcttatgatgctgaaactcaggctgaagtgaaacgtatgttggaaaacgatgataaaaccgaactaattgaagctttctataaggatttggaatttggtacaggcggtttgcgcggtatcatgggggtaggtagcaaccgtatgaacatttatacagtaggtgctgccactcaaggactttccaattatctgaagaagaacttcaaggatctgccgcagatttctgtagtagtaggtcacgactgccgtaacaacagccgtttgtttgcggaaacttctgctaatattttctctgccaatggtatcaaagtatatctgtttgacgacatgcgtccgacaccggaaatgtctttcgccatccgtcacctcggttgccagagcggtatcattctgactgcttctcacaatccgaaggaatacaacggttacaaggcatattgggacgatggtgcacaggtattggctccacacgataaaggtatcatcgacgaagtgaatgcaattgcttctgctgccgatattaaattccagggaaatccggatttgattcagattatcggtgaagacatcgataaggtttatctggatatggtgaaaactgtttctattgatccggcagctatcgcccgtcacaaagacatgaagattgtctatactccgatccatggtacaggtatgatgttgattcctcgtgcattgaaaatgtggggattcgaaaacatatttactgtgcccgaacagatgattaaggacggtaacttcccgactgtcgtatctccgaacccggaaaacgcggaagctctttctatggctgtaaaccttgccaaagaaattgatgctgacctcgttatggcttccgatccggatgctgaccgtgtgggtattgcttgcaaggatgataaaggcgaatgggtactgattaacggtaaccagacctgtatgatgtacctttattatattctgacacagtacaaacaactgggtaagattaaaggtggcgagttctgtgtgaagacaatcgttacaactgaactaatcaagaaaatcgcagataagaacaatatcgaaatgcttgactgctacaccggatttaaatggattgcccgtgaaatccgtctgcgtgaaggcaaacagaaatatataggtggtggtgaagaaagctacggattccttgccgaagatttcgttcgcgataaagatgccgtatcagcttgctgtttgattgctgaagttgctgcatgggcaaaagataatggtaaatccttgtatcagttgttgctggatatctacgtagaatacggattctctaaagagtttactgtaaacgtagtgaaaccgggtaagagcggtgcagaagaaatcaaagctatgatggagaacttccgtgccaatcctccgaaagaattgggtggctctaaagtgatcttgagcaaagattataagacgctgaaacagacagatgataaaggtaacgtaactgcaatcgatatgccggaaccatctaacgtacttcaatatttcactgaagacggtagcaaagtttctgttcgtccttcaggtacagaaccgaagattaagttctatatggaagttcagggtgaaatgggttgccgcaattgttatgcttctgccgaatctgctgcaatggaaaagattgaagcagtgaagaaatcattgggtatctgattttgtttcttctgaaatttcagatatagataacgaaagataaataataaatagggatattcctaaaataataaaatttaaggcaactacttcattgcgaattagttgccttttttgtatc

SEQ ID NO: 11727 - DNA, 8721 bp, Unknown
  gut microbiota DNA sequence
gttagtaggtaaacaaaatccttttttttcttgctaatatcaaggattcttattacatttgtgatacaaaaatattagccgtatcgactggatcgggaaactcttcaaattaatctgatgcaccgagaaagcttcgttcttcaatggcgggccacatccttcgggacagctttaagccggtggattacaaagaggacgagcgctcaaatcttgttctatcagagtttcatcacatcgtcggtacggctttcttatatacttttctatgatattttatttctcaggtacaggtaattcaaagtggatcgctaatcagctgtctaaggaacaaaaagaggatttagttttcattcccgacgcattgaggagtggagtgttggagttttgtcttaaagaggaagaaacgattggattcgtgtttcctatttactcgtgggcgcctcctgagattgtattgaactttatccaaaaactctcgctgaaggggtacagagggcagtatttgttctttgtatgttcttgtggagatgatatcggcttgactcaacaggttctgatgaaagcgttcagacataagggatgggaatgtcatgtcggcttttcagtcaccatgcctaacaattatgtattgcttccgggatttgatgtggatagcgaggaactggagaggaagaagttggcagagagcgtcgcggaacttaaaaggataaatactttgatcagtaaaagagaacacttgttttcctgtcacgaaggcagtattccttttattaaaacgagaataatcaatcctttattcaatcgttttcaaatgtcacctaagcatttctatgtaacagatggctgtatcggatgtaggcgttgtgagaagaattgtccgatggagaatattactatgtcagaagggaagccggtctggggaatgaattgcacctcatgcctggcatgttaccatgtatgtccccggcaagcggtgcaatatgggaaaagaacaaaaggaaaggggcagtatttcaaccccaattccggctattgatctttgattttaatgctgcaatgagataggtcttcgatgattgcaaggctttctactctgacaccctgctcttccagcactttgcgtccgttttggaatgctttttcaatgatgaatcccattcctaccagatttgctccggactgcttaatgagatcaagaacacctaatgccgcatttccgtatgcaaggaagtcatctacaaaaagtatgttgtcatttggagtcagaaaatcggagctgataacaacttcgtaatcacggtcttttgtaaacgagtggacggtggtacttagtgcattctgaatcgttttgggagatttctttttggcaaatacaacaggcaaatccatcaggtaacctgtcatgatagccggagcaatgccactggcttctattgtcatgattttatttacgtttgtggctgcaaaacggcggacaaattcgactccgattgatttcatcagaacagggtccatctggtggttgataaaactatccactttcagaatacctccttcgtaacattttccatcttgcagaattctttttttgagtaattgcatataatctgatattaattaataatgtgctaatatgccattccggatgatgaaacaaaggacggcatattagcacatgaactattttagtcttacttgttatctcttaaatctttcacacgaacggctttcccctcgctttgaggtagagaacctttcttaaccagttttactttgggagtaaccaggatttcgtctttcagttggtgggtaatatccttgcgtattttctccaattcaatataattgtcggtagaaagatcgctcagctccacttcaacaatcatttcatcctgattattgattgtttccagcgtaattaaatagttgctgcccaattcggggaattgtactagaattttctctacctgcatcgggaaaatattgactcccttgatgataaacatatcgtcactacgtcctttaatccggtcaatacggatatgtgtacgaccgcaaggacattttcccggaagaatacgggttaagtcgcgggtacgataacggatgagcggcatcatttcccgatcaagggtagtgagtactaattctccggtttctccttcaggaacaggttcgcctgtttctggatcaatgatttctactaagtagcaatcctcccaaaagtgcattccgttctgttccagacattcgaaagcaacaccgggaccgttcatttccgtcataccgaagctgttgtatgcttttacacccaacatccgctctattttccgacgttgttcatctgtatggggctctgcaccgattaccaaagttttcagtgtggtgcctcttgggtctagtccttcttcctgaaagacctctgcaagacgaatggcatagcttggtatagcatgcagagcggttgtcttaaagtcattgatgaatttaatctgccgcttgctgttaccggctgcggcaggaacggtaagacagcccagacgttcggcgccatattggaaccctagtcctcctgtaaacattccatatcctgaactattttgaaaaacatctgttttacggattcctaccgtatataggcaacgggctaccagattagcccaagaatcaaggtcgtgttgtgagtgaacgataactgtcggatttccggtagtaccactggaagagtgaatacgcacaccatcattcctcatatctcccgccaccagtccgaaagggtagtgggcacgcatatcggctttggtcgtgaacggtactttacggatatcatccagcgattgtatgctgtctgaggtaataccatgtttactgaaaacctccttatagtatggagcgtttgcagcgatactgattgttttcttcaagcgttgaagctgcaattcctgcaacttctcccgactcatggtttctatttcttcttcccagtattgtgtactcatggcagtctctattattacataagcttttccgcaatttccttgccggcagccaatgctttaagattcatttctacaattgcttcccctttacgttggaaaatctcgtgaatgctgtcctgcacttttgcgtagtcaatgccaagaaatggaattgttgctcccaacaggacgatattggctacccgtgcggaaccggcttctttggctactttatctacattcaatactatcttatgaggtagtttgttgatttctgccattactttgtccgtttccggatagttgggaatattgacaaaaggagtttcattcgttaccagccacccttcagggctaaggtaaggaagatatcgaaggccttccataggttccagtgagataataagatcacatttgccggaaggaatcaaatcggaagcaatcggctgatcgctgatgcggaggttggattgaacgtctcctccgcgctggctcattccgtgcacttctgcttgtttcatataaagtccttcctttaaagcggctttaccgattacggtagcaatggacaaaataccctgtccgcctactcctgataatataatatcttttttcatggtttacttgcttctttttttacgtgctaatgtctggatacactctctgcgtggaataatgacagatacgccacaatattcgatttcttcgcgtatgatctgtttcatctcttcgtaattcttcttcaaaggaacaaccactctgatatgggcgggctctacaccgagacctgcacagattgcttcgatacgtccggttcctgcagaatcttgcccgcctgtcatagcggtagtctcgttgtcggatattacaattgtcacattggcgttttcatttacgcagtctaataatcccgtcattcccgaatgagtgaatgtggagtcaccgatgacggctacggccggaaacaagcctccgtcgactgcaccttttgccatagtgatagaagcacccatatctacgcatgagttgatagcattgaatggcgcatttgctcccagtgtataacagccgatgtcactgaatactttatgtgcgggatattcctctctgagcacttcagtcaatgtggtatacatatcgcgatggccgcaaccttcacaaagtgcgggcggacgcatctctaccacagacggaatgccaaattcggacttgttctctttgcttaccgcacgggctaccgagtcaggattcagttctccgtcttgcgacaaagtgccgtctaaacgcccttttacctttataccaatacccagataacctttcagttgtttttctacaaaaggttgaccgtcttccaaaacaagaatctcatcgcaagattctaccaactgatggagttgttttttcggcagtggatattgtccgattttgagtaccggatattcacagccttcggggtagttttccatcaggtaattgtaaccgataccacatgcgatgattcctagtttcttgttagggccatctgtatatttgttgtacggtgattcttcggaggcctttatgaactcatcttgacgtgaaagtaatactttatagcgtttgcgggcatttcccggcaacaggatgaattgacgcgggtcgttgctgaatgatattccattctgtggtttctgttccttgcgttctactccggaacgggaatgcgcaagacgggttaccatacgcattaagataggttctcccattttttcggagaattcaaaaccgctgtacaccatgtcatacgcttcctgctgattgctgggttcgtacataggaatgagggaaaaatctccgtagaaacggctgtcttgctcgttctgtgaggagtgcatactaggatcatctgccgctatcacaatcagtccgcctttcacgccggtgatggcagagttgacaaaacagtcagcggccacattcatacctacatgcttcatgcagactaaggcccgcttgccgacgaaagacatacctaaagcagcctccatcgctgttttttcgttggcacaccaacggttatgtatattccgttcggtcgttatcggggccatctgaatatattccgtaatctcagttgaaggagtaccgggataggcataaacacctgagagtccggcatccaatgcagcttgtgcaatggcttcatcgccaagtaagagttgcttgctcatatatttctttttatttagtgttgatcacagtttgttattctatcgggcaaagatagacttttcagttcgttttatcacaaatttacttgaaaatctttctttcattcagcgctttccaatattttcttgcatttgccatgtgttcggcataattggatgcgaaattgtgagtcccggaaaagtcctctttggcacacatataaatatagttgtgcttggtataattcaatacactgtctatcccttttttagaggggatacggataggcccgggaggtaatccggtatttatatatgtgttatatggcgaatcgattttcaaatgctcgttcgtaatacgtcgcagaccaaaatcctgtagggcaaatttgattgtcgggtctgcttgcaggggcatatctttgtgcaggcggttgatgtataatccggctaccattggcttttcttcattattattggtctcttcttcaacgatggaagcaagtgtgctgacttcttccggtgtcataccgatcgcagtggcttgtgccaaccgttctttgttccagaaacgttcatgctcctttctcatacgttcgattaattcatccgcactcatatcccagtatacttggtaggtttcgggaatgaaaagaccgggcaaggttgcttctgtgtatcctagttgggcttgaacggtggaatcaaacaactggcgagcaatctcggcagaatcgatcattaactgtttgcccatacttcgtgccagtcgttttaaagtacggacacttccgactgtgagattcatcggctcttggtaacctctggaaaaacggctgtatacatggtatacattgtcgttcggacggatggcataacgtcccgtgtgtatattctgttcgagatttttatatttggccatccaatggaatccggtgagtttgttgacatatccgaacttttttattttattggtaatagaatcggccgtatcgtcccggtctacgtaaatgtatacggttttggacggatggaattggggagcaaacaggcagtaataaatagtccctcctgcaatagcgcaaagtaaaaatgttccaatcagaatggataataaaatagttctcttttttttcttcatcttatgagacgttatttttgcagcgtcaaagataagaagaatttgaataggagtggtttctttctgagatgaatctttcttctgcaatatttttgtctttatattaagtattatacccggaaaaacaaaaatgtcacattgttgataattagatgtttatgggtaaaaatagggctaaattaagataagtttacaaaaaacgtctagatgtttttagctttttgagaacaaaaaatgcattttttctgcaatgctttgtcactgagttacttatatgattttgtagctattaatactgttctattgggttatagttgaacaactgtggagaaggacaagtgtaattgacaggttgcacaatagtatcacgctggttgctcaacagtaacagccttaatatctcggcaggttttattaatatgccgcaaggttttattaatataccaccggattttatttattggtaaagaagaaatcaatcggttcactgcatgattttaagatataatacggtatttctgattaattcggccattggaaataatctgcttctgcttctattttattttctatttcatcgggaagggccgcaaagaaatccatgtttgtaagatgttcaatactatctattgtcactgcgtatgtagaaagtggctctactgactgtttattgttgaataagaaaccgatagcccgcataggctttacgaaaggggagaggattaccttgaaaaactgttggggcactacaactttattttttccgatcgttttgggttgtctggttataataggtccgcatataatgataatggcgctgtctgctatcgcccaatcccggattttctcttccagatttttccaccctcttctgtttagttgcgggtgttgcggacacatattgctgaagtaaaatgattctttcatagcttgcggactccatttcatatctgcagccggtgccatgtgtcctttgtcgtatcctgaatgtgcatagtctgtattggttgctatcaagcctctgacctgtgggtcggtaataaaacggttacttcttttctcctttccctttgtctctttacgagtcaattcgtatgaaacccaattggggagttttaaatctttattgtaagaaacggtgtatccggtgtgatggatgatctgttcttgacgtcgggtaagtgacaccggtatttccaactcttttgttgtcggatttttacctcccgacttattgttctccgacttcgtaccttttgtttttttaccttctggcttcttgttctccggcttttggtcagatgaagtttgaaatgatgtgctggtctgtggcttttctttttgagaagtatcaattccctgacaatataaataaacgccgtaaagaataggtataagtataatgatggtgataatacatcccaatttataattggaacgtgattcttttttgaatatttttctgtttttgcctttctttcttcgattcattggtttgcaggtgatgatgggattgtttttattcttcttttctcatgctgaattcgcaaccgcaatattgctgattgtagaaattatattctttgatgattgcgatgcgtcgttcacttaatccgcctttacgccaattctgttcccaatatgtgacatcaggataatgtgtcatggcatatcgtccggcttcatttatctgttccaggcttttccaacggctggaagcaagggtagtggtaattacggagaaaccatgctcgtgggcataacgggctgtttccaacaagcggctcttgaagcaacgcaggcaacgtcctcctctttcgggttcctgttccattcctgccatttggcaacgccaggcttcgtggtcatagtcggcgtctacaatttccagtcctaatgattgcgcataacgggtgcattcatcttttcttatgttgtattcttcctgtgggaaaatattgggattgcaatagtaaatgacaggggttatattgtgttgcatcagacattcgatgatagctgacgaacaaggagcgcaacaagtatgaagtaagattttgtcggctcctcccggaacttcgagttggaatttctttttcatgcggtaaagttagtatatattttgtcataccatgcaacactttataatttattcacaggcggaattatcattgattattgggacaaaaagtatcgaaaacaaaagttgttataaaaatagctcaaaaaataggcggattctttttgtagtttcaaataaagctgtaattttgcacgctgtaaacgagagacaaacgccgctatagctcagttggtagagcaacgcattcgtaacgcgtaggtcgccagttcaagtctggctagcggctctcaaaaggaagtctattaactatcttgtatttagttattt

SEQ ID NO: 11728 - DNA, 15263 bp, Unknown
  gut microbiota DNA sequence
gaaagaggaacatttactgaatatccctatctatctttctcagatgcagaaagacggatttataaagttaatgaagtcgattgagtaaagagaagaaaattatatggataacgtgttccttctattttccttcttctctatccactttaagcaatcctccggtattcgggtcaaagtacactttgatagtcgagttcttattgaatagaaccggagccagatactctattataccaaactgagtgacaggaagttcaccttcataaagtttcttctttccgtcggtcagtgtaaccaatgcctgtccgggtacattgtaagcgattccttccaagtcttttttcttctttccgtcttcttgcggtatttttaccgttttcaagtctttcaagctgatatagaacggagttcctgccaaatcgttgttggcaaccacgcccagtttcttggaaaagcggaaagccacttcattactgaactctttatccggtgtaaggcgtacggtgaatgtcttttcttctttttcccgtatgccggagaacatttttgtcatggcttcttcctgcaagttcagattgtctatcatgattttgagctgtgcgccgtccgacggcatattgtcggcctgtccgcgtaataatgcgtttttgctttcacggatattatagatttctttggctaccagttccgccatcttagcggtggagtttgccatcagaatctcttcggtcaagaagtcgcggggattggcgctcatctgcccggcaggagcggtcggagtattcttctttgcagaactgttttggctgtaaggcacgttgatggactttacgataccatcctcagtcagttccataagaggagctaccgttttatctttcaatttcacaaagtaagtagcgtcgccattgggcactcctacggatttcacttttacgcttgccagttcccaatacacttcgggatcggtagagacgttgttcaaccgtaaatagcggtcggcgtacttactgaattcacccggagtatacttcactttattcgcttttatttcaagctctatttgagttttaggaagactatataccactccgtagtcttttccacgagtgactcctgtcaatacttcggtctgtgcgtaggcggaagtcgtcatcagcagacccgccgctataatcagttttttcatattcggttcttttttaactgttttgaaaacaaagttaatgaagttattgaaataaacactaagttcttaacttttattcgcttacaagccgccaagctgcgggcaggcaggtgataatatcacttgcaatcagcccggtcataccttgtttcttctgtgcgatgtctcctgccaatccgtgaatgtacgtacctattttggcagcttcgtcactggagtagccctgtgtgagcagcgccagaatcactcctgtcagcacatcgccgctacctccggttgccattcccggatttccggtcggattgaagaaacatttgccttcgggagtaatgatggcggagtaggcaccttttagaacgatgtgaacatgggcggtatgggcaagctcacaagccttcgtcaatcgctcgtaagaatcctgacatttgccggtcaggcgttccagttccttcgggtggggagtgaggatagagcctttcggcagatgtgtgagtgtatggcgatgattggcaaggatattcagtgcatcggcgtccaatattacgggagtctggcaatgttccagttgctctatcagggcagcttctgtttcctcgttccgtcccagtcccggacctatgccgactgcttggtaatcatcggtgtcggtcggcacggcgaaatagttttcgctggcgtccgtctctaccatagcctccggtgcggacatttgcaaaatatcataattgcatatcggggcatgtacggtcagtaatcctacgccggaacggaggcaggcgcgggcggcaagtacggaggctcccgccattccttttgaccctgctatcagcagtgcgtgaccgaagttccctttgtgtgcaaactgtttgcgtggcttgataagtgaacggatttcttctatctctagcatttcgtagtttgtctccgtttcttcgattccttcttcgctcaattggatatccaacaattcccattcaccgacaaactctgtattttcggcaaagaggaaggcaagtttcggtagctgcaggctgaaagtaacgtctgcacggatgatattgcttttcacgttgaatgtgttctcttctcccatcagccccgaaggaatatcgatggcaacgactgtggcgggagaagcattgatgtattttactacggcagcgaaacctccgcttaacggcttgttcagtcccgacccgaatagcccgtcgatcaccaaatgttccgatgtcagagtcggcggtacgaactgcgtactgatttcgtggaatgtaacttcttccatcatctccaccaattccttgttcgtctggcagtcgggtgaaagatttcctttagtattaaagaggtatacttctgtcttatatcctttttcagccatcatgcgggctatggctaacgcgtctccgccattgtttcccggtccggcaaaaacggtgacgggggtatccgtgctccatctgtctgtgatggcttttgtcagtactgttgccgcacgttccatcaggtcaattgatgcaatcggttcgtgctcaatggtataagcatccaatttcttgatactgctgcttggaaatattttcattgtgatgttcttttttagttttttacccacaaatgtacatgattcttctgacttttccggtttgttataggaagaaaacacatttattgtaggtagacgaccggcagaatataggtcgataagttttttctacgggatataaagttcttttgtataggtaataaactttcttttatcagtaataaaactataaacgaagcctctgattatataaatgaaactttcgtttatataatcaaagccttcgtttttataaacgcaagcttcgtttatagtttaggaatagtagaaaagaactttataacctatcgttagtaagtttacattcaatagagagtaacttttttaaggcattttatttagttttttgtacctttgcgctccataaactactaaaaaataaactcatgagcgcattgaaagggcatcctaaaggcctttacctgatttttgcaacaagcacggcagaacgcttcagctactacggtatgcgtgcgattttcattctctttctgactcaagctttattgtttgataaagaagcggccgcgtctatttacggcagctataccggattggtttatctgactccgttgattggcggatatatagccgataaatattggggcattcgccgttcagtgttctggggtgcggtgatgatggccgtcgggcagttcctgatgtttatgagtgcttccacattgaataataccgaactagcacattggctgatgtatggcggactcggctttttgattctgggtaacggttgctttaagccgacggtatcatcgctggttgggcagctttacgagccgggcgacaaacggttggatgcggcatataccattttctatatgggagtgaatgtcggttcttttgctgctccgttgatttgcggttacttgggagataccggtgatccacatgattttaaatggggatttctggcagccggaatcatgacgctatttaccgtcgtactttttgagacccaaaagaataaatatcttttctctccatccggcgaagctatcggtatcattcctgatgcaaaacgtgagaagaaagaagatgaggccgatcacatctctcacccgaagatggacgcacggacaaaaatacgcaatctcataataataactgtcttggctgctgttctattggcattctttggctacatattcacaggcgactggattagtgtcggtattttcacggcttgcatcgtttttccggtacttattctgttggatggttcgttgacaaagatagagcgtagccgtatttttgtcatttatatcgttgccttttttgtgattttcttctgggctgcctatgaacaggcgggagcttctctgaccctttttgcctccgaacagaccaaccgcgatattttaggttgggaaatgcctgcttcctggtttcaatcctttaatccgcttttcgtcgttgtactggcttacatcatgccgggagtatggagtttcctgaacaaacggaaaatggaaccttcttcccctactaagcaggctatcggcctcctgctactctctttgggatatcttttcatctgtttcggagtgaaagatgcggttccgggagtgaaagtaagtatgatttggctgacgggactttactttatccacactatgggtgaaattgccctgtcgcctatcgggctttctatggtgaacaaactgagtccgttgcgttttgcttccctgatgatgggtatatggtatctttccactgccaccgccaacaaatttgccggtatgttgagcggcctttatcccgaagatggaaaagtaaagaccattctgggcttccagattgcgacgatgtacgatttctttatggtatttgtggtaatgtcgggcgtcgcctcactgattctgttcttgctgtcgaagaaattacagaagatgatgcacggagtagaataaggtattatatgtagacaatgtgcaaaaagaaagtgattgcctcattttattatactatttcttttataggatagaaaaaactaacataatatatatgccgaaatgattttttattaactttgctcttgatttctttaattaagagcaaatagcttatggcaaaactatatgatttatcagataacagccggattgtaaaagcgttgaaaaaaggagattcaacggcttttgaggctgtgtataaagcatatagtggtttgctgcgtacttatgcaacaaatattttacaagataccgatgcggcttatgaagtggtgcaagatgctttcatggctatttggctaaatcgtaaatcgttggatgacacgaaatcattacggaattatctgttaagagcggttcataataattcattaagattgattaaagcggaagaaatacggagggcccgtgaagaaaaagctatggaggaacaaatgatggattgggaggaagtgcctgtttcttcacaaagaaacgaattgttgattcctgccatagaacgtctgccggaacagagccgcaaagtacttcaaatgagttattgggaagaaaagaaaaatgcagttattgctgatgaactatcaatatctatccgtacagttgagactattttatataaagtaaagaagaagttacggaaggaaatcaagaaaaaataaccttttctcaaaaaaaatatcgaaccggatacgtaaattcatcaggtgcagtattatatataatgagtaaatttcattatatatggatacaaaacacgatatcccgcaccgggagataggtgaacaagacgatgaactgctggaacaattgtggaagcagttgcccgattctcaggaagatccttttatagccgatcaggggtttaaagacttgcaaggtcggattcagagaaaacttcgtataaaacgcaggtttcgtatattgacagccggtagtattgctgcggcattgattacgggcgttttgatttttcggacacttattccgtcggaacaggtttctactgccattgcgcagttacaggatatgggggtcactatatctgatgatcaagttatattaaagatggggaatgaggttgttatgtcccttgacagtgcagcacgtattgagctgaatacagcagatgatgtggctctacaaactgctgccggtaaaaagctggcgttggcaagtgagcgtatcttgaaactagaagttcctgccggacgtcactttcagatgactctgtcggacggtacgaaagtatgactgaatgcttcttctacattggagtatcctgcttcgtttgaaggtaagaaagaacgtagggtgagactgacgggagaggcgttttttgaagtcagtcgtaatgagaaatgtccgttttatgtagaaactggtaatcaggagtctgtacaggtattgggaactagctttaatataaatgcctatccggaaaatagtaaacatttcactacgcttgtaacgggaaaaatcagttatcaggtagaggaggggaaagaacctgtcatcttatctcctgatcaacaagtgagcttcgattgtgtgtctggagatatgaaggtggcacaagtagacgcttcggcttttgcggcatggaaggatggctggatttactttgaggatgaaactcttccggacttggcaaaacgcctttcaagggtatatggggttgaaataaaggttgccgagcgattgagaaactattccttttccgggaaaatcagttatgaacgtggcgttgactatattactcgcctgatggaggaaaccaatggggttgtctgtgaggttgagaatggggtgctctggttgagatgagagatacaacaatataaaaagaatgagataagagtatgaaaaggaagaaaagttttattcacattgattggaagatagggcttatatttcttgtgttttcagtctgttgtcgtactgtgtatgctcaaacggtaagtgtggagctgaaaaaagcgacagtggcggaagcattgaagaagatgagtgctgtcacagggtatgaatttttttataattcaaaacaattgtcggaatgtccgaagaggataacagctaattatcataatatttctttggtacaggcacttcaagaaattctgtccggtacaaatttcacttttaaggttgagaatcgtactatcattattgttccgcgacctgcttccggaaaacaggaactgcgggaagaagagaaggaaatggaacttaaaggacggattattgatggaagtgaccgatctccgatgatcggagtttcggtaatagtaggaggaacaggaccgggaatgtccggcacgaccacggatctgaatggagaattcagtataaagttaccggtagaaggctgcgacctaactttctcttttgtcggttatgaaaagattacgagacattttaacggaaagaatgcttcatcttttgcaaatatcgtaatgcaacaacagttgcaggagattaaagatgtggtggttacgggaatctatcaacgtaaaaaagaaagttttacaggttcttccacaacatttaagggggaagagttgaaatcggtaggttcgcagaatgtcttgcaaagtttgcggacactcgatccttcttttaagatcatggaaaataatcagttcggttccaatcctaatcaaatgccggatatcgagatacggggaaagagcagtgtagtagggttgaaggaagaatatggtacagatcccaaccagccgttgtttattttagatggattcgagactacgctggaaactgtaatgaacctgaatatgaaccgtgtagcttctgttacgatattgaaagatgctgcctctacggctatttatggttcgaaagcttccaatggagtagtggtaattgaaactaaaacaccggagaagggacgtcttcagctttcgtataaaggagattttggagtagatatagccgacttgtctgactataacctgatgaatgcccgtgaaaagttacagtttgaaacattggcaggagtatatgaggacaacaccaacagtccttccaatcagttgcgtttaaatagcttgcggaacgagcggctgaaggaaatagaaagaggagtagatacttattggctgaaagaaccggtacgtaacgggtttacgcacaaacacaatatctatgcagaaggtggtgaagaaaagatacgttatggaataggattaagcataggtcatgtgaatggggtaatgaaagaatccgaacgccaaacgattggaggaaatatcgatttgatatatcgtacgggaaaatttcagttcagcaataagctgacaattgattatttggagacggtcgacccaactgtttccttctcggaatatgcacaggcgaatccttattaccggaaatataattcggcaggtgagatagaaaaatacctgtactatccggaggatggcataaatgattcttctgtttccaatccgttatggaacgctcatctgaacaattataataaagggcaggaatttggatttaccaacaattttatcatcgagtggtttgctacacatgattttcgtttaagagccaaattcggcctgacgaaatcggatgatacgtcggatgtccgtttgtctccgttacattcacagtttgatgatgtaagtgatacggagaaagggttatatacgcacacacaaaccaaaggattagtatatgaaggggatctggccgctacatttggtcgtttatttgccgataaacacatggttaatgctgtggccggattcaattttagcagtaccaaaagagaaaattatggattctcagccaatggttttacggatgatcagtttgattctccatcttttgccaatagctatccaaacggggaaagtccggattacagtcggacggagaaacgtgcggcaagtttttatatcaatggcggttatgcttatgataatcgctacttgcttgattttaattatcgtagtgatggcgcgtctatgttcggcacggataaccgttttcggaatacatggtctgtcgggcttggttggaatattcataatgagaagttcctcagagataaagatttctttcaacttctcaagctgagagcttctgtcggaaacccgggaaaccagaattttgccgcttatcaggcattctcgacttacaagttcaatggctggatgacgaatgtattcggaacaggtgtgattctgaatgcattgggaaacaaagacttgggatggcaggaaacaatcaattataatatcggtactgatattacgatgtggaataaccggatcaatgtgactttggattattattggaagaatactgatccgttgctggctgtcatcacgactccgggttctatgggagtgacaagcctgacaatgaatgccggtatgcaaaaaacaaaaggttgggaagctacattgaagttttctcctatttatctgccggaacagggaatcaattggaatttgagcgtgaatgcaacgcactctcgttcgaaatatgccaatatcggtgactcttttagtgctttgaataagagcggacaggcttcattggcgggtactacccgttattatgacgggggaagtcctacagctatctgggctgtgcggtctgccggaatagattcggctaccggtaaagagctctttataaagaaggatggtacatattctttttcctatgatgtgaatgacgaagtagtggtaggagatacggaacctgatatagaaggattgttcgggactacattctattataaaggcttttcactcagctgttttttccgttatcaaataggcgggcagttattcaacacttctcttttcgacaaggtagagaatataggtacagaagaagtgtacaacaatcaagataagcgtgcgctatacaatcgttggtcggagtccaaccgtgaagcgcagttcaaaggtatatctatggtgcagactactgagaaatcttctcgttttgtgatggatgaaaacacactgacttgcgagtctgtcagtctgggctatgagttcaatcaaggatttgtcaagaagctaggtttggcagctttatctttacaggcaaatatgaatgatatattccgttggtctaccgttaaggcggaacgtggaattgattatccttttgcacgaacgatctctttgtctatcggtgccaccttttaaacaatggaagagaaaacttataaaaacgaatgagttatgaagaataaaatatatacaggtatgttgctcggttgctttctgctatgtggctgtagtgactggttggatgtgaagccttatgataagatatcggatgacgaactgttctctacggaggagggattccaaaaattattgaatggcgtatatgtggaattgaataatgacaagctatacggatgcgctttgactgtggaaatgattgaaataatgggaggtgcttatacaatagggacggacaattccgtgtggggaaattacaaagatcttgccgactatcaatatgaaacggaatattggcgtggaagactgagcgagacgtggaatgaagcgtatgcgatgatcttgaattgtaatgagattcttgagaatatggagagcaggacatctctttttaccggtgataattataatattatacgcggagaagcacttgccctgcgggctatgctacattttgacatgcttcgactgtttggcccggtgtattcacgcaataaagataagctgagtatcccctattatacagcgcagaccaatttgccggaagaacagcttcctgcttcagaagtgattcgaaaggtaataaccgacctagaggaagcgcgaatcttattagtgaatgatccggtaaagacggagggtacgatgatgagtggagatgtaaatcagaattctaactttttgcgctatcgtgctttacggatgaattattatgcggtgacaggattattagcacgtgtttgtctgtatgcaagtagcaatgatgaggaaggtggaagtgcaagaaagaaagcattcaactattctacggaaatcataaaagcggtagatagcggtatttttccgtttgtagataaaaaactggttactggttcaccggatgatccggaccgtattttctcttctgaagtgatctttgctctctctcatgcaagccgtaaccaattgtttaaaaattattttgacccgactcgtgttcctaactatgtattcagaatggataatgatctgatgaataatctcattttcggaggcacagctaccggaggcaaccaggacgactaccgttatcgagtgaattgggtggcttcaggttctaacaggtatttctataaatatgcggatatggaggatactggaaaaatagaaaatacaatgattccaatgttacgtataggtgagatgtatcttattgcagccgagagccagtctacttctttgacggcaggttccagttatgtcaatacgttgcgacggaatcgtggggtaactactgtttcatcattgacccaagatttgcttgtgtatgaatatatacgtgagctatacggtgaagggcaactcttttatctctataagagattgtatagacctgttttattctcgtccgtatctagtaaaaatccggaagcaagtgatcagatattcgtagtccctcttcctgattcggaaacagaaaattgaaagtaaatgcttttaaatgaacaaaataagatgtatgatgaaaatgaaaaatagatatatcgtggtttttcttagcctgctgattggtctgtcggcctgtgacgaacgcgagcccggtacttttcagaatattagcggtatttattttaataaccgttcttctgcgagtgctttgcaggatagcatagatgttacttttgtctacgagaatggagatgatatggaaattcctgtgaaaatccagttgttgggacgtcctgtagatgagtcccgcccggtagatatccgtgttagttccgaaaatgctgtagagggaacggattatgtgttgtcggataaggtagagataccggccggagcttcaggtataaattatatagttactctaaaacgcacggaatctttgaaaacaatgaaaaagactatttatatggagcttcgtgcgaacgactattttgcacttcctgtaacggaagagatacaagctggaggagatacagtatctaccttgcgctaccgtattatattttcagatatgtttacctctgctcctgtagcatgggaagaaaatctgttaggagcattttcgcaacagaagtttgaattgatatgtgatgtgctggatgttgcaccggctgattttaatgacgtgtcggtaatgacctttgccatgcaggtatatattagttcggaaatgactcagtatgtgaaggaacaagaggaaaagaagaatgcaggtgaagagtttgatgaaaatgcctttgatggaaatggagaccctttgacgtttaaaaagaactgatatgatgaagaatttgtataataatttatggaggattctggtagcaggctttctattggtggcttgtacggaagataaaggaaattatgattaccgtaatctgacagaacttgaaatttccggagtggatgataatatttctgtcttgactcataaccggttacaattgacaccggattttggtacttctgctcttcctgacgacaggtatgaatttgagtggaaggtaatcaatcaggatatagagaatgaagtggaaactgtgattggcaatactcgcaatttggactatgaagtaactttgaacgctgatgtatacaccctgtattttacggtgacggagaaggatacgggcatatattggcaaaaaaattatactttgactgtcagcgatactacttctgaaggttggatggtgctttgttcagatgaagaaggacgtgcacgtttggatatggtttctaaggttacaggagatacatactttgatcttctgaaaaattatagtgaaatctctcaatggaaaggtccgcgaaagattcaatctctttcatcgacaatgacggatgcccagtctcctttttacttgttgacagatgatggagctactcgtttgggaaagaataatttcgagtggaaggaagaatataatttcgcttatgaagcagctgcaaacggtgcatctttgcgtccttattctattactgctgctggtttgggtaaaatgattgtcagtggtaaagaagcctattactgtgaaagggggatggggatagatggtctgtatcagagtgtggtgaataagacttttgatgtagctccctacgtgggggcgaatgtggcagcatcaatgtatgtagctgtgtatttactgtatgatacgactaataaatgttttatggcgtattgtccgatgatggcttatgaagatttaggtagtcttgaacctttggtaacgatggataaaatggaagaaatagctaccagttttaaaggtgataatggagtggtgcatagtgtgtcttatgattatcctgaagggtatgattatgtttatatggagaatacgaaatatgatccgggtaatgccaaaatggggacaacttatactattctgactaaggatggcaggtcttatctttatggcattcagttgggggatttacttttatatgcagattgcacttatgtgttgggaaaatcctattatggtgacttgtccggttgtacgggaataggggaagagggcactttgtatgcttttagctctttgaaaaattatatgtattatgctgtggacaatacggtttaccgggtcgacttatctgtttcacctttggaagcagaacggcaatttgcattgaatggggaaactattacttgcctcaaatttaatctttatcgggaaagtgccaatgcctctcgttcatatgatttggttgtaggaagtgtagatggtgctggaaagggaatattacgggtttatgaaggattggagtctgaaggtgatttcagttctgttacaccggaaaagtatactgggtttgctcgaatcgtagacgctacctatcgtgaaaggaataattaaatttttactaaaaaggaaatatatgagaaattgtttatttgtagtgttgttggccggtttgataagtgcttgtacctcttccggtaaaccggataacattgtggttacatttgatgttaagaatcctacagctaccgaagttgtattggtgtatcatagaacgataaattcagttcctctgaatgagcagggatatggagcggatacaatttccggtgtaaatgctttatatgctaatttgttctatggccagaacgaacggaaaatatatttggaaaaaggagatcgtgtacacattacttttgatggcaatgattatgtcggaacgtttaagtttgaaggtgaaaaggcaccagtaattgattatctgaatactgttacactcacgtcgttgtcggatgaaacgtatgctcttcctctgaatgagtatatgcagaaagtagagcagaaagaacaggaagcatataaattgctgaatgttcgcggactggatgacattggtaattttaacaaaatggaggcggcgcgtattcattattcttatggaacaggagtagtcatgtatccgatgggacatattatgatgacgcaagatagtacttatcgcccggatgaggcttattacgatactctccggaagtatatggtggaagatgaggattggctggatatggatgagtaccgtgactttgttgtggaactgtctcatatacttgatactcctaatcgggaagttaccgactattatccgaaaaccgttgctcaaatgcgatacattgcagataatttcaagaatgaaagagtcaaagaagtgttgctgaacagtctggctgcggaatatgtagaaaggtttggtattaagaatattacagatttggaaaatatttatcatacttatgtgaaggatactgtgcttttggcagattatcaggataaatatgagaaatggaatttgtcttctcccggtaagccttctccggattttcaggcggttgatataaatggaaagtcttattctctagctgattttaaaggaaagtatctttatatagacttgtgggctacttggtgtggtccatgtcagagggaattacctttcctaaaaaagttggagtcaaagtttgaggggaagaatattacttttttgagtctttcgatagatcatgataaggcaaagtgggaggcaaaagtaaaaagtggagatttgtccggtgttcagttgcttatcggtcgtggaagctctttccaaagagcatacaatattgagggaattccccgtttcttgcttttggataaggaaggaaagattataaacaatgatatgttacgtccttcatcagatgatacagagcgtatattgaatactttggaaggtatctaaatttgttggattaatat

SEQ ID NO: 11729 - DNA, 22237 bp, Unknown
  gut microbiota DNA sequence
ctgcggtctttatgaatggattttttgtttaggatgtctatttgctattctcgaaaaatatcaaatggtaggcatatcttttccgtgtgcgataacgaaaacacaaaaaataacaatttattaggtagaaaaagttgggggaatgcttcgtagttcataaataatgattaaatttgccgcgatttgtaatgttgagtttgcaaaatgacgaataatactataaagcatctgggtattgtggaaaacatacagggttctcatctgtcggtgaggattgttcagacatcggcttgtgcggcttgtagcgcaaagggacactgttcctcagcagatagcaaggacaaaatcatagatgttatcgatacggcggcctcttcctaccgggtaggagagaaagtcatggtgattggcgaaacgtcgatgggcatgatggcggtggtattggcttttataattcctttcatacttctgatattttcactattcctttttatggcgttgatggagaatgaactgtattccgctcttctttctctggctatacttataccctattatttcattctctggctcaacaaaacacgactgaaacaaaaattttcatttactataaaaccaataaataactaaaacattatgaatttgattctgattgcagtgatttcattgggagctatagcgctcgtgctggccgctattctgtatgtggcttccaagaaatttgccgtgtatgaagacccgcggattgcccaagtgggggaagtgcttccccaggctaattgcggtggatgtggctaccccggttgtagcggatttgccgacgcttgtgtcaaagccggttcactggaaggtaagttctgccctgtaggcggacagcctgtcatggcaaaagttgctgatattctcggactggcagccggtgaggctgaaccgatggtagcagtggtgagatgtaacggaacctgtgccaaccgccctcgcatcaaccagtacgatggtgccaagagctgcgctattgccgcttcactgtatggtggtgagacaggatgcagttacggttgtctgggatgtggtgactgtgtggcggcttgtcagtttgacgccatccacatgaatcccgaaacgggtctgccggaagtggacgagactaaatgtacggcttgcggtgcttgtgtgaaggcctgtccgaaagcgattatcgagattcgcccgcagggtaagaagtcgcgtcgcgtgtacgtctcttgcgtgaacaaagacaaaggcgctgttgcccgcaaagcttgtacggtaagttgtatcggctgtggcaagtgtgtgaagacttgtccgttcgaggctatcacattggagaataatctggcttacattgatccgaacaagtgtaaatcttgccggaaatgtgtggaagtttgtccgcagaattctattatcgagctgaatttccctcctcgcaaaccgaaggcggaagaagctgtggaagctccgaaagcaccagttgctccgaaagctccggctactccgaaagtaacagaataataacagaataaaatacagaattgtatgttaaagacattttcaattggtggagttcatccacacgaaaataaattgtcggcacatcaacctatcatcacggcggaggttcctgcaaaggccgttattttgctggggcagcacatcggcgcacctgcaaagccgattgttgcgaaaggggatgtggtaaaggtgggcactaagattgccgaaccggccggctttgtttcggcagcaattcactcttccgtcagtggcaaagtggcgaagattgatacgatagtcgatgccagtggttatgcgaaaccagctatttttattgatgtggaaggtgatgaatgggaagaaacgattgaccgtagcgcaaccctggtgaaagaatgtgagctttcgtcggaggagattgtgaaaaagattgccgaagcgggaatcgtcggtctgggtggcgcttgtttccctactcaggtgaaactttgtcctcctccttctttcaaggccgaatgtgtgattatcaatgcggtagagtgcgaaccttatctgacggccgatcatcagcttatgctggaacacgcggaagagatcatggtcggtgtttctatcctgatgaaagctgtgaaagtgaacaaggcgtttatcggaatcgaaaataacaaaccggacgctatcgagctgatgacgaaagtggcttccggttatgccggtatcgaggtagtgcctttgaaggtgaaatatccgcaaggaggtgaaaagcaactgatcgatgcgataaccaaacgccaggtggcgagcggcgcccttcctatttctaccggagcggtcgttcagaacgtgggtactgcttttgctgtgtatcaagccgttcagaagaacaagccgttgtttgaacgggtaatcactgtgaccggtaagtcggttgcaaaaccttccaacttcctggcccgtatcggtacgccgatgaagcagctgattgatgcttgcggtggtctgccggaagatacgggaaaagtgatcggtggtggtccgatgatgggtaaggctttggtcaatacggaagttcctactgcgaaaggcagttccggtattctgatcatgaatcagaaggaagccaagcgtggtgaggcacagacctgtatccgttgcgcgaagtgtgtaagcgcttgtccgatgggactggaaccgtacttgctgggagctttgtccgaaaacggtgattttgaaagaatggaaaaagaaagaatcatggactgtatcgagtgcggctcttgccagttcacttgtcctgccaaccgtccgttgctcgactattgtcgtctcggtaaaggcaaagtgggagctatgattcgtgcacgtcaagctaaaaaataacgaatatggaaaataaattaatcgtatcactatcaccccacgttcatggcggagacagcgtacagaaaaatatgtacggtgtgctgattgcactgattccggcgtttctggtgtctctctatttcttcggactgggtgctctgattgttactgctacttccgttgcggcctgtttattcttcgaatgggcgatcggaaaatatttgatgaagaaaccgacttcaacaatttgtgacggttctgctgtcatcacaggtgtgttgctggctttcaatttgccgtccaacctacctgtatggattattattctgggcgcattgttcgctatcggtgtaggcaagatgtctttcggcggattaggctgcaaccctttcaaccccgcattggcaggacgtgtcttcctgttgctttcgttccccgtacagatgactagctggccggtagtaggtcagttgacagcttatacggatgctactaccggagctactccgttggctatcatgaaaggaataatcggaggggttcagggattctctatcgaccagcttcctgattctttcagtctgctgatcggtcagaacggtggctgtatcggtgaggtcagcgcgttggctctgctgatcggattgggttacatgctttggaagaaaatcatcacttggcatatccctgtgtctatcttggtcactgtgtttgtttttgccggtatcatgcatttggttgatcctgcaaaatatgtatctccggtattgcagttgctttccggcggattgatgttgggtgcggtttttatggcaaccgactatgtgacttctccgatgagcaagaaaggaatgttgatttatggtgtttgtatcggtctgctgacggttattatccgtctgttcggcgcatatcccgaaggtatgtcgtttgccatcctgattatgaatgcgttcactccgctgattaacacctattgtaaacctaaacgctttggggaggtagcgaagaagaaatgaaaaagttagaatcatctttaaagaatatgctgctggtacttacgggggtgactgccatttccgtagcattgctggcttacgtgaatgaactgacaaaaggtcctattgccgaagcgaatgcgaagacattgaacaaggccttgaaacaggttcttccggaatttactaataacccggtaggcgaaagcgacacgatcttcagcgagaaagacggaaagaaagtggtggacttcatcgtttatccggcaaaaaaaggagaggaatgggtaggttcggctgttgagtccaaagctatgggattcggtggcgaactgaaagtgctggtcggctttgatgcaaaaggcaagatttacaattactctttgctggcccataccgagactccgggattgggctcgaaagctgacaaatggtttggagcctatgatgctaccaaaggcgaaaaggcggtgacgcacgaaatgagcaaaaagtctatcataggcatgagtccgggcgaaggtgagctgaaagtctctaaggacggcggtcaggtagacgccatcacggcttccactatcacgtcgcgcgctttcctgaacgctatcaacaaggcttacgaggcctataagacgggagaagtagatactgtttcgggagcttcgcagaaaaatgaacctgccactgctccggaaactgaaacggtgaagcaagattctattaattaaaggaggagattaagatatgaataattttaaagtaatgatgaacgggattatcaaagagaatcctacgtttgtgctcctgcttggtatgtgtcctacattgggtacaacttcatcggctatcaatggtatgggtatgggactggccactatgtttgtgttgatttgctcgaacgtggtaatttcttccatcaagaatctgattccggatatggtacgtatcccatcgttcattgtagtcattgcgtctttcgtaacattgctccagatggtgatgcaggcttacgtgccggatttgtatgccacactggggcttttcattccgttgatcgtagtaaactgtatcgtgctgggacgtgctgaagcattcgccgcgaagaataatccggtggcttccatgttcgacggtcttggtatgggacttggttttacgatagccttgactctgctgggagctgtccgcgaattcttgggaacaggcaagattttcaatctgacaatcatgccggaagagtacggaatgttggtatttgtattggctccgggtgctttcatcgctttaggataccttattgcgttgatcaacagcttgaagaaagcctaattcaattaaataagagaagaatatggaatatatattgatttttatttcggcaatctttgtaaacaacatcgtgttgtcgcagttcttgggcatttgtccgttcctgggcgtatccaagaaagtggaaactgcgatgggtatgagcgctgcggttgctttcgtgctgaccatcgctaccattgtcactttcctgattcagaaatttgttctggatgttttcgatctgggatatttgcagacaatcacttttattctggtgatcgccggactggtgcagatggtggaaatcattctgaagaaagtctctccggctctgtaccaggcgttgggtgtatttttgccattgatcacaaccaactgctgtatcttgggtgtggctattctggtgattcagaaagactatgacttgctgacaggcgttgtgtatgcgttctcaacagctctcggattcggactggcgctggtgctttttgccggactgcgcgagcagatgagtctggtgaaaatcccgaagggaatgcaaggcactccgattgctttgatcaccgccggtttgctggctatggcattcatgggattctccggcgtggtataagatttacagttgataattaaatatgaattgggggctcggctgtgtggggacatacagataatgagttcccaattcttttataaataaaatggttacggaatattgcattctcattttatttccatacatttgtagctcaaacaataatagaccgaagaactaaccatataagtaaagaatatgaaagaaagaattttagtgacagggggaacgggatatattggttcccatactgttgtagagttgcaaaacagtgggtatgaagtaatcatcatcgataatttatcaaattccagtgctgatgttgtcgacaatatagaaaaagtttccggtatccgtccggctttcgaaaagttggattgtcttgattttgaaggtcttgacgccgtattcacaaaatataaaggaattaaagctatcatccactttgctgcaagcaaggcggtaggtgaatcggtggagaaaccgttgctttattatcgtaataatctggtttctttgatcaaccttctcgaactgatgccgaaacacggagtggaaggtattgtattctcttcttcttgtacggtgtatggacagccggatgaattgccggtgacagaaaaggcgccgattaagaaagcggaatcgccatacggaaatacaaaacagattaatgaagagattatccgtgatacggtagcctccggtgctccgatcaatgcaatcatgttgcgttatttcaatccgataggcgcgcatcctactgcattgctgggtgagttgccgaacggtgttccccagaacctgattccttatctgactcagacagctatcggcattcgcgagaagttgagtgtgttcggtgacgattatgatacgcccgacggttcttgcatccgtgactttatcaatgttgttgacttggctaaggcacacgtgattgctatccgccgtatcttggagaaggcgcagaaagaaaaagtggaagtattcaatatcggtacgggacgtggtgtctctgtattggaattgattcaaggcttcgagaaggctaccggtgtgaagttgaactatcagatcgttggacgtcgtgcgggagatattgaaaaagtttgggcaaatcctgatttcgctaattccgaattgggatggaaagctgtggaaactttggaagatactttgcgctctgcctggaactggcagttgaaacttcgtgaaagaggtattcaataaatggaatttttttgtttttataatctaaatagttcaaacaaatcaatatggatttgtttaattgatgcgatcgacctgaagctgttcatgggtatgtgaatatatatgaacagtacttatacctctccggtatagacagggggttgcacagtagttttgtcgtgttttattttgtgtttgtgttgtgacggtactacgatgtgagtcgtggtaccgtttttagtatgacgggatagatatttcgattgattttcttatagcgttcctgtgaagcagaacgcatccgttccccaatcaatttccggtagagtggattctggagcaaagagtccgaagactgaagaaccggaaccgctcatggatgcgtagatcgctccgtgatgatagagttcttcttttatgtctctgataatgggatgttgcggaaatacgctggtttcgaaatcattgatcagggtatctttccactctgtaaccgggcgtcggatgacctctttgacaggatattccggatgatgagggcggatgtttgcaaaagcttcccgagtggatacgaacacatccggtttgataatcatgatttggtagccgcttaatgaaagctcgaccggagaaaagatattaccgattccttcggcaaaggtcggtctgtttttgataaagaaagcacagtctgctcccaaagtggcggcgtatacctccaattgttcttcagatacccctaactgataatgatcattgagcaacttcagcatgaaagctgcatcggatgatcctccacccagtccggctccggaaggaatgtgcttatatagatggatctctacgggaggaagatggaactccttatccatcaacagataggcttttaccaccagattatcttccggcttgcccgctatttccattccgtgttggtaaagggtgaatttccggtcagtgtcgggagaagtacggatttccagcgcgtcttccaaagctaccggatagaacactgtttccagattatgatatccgtccgggcgtttttccgtaatggaaagtcccaagtttattttgatgttggggaaagtaatcatgtttactattttataatttaccatttactatttgcagtgctgcacattgcaattaatcttgtgctgaacgcgattcagggacaaagttagtaaaatcttcatttttccttatccattcttcgtgattatgttctatctttgtcgtcccgaccggaggaattccgtgataaatgtgataaaagagtctgtccggtcgtaaaatagtaagtagtaaattgtaaaatagtaaatgttttcatggccgaacagagaagaaacacccgcaatacgaagtctgctaaagtgcaaccggtaaatgattatggacgtattcagccgcaggcacctgagctggaagaagcagtattgggggctttgatgattgagaaggacgcttattcgttggtgagtgaaattcttcgtcccgaatctttttatgaacaccggcatcaactgatctatgccgctatcaccgatcttgccgtaaatcagaagccggtggatattctgactgtaaaggaacagcttagcaaacgcggagagctggaagaggtcggaggtccgttctatattactcagttgagtagcaaagtggcctcttcggcgcatattgaatatcatgcacgcatcatagcacagaaatcattggcgcgcgagttgattacttttaccagtaacattcaaagtaaggcatttgatgaaacgctggatgtggacgatctgatgcaggaagccgaaggaaagctttttgagatttcgcagcagaacatgaagaaggactacacgcagatcaatccggtgattgacgaagcgtataagctgattcagaaggcagcggcacgaacggacggattgagtgggcttgaaagcggttttacgaagctggacaagatgacttccggttggcagaattctgaccttattattattgccgcccgtcctgcgatgggtaagacagctttcgtcctttctatggcgaagaatatagccgtcgattatcgtaacccggtagcgttgttttctcttgaaatgagtaatgtccagttggtgaatcgtctgattacgaatgtctgcgagattccgagtgagaaaattaaaagcggacagttggcgaattatgaatggcagcaattggattataaactgaaggatttgctggatgcaccgctgtatgtggatgatactccctctctgtcggtgtttgagcttcgtacgaaagcccgtcgtctggtgcgtgaacatggggtgaaaatcattattattgactacttgcagttgatgaatgctagtggaatggcgttcggaagccgtcaggaggaggtcagtaccatttcacgttcactgaagggattggcgaaggaactgaacatcccgattgtcgcattgtcgcagttgaatcgtggtgtggagagtcgtgaaggaattgatggcaaacgtccgcagttgagcgaccttcgtgaatcgggagccatcgagcaggatgccgatatggtatgttttatccaccgtccggaatattacaaaatttaccaggatgatcgtggtaatgaccttcgcggtatggcggagattgtgatagccaagcatcgtaacggtgcggtgggtgaagtgctgctccgattcaaaggtgagtttacccgtttctcaaatccggaggatgacatggtgattcctatgccgggtgagcctgccggtgctatgctggggtctaagatgaatgccggaggagccggttccgttccgccaccaccggcaccggactttactccgcagtcgggtaatccgttcggggcaccggtaggaggggatggacctttgccattttagttgcgtattatttcaccacagaggacactgaggacacagaggatatcggaaagatgaaaaataagtgtaaatccgtaataagcaaagtgtgtataattaacttataaactaattaaacatgagtgcttaaataaaaagaaaaaactctgtgtcctcagtgtcctctgtggtgaaataacctgcaattttttatctaaccttttcggtcaaccgaaaaatcttattaactttgcgaatcttttgagaaacaataaaaaattaattatatgaatatctcttataactggctgaaagagtatgtcaacttcgatttgacgcctgatgaaacggcggctgcgttgacttctatcggcttggaaacaggtggtgtggaagaagtgcagaccattaaaggtggtttggagggacttgtgatcggcgaagtgctgacctgtgtggaacaccctaattcggaccatctgcacattactactgtcaatctgggagaaggcgatccggtgcagatcgtttgtggagctccgaacgtggctgccggacaaaaagtggtagtcgctacattggggacaaaactctatgacggggacgaatgctttaccatcaaaaaatcaaaaatccgtggtgtagaatctacaggtatgatttgtgctgaagatgaaatcggtatcggtacggatcatgcaggtatcatcgttttgccggaaaatgctgtcccgggtactcttgccaaagattattataatatcaagagcgattatgtgcttgaagtggatatcactcctaaccgtgcggatgcatgctctcactacggggtagcccgtgacttgtatgcttatctgattcagaacggtaagcaggcaactctgcaacgtccgtcggtggatgactttaaagtggaaaaccatgatttggatattgaagtaaaggttgaaaacagtgaagcgtgtccgcattatgccggtgttaccgtgaaaggagtgactgtaaaggaaagtccggaatggttgcagaataaattgcgtctgatcggtgtgcgtcctattaataatgtagtggatgtcactaattacattgtccatgctttcggacaaccgttgcattgctttgatgccggtaagataaagggtaatgaagttatcgtaaagacaatgcccgaaggaactccgttcgttacattggacgaggtggaacgtaagttgagtgaccgcgacctgatgatttgcaataaggaagaagccatgtgcattgcgggcgtatttggcggattggattccggctctacggaagctacaacggatgttttcatcgaaagtgcttatttccatcctacatgggtgcgtaagacggcccgtcgtcacggcttgaataccgatgcttctttccgctttgaacgcggcatcgacccgaatagtgtgatttactgtctgaaactggctgccataatggtaaaagagttggcaggcggtactatctcttctgaaataaaagatgtatatactactcctgcacaggatttcatagtagacctgtcttacgagaaagtacattcgctgattggtaaagtgattccggtagagacaatcaagagcattgtgacgagcctggaaatgaagataactaatgagacgcaggaaggactgacactggccgttcctccttatcgtgtggatgtgcagcgtgattgtgacgtgattgaggatattctccgcatctacggatacaataatgtggaaattccgactacgttgaaatccagtctgactactaaaggcgagcatgacaagtcgaataaattgcagaatctggttgccgaacaattggtgggctgtggattcaatgaaatattgaacaactcattgacccgtgcggcttattatgacggtctggaaacttatccttccaatcgcctggttatgctgttgaatccgctaagcgctgatttgaacgctatgcgccagactttgctgttcggtggattggaaagcattgcccataatgccaatcgtaaaaatgcggatctgaaattctttgaatttggtaattgttattatttcgacggggacaagaagaacccggaaaaagcgttggctccttattcggaagattatcatttgggtctgtgggttacaggcaagaaggtttccaactcatgggcgcatccggatgagaacagttcggtatatgagctgaaagcatatgtggagaatatcttgaaacgtttaggactggatttgcacaatctggtgataggcaatctgtctgatgatatctttgctgccgcactgtctgtccatacgaagggtggcaaacgccttgcttctttcggtgtagttactaagaagctgctgaaagcgttcgatatagacaatgaagtctatttcgctgacttgaactggaaagaattgctgaaagctgtccgctcggctaaggtcagctacaaggagctttccaagttcccggctgtacggcgcgatttggctttgctgctcgacaagaatgtgcagtttgccgaaatcgagaagatcgcttacgagacagagaagaagttgctgaaagaagtggaactcttcgatgtatatgaaggcaagaatctggaagctggtaagaaatcgtatgcggtcagtttcttgcttcaagacgagagccagacattgaatgataagatgattgataagatcatgtcgaaactggtgaaaaacctggaagataaactaggagccaaacttagataagtttaaaatttcaatctaaaaatataaaccaatgggaagagcatttgaatatagaaaagctaccaagctgaagagatggggccacatggctaaaacatttacaagactgggtaaacaaatcgctattgctgtaaaggcaggtggtccggaacccgaaaacaacccgacactccgttcggtgatcgctacttgtaagcgtgaaaacatgccgaaggataacatcgagcgtgccatcaagaatgcgatgggtaaagaccagagtgactataagggcatgacgtatgagggatacggccctcacggagtagctgtattcgtagatacacttaccgacaaccctacccgtaccgtagcggacgtgcgttccgttttcaacaaattcggcggaaacttgggtacaatgggttctttggcatttcttttcgaccataagtgtattttcactttcaagaagaaagaggacttggatatggaagagctgattcttgacctgatagattataatgtggaagatgaatatgatgaagatgaggaagaaggaacaattacgatctatggtgatcctaagagctatgccgccattcagaaacatttggaagaatgtggtttcgaagatgtcggtggagacttcacttatatcccgaacgatctgaaagaggttactccggaacagcgtgagacattagataagatggtggaacgtttggaagaatttgatgacgtgcagaccgtttataccaatatgcaaccggaaggcgaagaataacagttcatggaatatgtttataagacgaaaggcacttgcagcaccaacattgaactgaatgtggaagatggagtggtgaaagaagtggccttttggggaggatgcaacggcaatcttcaaggtctttcgcgcctggtaaagggaatgaaggtggaggacgtgataagtaaacttgaaggagtacgctgtggtggcagacccacttcgtgtccggaccagttatgccgtgcattgcatgagatggggtattgatatcatccggtctcaagtataagataggaaacgcggattaacgcaaattatcgcagattaaatttaatctttgtgtaagtttgtgttgatccgcattcttttatgatactgctttgggcttttgatgttagtagcgttttccttatttgtcggtattttgaaccaaaattgatccctactcgttatttataagtatatttgtactgaataaactattatgcagcaatgaagaatctttttcaagacttaaaacgcaaagatcataaacgctatttgggcggactggatgttttcaaatatattggtccgggacttctggtgactgtcggatttatagatcccggaaactgggcttctaattttgccgccggatccgaattcggctattcattactgtgggtggttaccttgtccacgattatgctgatcatcctccaacataatgttgctcacttggggattgtcaccggactttgcctttcggaagctgccaccaaatatactcccaaatgggtatcccgtcctattcttggtacggcggtgctggcttccatctctacttcgctggcagagattctgggtggagccatcgcattggaaatgctgttcgatattcctattgtatggggagctgtgctgactacgctttttgtgtccatcatgcttttcaccaactcctataaaaaaatagaacgttccatcattgcgtttgtgtctgtcatcggactttcgtttatttatgagcttttcttggtgcagatagactggccggctgcaacagcggggtgggtgactccttcgtttcccgaaggaagtatgttgataatcatgagcgtgctgggagcggtggtaatgcctcataacctgtttttgcattcggaagtgatacagagtcacgagtataacaagaaagatgatgcatctatcaagaaagtactgaaatatgagttgttcgatacgctgttctcaatggttatcggttgggcgattaacagtgccatgattctgctggctgccgcgactttctttaaaagcggcattcaagtggaggaactgcaacaggccaagtccttgctggaaccgttgctgggcagcaacgctgccattgtatttgctttggcattgctgatggcgggcatttcgtccaccattacaagcgggatggcggcaggttccatctttgccggtattttcggtgagtcttatcacatcaaagacagtcactcgcaagtgggagtccttttatcgctaggaatcgccttattgctgattttctttatcggagatccttttaaggggctgattatttcgcagatgatacttagtatccaattgcctttcacggtctttctgcaagtcggactgacatcttcccgaaaggtgatggggaattatgtgaatagtcgttggagcacatttgtgctgtatactattgcgataattgtatccgtactgaatatcatgcttctgttttcctaaaataaacgtgaatcaataaatatataatgatgaagattataacttataatgtgaacggcttgcgtgctgctgtctccaaaggtttcccggaatggctggcgcaggaaaatccggatattctttgtctgcaagagacaaaactacagccggatcaatacccggcggaagtgtttgaagcattgggctataagtcgtatttgtattcggcacagaaaaaaggatatagcggagtggccatattgaccaagcaagaacctgaccacgtggaatacgggatgggaatagaagcatacgataatgaaggccgttttatccgtgcggacttcggcgatttgtcggtggtaagcgtgtaccacccttcggggactagcggggacgaacgccaggcattcaagatggtgtggctggaggattttcagaaatacgtgacagagctgcggaagacacgtccgaatctgattctttgcggtgattataatatatgccatgaaccgattgatattcatgatcctgtccgtaatgcgaagaatagcggtttcctccccgaagagcgggaatggatgacgcgttttctctcggcaggctttattgattctttccgtctgctttatccggaaaaacaggagtatacctggtggagttaccgttttaattcgcgtgccaaaaataaaggctggcgaatagattattgtatgaccagcgagccggtacgccgatggctgaagagtgcgcggattctgaatgaggcggtgcattccgatcattgtccgatggtgttggagattgaccgttgagtttttagggtcgggatgaatataataaaaagacaataatatggaagatagagtacaaaaagcagtagagctttttaaaagcggatacaattgttcacagtccgtagtggcagcttttgcagatatgtacggattcacgcaggaacaggctctgcgcatgggggcatcctttggtggaggaataggccggatgcgcgaaacttgtggtgctgcttgcggtatgttcttggtggcaggactcgaaaccggagctacggaagcgacagaccgcgagggaaaggcggcaaattatgcagttgtccaggaattggctgctgagtttaaaaaacgcaacgggtcgctgatttgtggcgaattgttgggattgaagaaaaaagaactggtttcaaatgttccggaagaacgtactgctcaatattatagcaaacgtccttgtgcgaaaatggtggaagaagcggcgagaatctggtctgaatatctcgaaaaccatcccaaataagggaaaaaagccattattcttacaaaatcaataaaaaaaacttcaataaagtgttctataacataaaaatagctatctttgtccccgaaataaaatctgaaagtctttcaagaccggatgatttaaagcatgtctaactaaaatttcaaagcaaatgttgaaagaaaaagcaggtgtgattgcaggtactatctggaatgcactgaatgaaacagaaggaatgactgccaagcaattgaagaaagcaactaaattggttgacaaagatttgttcctcggacttggctggttattgagagaagacaaagtctctgtggaagaagttgaaggtgaactcttcatcaaattgatctaagcgagtaactcacttaagcaataaaaaaatgcgttggtacattatcataatgttatcaacgcatttttttatattccgccatttacgtatctttgcacaccgaaaaagacaaaataataagaattcagaatgaagaatattcgaaatttctgcattatagcccacattgatcatggtaagtcaactctggccgaccgtttgttggagtataccaacactattcaggtgacttcagggcagatgcttgacgacatggacttggagaaggagagaggtatcacaatcaagagccatgccatccagatggagtataattataagggtgagaagtatatcctgaacttgattgatactccgggacacgtggacttttcctatgaggtgtcccgttctatcgcagcctgtgaaggtgcgttgctgattgtcgatgcatctcaaggagtacaggcacagaccatttccaatctgtatatggctatcgagcatgatcttgaaattattcctgtaatcaataaatgcgatatggcaagcgccatgccggaagaggtggaagatgaaattgtcgaactgctgggctgcaagcgtgaggaaataatacgtgcttccggtaagacgggtatgggggtggaagagattctcgcagccgtaatcgaacgtattccccatccggtaggagatgaggaagcgccgctgcaagcattgatcttcgattccgtattcaactctttccgtggtattatcgcctatttcaagattgagaacggagtgattcggaaaggggataaggtgaagttcttcaatacgggtaaagaatatgacgctgacgaggtcggggtattgaagatggagctggttcctcgcaatgagcttcgtacgggagatgttgggtatattatttccggtattaaaacttcaaaagaggtgaaagtgggagataccatcactcatgtgggccgtccgtgcgcgcaggctatcgccggatttgaggaagtgaagccgatggtatttgcgggagtttatccgattgaggcggaagattttgaagatttgcgcgcttcgttggaaaaattgcagttgaacgacgcttctttgactttccagccggagtcttcattggcattgggttttggtttccgttgcggttttctgggattgctccacatggagatcgtgcaggaacggcttgatcgcgaattcgacatgaatgtgatcactaccgtgcccaacgtatcttataatatatatgacaaacagggagagatgaaggaggtgcataatcccggtggtatgcccgacccgacattgatcgatcatatcgaggaaccctatatcaaggcttccatcatcaccactaccgattatatcggccccattatgacgctttgtctggggaaacgcggagaacttcttaaacaggaatatatttccggcaatcgtgtggagatcttttataatatgcctttgggggaaattgtgatcgacttctatgaccgtttgaagagtatttcgaaagggtatgcatcgtttgactatcatcccaacggtttcagaccttccaagctggtgaaactggatattatgctgaacggcgagccggtggacgctctgtctacgctgatccatttcgacaatgcctatgatatgggacgccggatgtgtgagaaattgaaagaactgattccccgccaacagtttgagattgctatccaggcggctattggagctaagattatagcgcgtgaaaccatcaaggcagtccgtaaagacgtaacagccaaatgttacggtggcgacgtaagccgtaaacgaaaactgcttgaaaagcagaagaggggtaagaaacggatgaagcagattggcaacgtggaggttcctcagaaagccttccttgccgtactgaaattggattaaaacattgccgcaagcaatttttcagagatatgcgctgaacaaattgacttgcggttagtttttaatataccagcaacaactataaatatgagaaaagtactgtctttttcgggcttcctgatgttggggctcgtcatttcacaattcctgccaatgatagcaggagaggggtatggagttgtcaagtccatttctaacgtattgctttatgtatgtcttagttttataatgattaacgtgggccgggaatttgttcttgacaagtcccgctggaaaagttatgccgaagattattttatagcgatggcaacggctgctctcccttggtttatgattgctatttattatgtgttcatattacttccgcccgattactggaatagctgggaggcatggaaagagaatctgttgctaagccgttttgccgcccctacctctgcgggtatcttatttacaatgctggctgctatcggattgaaatccagttggatttataagaaaatacaggtgttggctatcttcgatgatctggacacgattatcctgatgattcctcttcagattatgatgatcggtttgcgctggcagttgattattgtagtggtgattgtgtttctattgctgtctatcggctggcagcgattgaataaatatgattggcggcaggattggaaggctatcctcttttattctgttattatatttctggctactcagatactttatcttggcagcaaggaactatacggagaagcgggaagcattcatatcgaagtgcttttaccggcatttgttctgggaatgatcatgaagcataaagagcatgatacaccggttgaacggtcggttgctacgggaatctcctttctgtttatgttcctggtggggatgagtatgcctcattttatcggagtgaactttgcggagactcatgccggtacacattcggtgaccggttcgcaggaaatgatgtcgtggggaatgattctattccatgtcgtgattgtttctttactgtcaaatctaggaaaactttgtccgatgttcttctatcgcgaccggaagttgagtgagcgcttggctctttcgatcggtatgtttacccgtggcgaagtgggagcggggattattttcatagcattaggatataatctgggaggtccggcattggtgatttcagtattgactttggtcttgaaccttattttgacaggaatctttgtgctttgggtgaaaaaactggcgctgcgttccgttacgacaaagggcacaacgattcgttcttgacaaacatattctgatgattatatccgtaatgcaactctgatagcctgtgagactattcttcctcttcttctattccgtcaataggtagaattttccggctttcttcatggggtaactgttccacttgccgtagtttgcgttcaatggcacgtgtccgtttccccatcacttcttccagttggtcgccggcactttggaggttcttttgtaccttttcaagcagtcctccgaacttgccgaattctgtcttgacagctcccaatacagtccacacttctccggtacgcttttggatcgccagggtgcggaagcccatttgcagactgttgaggatagcgcctaatgtcgtcggtccggtcactacaattttatattctttttggagtgtctctacgaggctggtacggcggataacttcagcgtagatactttcgaatggcaaaaacatgatggcaaagtccgtagtgaaaggtgggtccacatatttgtcatgaatatcttttgccatcttcttgatcgtattttccagttgcttgccggatgactccatcagtgcggtatctccggcctcgaatgcatcataatactgttcgtaaatatctttggggaatttagcgtcaatcgggaggtaaacagtgctgttggcgtcatcttttcccggaagtttaatggcaaactcgacgaattctgttccgctcttttttgttttgacattggcatcgtactgttccggactcatcatctgttccaataaagcacccagttggacttctccgaatgtgccccgcattttcacattactcaatacctttttcagtccgccgacatcttgggcgagagatttcatttctcccagccctttctgcacattttccagttgcgaacggactatctcgaaggattgcccaattcgttcgttcagtgttttttgcagtttctcctccaccatcagacgcatatcatccaaacgtttctcggtggattttattaacgtttcctgctggcgggccatcatgtcgaacttttgccgttgcagttctccggtagtcatcatgtttttgtgcagaacgtcttgaagttgctgcatattctggttgagcgtctgcgtcatttccatgcggagttcccggatactgcggttcagttcctcccggttctcttgcatttgttggcgcagggctatttgtaattgttccgcttgcgtttgattgttgcctttcgtcagagccaataccagcaggactgtcactaatatggcaatcgcaatgagtagaatcagttccatcaatatgtaagaatttcgtttccggtttcagtaatcagaatcatgttttcccattgggcggaaggcagtccgtcgtccgtgcagactgtccatccgtcggcttcgtctacgaatacttcgtaagttcccatgttgatcatcggttcgatggtaaaagtcattcccggcacgatcatcatgccagtgcttcgccgtccgaaatgttctacatccggctcttcatggaacttcatccctacgccatgtccgcaaagatcacgtaccacactgaatccgttcttctcggcatgcgcttggatagctgcgcctacatctcccaattgcttccagggttgtgcggctgcaatacctatttccatacattctttggtcacttgaaccaatttgcgcatttcagggctgacctctccaatcataaacatccgggatgcatcggagaaatatcctttgtaaatggtagaaacgtctacgttgataatatcaccgcttctgagaatctcgtgcttgttgggtatcccatgacacactacatcattgatacttgtgcagacgcttttgggaaatccttcatagttgagcggtgcgggaatagctccgtgggcggttgtgaaatcatacaccatcacatcgatctcttctgtggacatcccttcacggatattctccgaaatatagtccagcaacgctgtattgatttttgcgctttcacgaatcccttccagttgctcgggggtacggagtaccttacgtggcggaagtttgtatccttgttttctgtatttctgtattttctcttctactgcagccggataattggagggagtaaaccggaatcccttgataaagttcttcattattatatgatatttaaaatcgacagcaaaggtacgagatttaatggaagatgtagcttttgggcttttaaaacttttcaggctcggtggtgagagtcgattttattgaatttgtattata

SEQ ID NO: 11730 - DNA, 3259 bp, Unknown
  gut microbiota DNA sequence
tctccggtacgacatcatataccgtattcattttgaatgcgacgtttgtggtgacggtcacatcaaaatagcgtttatcataattgtccgaggctttgatttccacatccggctgttcgatataaatcatcttaccataaccggtctgatgcactgtcatgacacacggtgcctgcccacgtgggataaagcggatttccgcttcacgcatcccattaatcaaggtcgaatcaatagaaactgtacactcggtaaccccggaaccattggcaggagagatatttacccaaggttccgacgcactggccacccattcgcctcccgataagacgttgaccctatccttgccaccgtcagcacccatcgtgatatcttccttatctatagagaatccggtaataccactatcgtcatcatctttacatgatgccacagcagccatgtaaacgaataatcctaatgctatttttactaaatatttcattgatattttattctatattgttatttacccagatcaagcgcatcgcaaccacggatatcctgcgacttatcgtaaaccaacgtataccgtccggctttgatataagggcatacatcgcttatgtcaatcgaaatattgggattatccttgatttcgaacatcaagatagtcggcgaaatggtatcgtcaattttacgcaagtcattggagccgatatagaaggctttaaggctcggattcttataaagtcccgtaggccactcccgcaatgtccggttgccgttatcgtcacgttgatgtctgataccgaataccaccagataattgattgacagcggttgggtcgggaatttggagaattgattgtaactcaaatccaatccgtacaataccggcatattaatcacataaaaatcatcagtcagcgaactcaacttattataagtcaagtcaagacttgtgagatactccaaagatgtttttcctttcaatgcccctttaggaatggttgtcataccgttggaggaaagattcagtgtctgcatcggtgattctttctcaaacagaagtttagggaataccttaaatttgttgtggtgcagatttacagtagaagcattgatgccccggtgatcctcgccatcttcaaacttatcgatcagattgttggagaaatcgactgttcccattacaaaatcagacttggcattgaaaatattaggcacttcggtcagcagattatttgaacagctaaaattctccacatcattccacccaaagaaatatttcaatccgttgtcttcctcaacactcggaatctttgttattttattattatccagatatactttcatcagtttgacttccttaccgaaaggatgcaatgtttcaatctcattgttggtacaatccagcaatgacaattttttcatctttttcagaaggtcatattcaggaaattctttcaatttattatatcccagatataacaattgaatcttatccgcacactttgaatcgtctccgataatctcttcccagttctctttcaacacatctctatcttcagcgtaaatacccggattacgcgccacattgagtgagaccaattcaggtaagttcttcaacatcttcactggaagcgtttccaaattaggacagttgtagatttctatatccgtcaaggtggtcatatcctcccatttccactcatcctgttcttcataataaggagaatcaggctttacctcaacaaagaaaccgtcactgcggataggtgagttggctataaagaattgttccagttttgtcagcctcatgagggctttggatacaccggtgattccgttcgtcaaaacaccaaactgcacatctttcgtagaaatacggctgctcttgatgggcttcatcttcggattgtcgttgattcctttgcgtagaataccggacaaatcctcccgggcgtcttttgaaaggaatttcgtatcatagtccattctcattgctttccgctgttcttcgctcatgttgacggaatagttgtcgaacaaacgtcctcccagcttttcatcatgtgttcccaatgataagattcttaattcggtaagttgaccgatttcatcgggtaccactcctttagcaccgaagccggcaagagataaaagagctacacgcccgttatccaacaactgcacgccgggttgatttccccacaagtcaatgtccttattgaaattccaattggctcccatcggtgaggattctccgtaatacttccagttctgaccatccatctttgtccagatagctttcagtgctatatagtctttgatgtattcggctgtttcgtcaagacggacagggacttcagcatcctttgtcacttcattgtctttcacgacaaacgatttggatgtctgcacggtggctacttccaatacgttcttagcctttttatccgaataggttgtataactacttatctgataagtaccggctttcagccatgccaccgtatcacattccatataggaagtctcctggtttctatcagcatcgacatagtcttctgcaggtttatcggtaaagtcttctacgtatttcacccgaatgctttttatcgtagtcaattcctgagtgaaaaggtttttcacagtaatatctattgccaggatattgctcaacggataagcttcttcccctgttgcacgggtcttcacaaagtctttcaccagtttgaatgtcaccatgcctcgtgccaccgcatctacactcaaattctgtgtatgcagaccgtcggaaacaatcgcaaaggcattattctccccggctggtcctgcatataatacattgtccaacttatcatacaagtagtaaccaataacagtataggttcctgtaagcaacttcaacttatcactacggagtccgaattctgcattttccgcattgtatgcattcaatagcaaagtctgagtaatagttgaaccattgtattgcatgacaactttcactttctgtgcatcgttcagcttatccaacttatcggtcacagcacgcgttgtcgttcctttgtccatggatgcactctttaataatctgaactgcacatatccataagtggactgcaacggttcgtcatcatcagagcatcctgttaccaccgtcattgccaataaacagacaataaggggaacaaagaataatatggaatatagtttcttattcatttattcaatgattaattataattcggggtaataattagtactttta

SEQ ID NO: 11731 - DNA, 12858 bp, Unknown
  gut microbiota DNA sequence
actaaaaatattaggtgtgtttgcggagaatcagaaaacttttagttgaaaagttactttattctcacttttcctacaaaatctttcttatccacgttcaactcttccaatgtagtcacccgtttaccgttcaatacgatattctcgaacagaatattctctactttgcagttcttatcataaccttctatcaaggaaggattgatatacttgcctgtacaagagatattacggaacacaatatccttcacgcctcttcccggaccggtattatacttttggttatacatcacacgaagatggaacagttgcccttcctgaatattttcgacccgaatatcctcgaacgttatgttgcgtgccaagttatggtctccaacgttgatggtcatacatccttgataattgcggtcgtcttcatcatgctccaagatatcgatatttttgaataacatatcttcgagcacttcatctcccgtctttgtattgccatgcgtaccgatattaatggggtgcgcaatatcagcccaaagagtagaattctgaacacgtactttccggcaatctccataataattccaacggtgagtatagaaagcaagacaatcatcggaattacgcagaaacacatcatcaatgacaatatcggagcaagacatgaaatccagtccgtcactccacccttgatagctgaatgatttcaggtttttgatggttattccttgactttgtccgccggaaacggtatagtgacgtgaattgacaacagtaattccatcaatcaatacatttttggaatatgccaccgatatgccctgttgcggttcgagcaacataccatatcccagaatcttcacattttctacgctgtcacaattaagacagcctttcagcactgccccaccttccaaatagaccgtagtgttggaaggaatacggaaacacttgcctgccgcatcggtaggttcatggataccggactcaaaatacatcacgttcggatcattcttatcaggtatatccttaattatcggattggcaaatacgtgcagattattcaaacagtcaccgttaaattctacagatagtttttgtggcttatccaatgtgaacaacagaaagttcccgtctatcttcggctgaatgcctttagatagtggacgtactattgccgaacggatctctccattgttcttccgtattaatacttccactttaccggaaaaatcaaactgcaccatagttgcatccgattttgtatccatatccacctttacgttatattcgaaaagatctacccaatctttttcacctgcttgccgtacttttactgtgtagtcgtcgttgtgacgggcatagtatataccttgcgggacagggtatacgagtatttccgcccgtaaaatactattccaccctaacaacaataaaaatacaactatcaactttaatgatatcttcatattaaataaattcattaaacacattctgcttttatcttgcaaacatcaatgtaccgaatcctaatacatcgtaaccgccggaattgggatcataatatccaccgccaccttctacacccacatattccgtagcgattttagtatatttcagtttttcatccgacatatttttgatactcttataatgataatacggcaatgcccaaatagcacgtttcatccactttccacctcctacaactgtctgttcttccggagaaatgccattccactgattgtgtttttgccatatataagtagtgaaaggcacggtttcctctgtatagttgcaacatgcagcatactcacatccccgcaagaaaagattatcatcatacgcaaagaaatcatctccctgactccatgctaactggcaaataacaccaaccaaaccgacacacattaacgtatggccctgatcacgtccactttcctgccattgtgcaaaattgtattcgggtgaatagtcgtaatagatagcacgacgcaaacgtccgtttgtcactcccgactggaaatgttcaataccttcattataaatatcacgcctatcggtgacaatgccaatagcgattgtagaagcaatgttgcacaatccccagtttgcccaataatgcaagtggttagtatcatgatgacgcaccaggaaatccttattggccggatagaatacttttaataaccactgttgaaaggccagaaaatcttcgggatcccaaccttcatattcccgcaataattgaccggcaatggcgaactcataaccataaagccctgcagccaaagaaacattagagttgccagtaactccaacacaggtctgtacccatttattcaagttttcaacagccttagcggcatattcatcatcattttctatcttccaacgcaatgcctgctggtaagctattgacgctccacgtgctgcattgatatagttttcccctaccgttgccccatttatagtcactgccgctccacgcacaatatactcaaccggatatgtatccgtatttttctgagagaaagaactctctttcaacatctgataacccgtgatccacggctcttccatgtcttttttctcacgaatacgggcaaaatcttcttcagaatgtataccaaccttttccataggtactgagttgtctttcagttcaacttgaacaagattgatattattgtccggcaaaataattttatttaaatcggtttctacacctaaactcggcaaatcaacgccatcaccgcatcctgcgaaggagaagaggacgaatgcggctgctatacaatatatttttctcataataattttcattttaaagattcggtgcaagtaatgcaatcgttataagactgcattacttgggtaattgattatttcaacagaactttgatagacgatatttttagtgctctattactatcaaaatgaacagcaaatcctagggtcgtttcaccctcataatctatagtaagattttcaataacgaaacgttggtctttgtaattttcgctataagtttctcctggcatataaaaatcaaccgatttaagtaggtttgtattttctgtccaatttccacttgcatccatattaggagtttgctcttcccctcccttagagataaataaaccggctttctttcgaccgcttccgtttgtggcaagttctgccacatcaatcactacatcatagacgccctgaggtatattaaaggtctggaacatctttccattcatttttttggatcggccttcccatccgctttggattaccaataatcccccttgatcattcatatacaacccttctccaggcatttcaatttcagattcattatggcagaaaccatcattgccagcaccatagttaaatttccaacctacgggtgtgcaatgtccgctcgtctttccttctttggattcgaacggctgtttcacattggttaatatataatccgaaatatcacttcccgctttcaacatattcagcttatcgccgctcaccacatccaccacaacatcatcaaacttgagcgttatcacatcttccccttcagcacattgctcagagacgctagcagtaatttccgtatcacttactactgtatagttcaaatcttgtcctccgaacgtggcactggagattgtactattccggaagcctgttcctttgatagtaacagtattacctacttgaacagcttttgaactgaacttattatcagtctcaacggaagtgattacgggcgacgccaatatttcaaacgccgcatagcctcccatattcatttcaactccatgaatagtcattgacaaaggaatctcaccaaacgttgtcaatgaaggaaccttaaccgtaaaggtgctttcatccactattgttatatcagtagccggagtttcaccgaacatcatctgaatatcttctttggcaatcgttccaaggttttcggcaacaacggtcaccactgcacctacgtatcctttcaatggctcaatacttgtcagcaccggattcggaagaatctcaaagtctaaagtcttttctatcttctcgaaaggagtagttacagaaatcgtataatctcccggcgcaagtgtggcaggtatctgtatatccaacagttcatcttcttgtgttttcacttcggcttccacagcatctcctccggctttaggagtgaagaatgctttcactggttgcaacactaccgtttcatccagcaccgcctgattgagatttgttccgctgacggaagccattccggtggcatatcctgccgcctctccttttacagcatccaatgcggcatgcttaagaacagtaaatgcgacgggcacattgaccggcttgtctgtaatattaagtttaatctccccactttgcgcaccttccggcactttcacagagaaactttccatttccggttccgccataaatgtagcactttcctcttttccactaaacagtactttataatgagctgaaggaactcctaaatcgtgaccattaaatttaatctcatcgccgacaaaaccatacgaaggaatcaccgtcctaatacccggaaccccgagtacgtcgtacatcaattgcgtatctacacgttgcccgtaaactactacggagatacgcccggcagtggtaccctccggaactcttacggtcagttcttcatcttcacaagagatgagttgcaatttcgtattgccgacaaatacctccacatcatttgcgattatgccaaaatttgtcccgtaaatagtaaattcatttcccacgtaaccaactgcatccgaaacggatgtcaccgtcacgacaggatcctgattctgcatacggatgacttcttcatcatccccgtcgcacgatgcagcaaataccgtaaacaaaaccggcagtatataattatatatcttcttcatacttgttgctttttatatttttactcaagaaccaacttcacttctgttattttgaaataagaattagcaccactattcattgtagtaaggaagccgatcagcacatcagtctctccctccaaattgaacgaagcagtcacgagttgccctgaagcaccatcaactgttgaagtcttatatgaagcatacacacctttcgtaccatccaaagttgcaacctgatcagtatccgggatatcattttcttccgttccttttacaataaatgctgccacaaaatttccgtcgagtactttcgtataggcatacgtcacttccaatctgtacgtccccggacgtaatttaacttgttggtacatcttaccgttagcatattgcttcttattccagccgtgttggaaggccagcgtatatccttccgccgccttatattgcattccggaaacagtcgtactaccatctgcgttaaaagacaccgcattctgtatccaatcggcaggtgtccaccattcaccattcttccaactttcttcactcgctttagcaaacggctgtttatagtttttcagataaacagaagtcacgtcaccttttgcattaggattaaacaatgcatttcctgtcatagcatatccgcgaattgtaataaccacattaccggaaacccaatttctgggggtgacagcttcgatggtagactcatccaccaatcgtatttccttagctgatgtcccgttaaaactaacttcaatgtcattaacatccgttccgaaattttcaccggtaatcgttactacatcatcctcttccgctactcctgttcccaaaggattatcagagacaacggagtgcacgtatggtgtaggcaacactttgtattgacctattacacccacatcattcgtccagatttgcattgttacgtcaccgcttgcagctccgtccggcacttccactacaatgcgattatttttacacatcaatactttcgtcgctagtacacttccgaaaaaaactttcacaggttccgtacgatcaccgaaatttgttccggtaataactacttgtgaagaaacatatccgatattcggtgacattccggatacttccggcatcggatattcatatttttttatctgcggatcttgttcgcaagcatagaacagcaacacaaacaatgttaccgcaaatattccaatcatatttctcaataaatgtttcatatatcctatttttaattaatagattattagatctcggctaattaatatcccggattctgttttaaattcggattcagattaatctggtgttgaggtatcggccaaaggtaatgtgctttacgtacagtactattagccttaggagaaatcacaacacaagcatgttcttttccatctcctgttattactgtttcctcaccataaacatacgatttagcatcgtacttcgaagttggatttccagatgcatctttaaacggagtgctatatcctgcttctccgactactcttcccaaacgggactggttcaacgtttcttccaagattccccaacgtttcaaatcatcataccggaaaccttccatataaagctctacagtacgttcacgacgaatctcgtccaacataatctctgaaagctccttttctgaattaagttgttttttaatcttctctaccaatgcattggtaagatgagccactccggcacgatcacgcaacttattgattgatatccctagttgggcatccgttatttcaccataacgttccattatagcttccgcataattcaagcagacttccgccaagcgcagtaccggataattggctgattcttttttatcacccacaatagggttacggaacttctggtcaccataccctgaagtgctaccaatagattcggccggacctcctacatatgccatcaggcgataatcacgattctgatactcatctgtaacattctgatatcctttaaactgttcattattagttgtcggcattccgttggtgcacacaaacatatcaataaacttacgggtaggataaatataattcatttcattattcaaggaaaatgcacctgcattcagaacacggtcaaaaacagagtaaataataaactctttattgctatcttttccataacctcctgtctgacttccatcttccaaacagaaaagataacgactgctcaaattatcaagttcgttattatggttccaaattctaaaaacctcatcatccaatacatctttagaaagagatattgactcctccaaaaactcatttacctgatcacttttcggacctgcagagccttcataatcggtagatgttttattgtatttgcgccaagtagcttcatacagcaacacacgagccttaaatgcttttgccccttgctcacttatatgtcctttatccgacgtagcaatgttctgctcttttggtaatctgctgatagcattttgaaggtcactaagtatcaggtccgctacctcataacggctgttacgcggtttttgcaattccggtgaatccgtatcgagaggaactgtaataataggcacgcctccaaaatatttcaacaggtaaaaatagttataagcacgaaagaaatacgcttcgccaagatagggatcaatttcactctggttaccactatacgcttccccacgttgaagcaatatgttacaagtacgtatgttattataatggtcccaacgggcatcatcataaccgagggtcaatgtaccatatcccaaataagcttggtttccattacggctgtttactaaatcagactgcaggtccatgtgttccattatacccgagcgccagccaagcagctgtccgtaaaatccatttgcaaactcacggaaatgttccggttttttaaaataaactgcatcagttcttgaatccaacggttctaaatcaaggaatgtatctgcacaagaagttaatcccatcatgcaagcacaagccaatatataagttatctttttcatacaatagtctatatcttaggttgattataaagtaacattaagtccgaatgaccaagtacgggcaaaaggatatccgctcgtattggaagcggaacccatttccgggtcaaaaccgtcacgaatactagtagcctcccaaaggtcgttacctgagaaataaagacggactttctccaatttcactttacgtgtccatatctgtggcaatgtgtatcctaccaccaatgtcttcagacggatataacgactattctgcaacatgaagtcgttattctggtaattccaggcagagcggtttgtattatttgtcagacgcggatatctggcatctttatgatcttccgtccaagtttgtccgagaaaagtcggattctggtttgtgtagattgtacggaaaggataagccatccaatcattacgcataatatattgtttggcaactccttgaaacattgcgctgacatcaatacctttccacgatgcgccaactgtaagaccatatacaaaatgcggattggcatctccaatatactgaaggtcgctatcggcattaccaagatcagtaatcttataatcaccgttcaagtcaagacgtttagtatcaccgggacgaagttcggcaaccgttccctttcctacattatttagtgctcctacctgctcggcatacaacgcataataacggtctacttccgcttgatccttaaagtatccatctgtacgataaaggaagaatgcattcaaaggataaccattgacagtcttattcactcctgctccatatccgtctgctcccgtcagttcttccaatttgcttttagtatctccgatattgaaattagcataataagagaagtctttaatctgatcacgccatccgatagtaaattcccaaccttttacattcagatgtccactattggttttcggagatttgcctcccagtacaccgggataagtgacttccgacagcataccgatattatctttaatgaagtagtcgaaagaagtagtcaggcgactattgaaaaagtgcaagtcaataccaacatttttctgctctacccgttcccacgtacgatcaagactgataataccattattccccaaaccagtacttacctgtgctgcaggagaataaccaaagacagtacttccttgtgttacagcaactaaatagtcaaaatctcccaatcccgcatcatttccggagttaccgtagctgagacgtaattttccaaaattaacaacaggagtaatagcttttaaaaagttctcttccgtaaagacccaacctccggataccgaaacaaagtttttaaatttatgtccctttgcgaacttagaatttccgtcacgacgtccgatcaattcaatcaaatacttttcagcataattataattcaacttcataatgtaagagtaagaaccgttgtgggtcttacctcctccatttccttgtgcaccggaagcaagattcaaatcatacacacctgtatcttccatcttctcacgggctgttaccatctttttctgtacccacttttcagcattgataccagccatcgcctcaacattatgcactttcgcaaaagtacgtttgtatttcagtaaggcagaataatactgatattgcatattattggcctgcatcaaataagcaggattatgaatatccttaatattcaatacatctgtcggataaatcaatgactgatttgtattgctcacaactttatcggcaggatttccaaaccaatcatatgtctgtacaggaatcacataacggtcacgacgatattcttcattttggaatgaagccataccttcaaaactgattcctttccaaatatcaacaatggctttcacatcaacacgagtagtcaagttcatgcgttcgtcacgcccgccatcagaggttgcagctacaggttgacggtctccaactttaccaaaattggcataccactgcccatagggatttttagcagggaaaaacggaggttcgtttccatataaagatgtatcaataccggcagaaggtgactcagtgtcagtcttaatcatactagccgatgtttccaatttaaaccagtcagtaagtctgattccataatttaaacgcagattcaactgtttttggccatcatacgctgtcgccaagtttgcctgattatctgcatatgctaaagatatacgataatctgttttctcattagaacctgataaacttaaattatgctgataagaaaaacgacgtgcaaacatctcctccaaacgattggcatctccgatgaagagatcatatccccagtctttagcattcgtatgataaataccggagattccctgttgcattttcaacatattctcttcagaagtccagttccaccagtcttttgttttctgttctttattcgcttcaatccacatagtagcatattcctccatacttggagagaaagccatgataccgttagtcgtgaaacgcatattgaaattatagtctactgtcacctttcccttaccttttttcgttgttaccagaatcacaccgttggcagccttagcaccgtaaatagaagcagaaccatctttcaacacactgatactttctatatcatccggattcagattctggaaagaggcatcattcagtgtagggactccatccactataatcaagactttcccaccatttacagatgtcgcaccacgaatctggaaattcaatccttcattacccggacgtgagctggaacgggtaacaaccaaacccggagtagctccttgtaaagctgcaccaacattggtgatggcacgactttccaaaaccttactacttacttgttctaccgcacccgtcaaagtagctttcttttgtgtaccgtaaccaacaacaactacctcatccaatgcattattgtcttctttcagtacaaccttaaaatccgaacggtcatgaagagtaataatctggtctacataaccgatatagctaatctttatttgcttagcatccgcaggcacgttcaatgcaaaccgaccgtcgatgtcggtaattactcctgcattacttcctacaaccactacattacaaccaatcagcggttcgccattcacatctgtaacaaatcctttgatagtacgtcctgtctgggctacagtcaaactctcttctacagaatcattcgcatagagcaatacaccgggtgaaccacccagcaatatggcaaaagccaatgcaactcctctactacataagaatttggatttaatttccataatactattaaattattaaagttaatatgctttattccgagacggtatttaaccgacttgggaaaattcattccgcaaacaaccacgtacagtcttacgcgccaacaataactgacactctaccgtacgaggagacaaagacaattttcctgcaatagcagggcaagatagctcatgattaaaactcaactcgtaaatccggcggcgcttggcaggaagacttttcaccacctcctcatgcttttctttcagttcacgataacagattacatcctccgtcgtgtttctatcagagtcgttcaccttattatatatataagcaacaaaatcttcctgcttataataacggcgtatctgatcagtcacaatattacgggcaatcgtaaaaagcaaagaccagacagtgtcgggttttacaaacattctgtattcccacaagcggacaaaaacatcctgtgccaaatcttccgcttcatacggacggcaaatacgaagagcgatatagtttttgatatgctcccgatatttcaggtagcactctgaaaagaagtcgtcaaatgtagcttgttgtttactcatggcattaaatttatccgtttaacgatgttacaaaagtaaaaacaagttttaaaaacaaatagcacaaaagtaacagaaaacaaaactatggtaacaagcgtgtttttttgcaaaatatccccattccatcggcataaatgcaggtttcatagtaacaaaaaaaaggggaggccgttacatttggcgactcccctgttctgtactttgcataagtctgtggcatgattcgccacagatgcagattatctctggtatttgctttactgcgcagcctgaaaatccggaatacgtttcacatccgcacctttcatgacaccttttttaatggcctcatttgtttcggtgatttctttcttgacgcgcttataatattctttcgtcagacctttttctattgcatccgattccgtcgctgcccagaaatattgataatccatcaacatcagatccggagccactactttaaagaaaatactatcccctgcaaacttctcacgtaaatcacccagataaattgtatctgccggatttacttcctgactgttcgcactattttttgaactacctccgcaagaggacaacaacaaacctcctaccaatgaaattaaaactaatactttcatatcactatttattataaattggcacaaatgtaataattaaactaataaacgtaactataatgtcattctttttttccagtctcttctgcatattgcttaggcaacatcccaaacatttctttaaaacacttcgagaaataactggaagagctgaatcctacccgattcgctatttcgatgatcggcaatcggcttccttgcaataattgcgctgcccgtttcaaacggatactgcggataaagtccgtcggggtatgtccggttatggattgcagcttacgataaagactcatgcgtaccatccccaaatcgccactcaactcctctacaccatattccggattgtccatgttcttttctatgtattccaagcatttctgtatcaattgctcgtctacggaagtaattgtgatag

SEQ ID NO: 11732 - DNA, 6866 bp, Unknown
  gut microbiota DNA sequence
ggtgatgactggaacgacattaagatgtatgaacgctatgacaccacacgtaaaatctacactcaatattggccacaggatttttccggtctaaccgggcaaaacccttactggatcgcctatcgtaacttacgtgaaacggataaagatcgttacatgttgagtgcagcattaaattacaagatattggattggttaagcgtttcaggtcgtgtacgtgttgataattcggattccagatatacccgcaaattatatgcaaccagtaatgaaattctggtagaaaattcaaagaacggtctttatggaatcagccaaaccaatgacaaacagacttatgcagacttcatggtcaacattaacaaaacatttaaagaagtattaagcctacaagctaatctcggtgcatcttattcagatatgcagcaagatgtatttagcaatgaaggtcctatcagtgatacaaaaggtattgccaatgtattcaatgttttccatttggataatgacaagaccaaacgctcgcaatccggttatcgtgaacagacacaatctattttcgccagtgtagaattaggatataaaagtacctattatctgacattgacaggacgtacagactggccttcacaattagctggtccgaattctgtaaagagcgctttcttctatccttctattggtggttcggtgattttgtcagagctgttaccgatgcctaagcagatttcattcttgaagttaagggcttcttatgcttcagtaggtcttcctttcccacgttttctggcaaatcctacatacgaatgggatcagaaagcacaaaaatgggcagtaaagactcattatccaatgtatgaattaaagccggaaaagacaaattcatgggaaataggtattactgcacgtttccttgaccatttcaacttcgacttaggattgtacacaactaagacatataaccagacattcgaaccaaatatctcagtgtcttctcaatattctacaatttatgtacaaacaggtagtgtacgcaataagggtatcgagttatctttaggatacgacaacgattggaatggaaaattcagatggggttccactgttactttcagtgccaacaaaaatgaaatacttgaattgatggaaaattacaaacatccggaaacaggtgctatcataacattggatcgtttagaagtaggtggcttgggagatgctaaatttgttctgaaaaaaggtggcagcttaggagacctttactccattaaagatctgcaacgtgatagtaacggcaacatatatgtgaatgaaaaaggagaagttgccagtgtagcatcagaagatattaagttaggcagtgtattccctaaatgcaatctttcatggcgtaacgatttcaaatggaagaatctgaacttcggttttatgctttcagcacgttttggcggcattgtttattctgcaactcagtcttatcttgactattacggagtatctgaagcttcggctgccgcacgcgatttcggtggagttaccgtaaatggcagtgatgtgattaatgcacaaaaatggtattcggttgtcggagcacagaacggtattccccaatactatacatatagcgcaactaatgtacgtttgcaggaagcgtctattggatacactattcctaaaaataaattatggggaattgcagacatcacggtatcattggtaggacgtaacctttggatgttgtattgtaaagcaccatttgaccctgaagcggtcgcaactaccggcaactattaccaagggattgataacttcatgactcccagcgcacgcagcttaggattcaacgttcgattcaagttttaacctcttttattaaagtacaatgaataaatcaattataaaattatttctgttaggaggattgactataacctcaataacttcctgtacagacaattatatggattataataaaaacccatacgaagtgaccgatgacgaaatggaacgggatgcccacaaattgggggcagcactcgtgggtatgcaaagtgtaatcgtgcctgtaggagaacatctggcacagttctccgaatgtttgttgggaggtgttttcagcggctatatggcagactctaaaacatggggaaattcgttctcatattttaatcagtcagaagattggaacggaaaggtctatctggatatcatgcctgaaatttactccaatcttgctgaagtaaaaaaatccactaccgatcctatcccattggcagtagcggaagtgctaaaagtaacagccatcgttcgtgttacagatgtgtatggtcctattccttattcacaggtaggacaggatggtaaactgacagctccttttgacacacaaaaggatgtttacaccaaaatgtttcaggaattatctgatgccatcactactttgaccgccaaccgtacaaatgacttttctccgaatgctgatcaagtctttggtggtaaagttgaaaagtggataaagtttgccaattcactaaaactgcgtatggctatacgtattcgctatgcggatgctacattggcagaacaaatggtaaaagaagctatcagtacggaaaatggccaggttggtgtaatggagaataatgacgataatgcatttatgaaagtttccctcaatccgttttatactattttcggttggggagactccagaatcggtgccgacttacttacatacatgaatgcttatgaagatccccgtcgctctgtttatgcattgaagagcacatttgccggttcatcgataacaaacggttatcatggtttacgtattggaaacgagcatactgctgttgatgccaaaatgtattcaaatatgaatgttgcggctacagcaccattaatgtggatgaatgctgccgaagttatgttcctgagagcagaagctgccctgttgggatgggataccaaagacacaccggaaaattattataaagcaggtatccgtttgtcatttggtcaacatggggttagtaacgtagaaagctatttggaaggaaccacagcacctagcagttataaagatcctaaagacacatatactgtaacattaccgggaagcgcagtttctgtaaaatggtcaggagctgacaatgaagttaatctggaacgtatcattacgcaaaaatggattgcaaatttcccgttaagtttggaaggatgggcagatttccgcagaaccggttatcccagattgctatccactcctaataacaaaagcaacgagattgctgaaggtaaatttgcccgtcggttgaaatatccgcaacaagaatataatacgaataaagttaatgtagagcaaattgtcagtacgttaccaggaggagataaaatgtcgactcacatatggtgggactgcaatcctagattgtcaaatgaataaaatctaaatattatgaagaataaatttaaaatagcaaccttattgttctttactacaagcttcacattaggagcatgtagtgattggacagatattgaaggtatagatatcaaacaacctaacattcaggagcagaatcctgagttatataccaagtacttggagaacttacgccaatacaaagccgatacggaacataaaaaagtgtacgcgtggtttgataatagcgaaaagaatccttccagttatgcacaacatataacaagcctacctgacagcattgatattgtcggtttgatgtatccttcagagttggcagcttttgaaaaagaagaaataatgactttacaacaaaagggtacaaaagtagtttacgccatcagttatgatgagatacataagcaatatgaggacattatttctacccaatcagaagctgaaaatgaaaatacatttgactattttctttcaaaagaaatagaaaagcaattggcatatgctgccccctttgatggaattatactaaagtttatcggacaaaatccgaaatatatgacagccgaagataaagctgcttacactgccagtcaaaatatctttttcaatgctgcattaaactggattaataaaaatgagggaaaattcctctctttacaaggaaaacctcaaaatgtagtagataagaatattctatccaaattccttcatctcatcatagagatgtaccaagtaacagataaaaataaatttactcttgccattcaagactgtttggaaacaggagtaccaacagaccgtttcatcatggctgtttcaactccttctttggacacgtctgacacaagtacaggcttcataggcacagaaagggctattattgaaactgcttattggataacagcagacactcaagaatatgataaatgtggcatagctattaataatgtccaaaatgattattatcaaacaagcgggaattaccacaatgtgaaaaagaccattaatataatgaatccagcccccaccaaataattaaactattatgaaactacaaaaattatatggcattacgttaggattattgactttcatctctacaggatgcaatgatgatatggaaaacttctccaataatattttcatgagttctgttagtcctgaaaacatcttagtcaaatctaacatagaatccgacgaacgtactttccagttggaaattgcaaaaccggaagaaagtgatattaattttacaatcaaagtagaccctgcattagtatctgcttacaaagatatctactatacaaatgatgtggaaatgttgcctgaaaaacattactctttctcaaatatggaaggaaaaatatttgcaggaagtgttatctccgcaccaatcacagtctacttcaaagaaattaatcaattgaatattgacaaagtgtacatactccccgtcagtatagacaatgctaatattggcattttagcttcagcacaaactttctattatgtatttaaaggagcgtcactcatcaataaagtagcgaatattaaagaaaacaatatctatgtagaatggaaaaatcctgaagcagttaacaaattaacaatgatgacagcagaagcattaattcgcccacacagctttgaccataacattagtacattaatgggaattgaaggcaaattcctattccgattcggtgatgatggcgtgccagcgaaccacttgcaaatagcaggaacctcaagtgctacaaacatacacattaatcgggatgtaccattggaagaatggttacacattgtcatcacttatgacgctgaagcaaaaaatttaaaggcttactacaatggagaattagttactaatagtccaatgaatattggcgctattaactggggaattcctcattctgacgaatctaatggcaaaccacgttgcttctggataggttattcatacaataatgaacgttggttagatgctgatattgccgaagtacgaatttggaaccgtgtattaagtgaagaagaaattaatgcaaaagatcatgcatacgaagtagatcctaactctgaaggattagtagcgtattggaaactgaatgacggtcttgatgaaataaaagattattccgtaaatggtaataatgcaaccccttcttcaacactgacttgggtagacgtagctcttccggctaaagaggattaataatcaacaattttaattagaattaagtcatgaaatatacaagatttatcaaatcatctttttggattgcgctacttgcctgtacaagtaacgtatttaccgcctgcgaagatgacattactatatcatctgaaaataactcatttggtaatatagaaggtaattttggctacgtaaaatcagccgccggagcaaaagctctcactgccatagccattaatggtgacaagcatggtacaggacatttatactttgaactgaacaaagccaccaataaagacatcacagtaacatttaaagttgatgagtcagcgctaaatacctacaatcaagtaaatggcaccaactatccaatgtatccgacagataaactttcattggaaaatgaaggaataacaaccattcccgccggaaagcgcaaatcctcttctgtagagttggatattcaacctggaggtacaatcggtacaaggtatgcggtagcagtatcagctactgcttctgacggaattgaaacttcgagcaataacgaatcttatatttatcttgtaactccacaagctactctacctaatacggaaaaaggaagagtcaaaacaatctgttacatagaggtaaataatgaaaatatattgaatgcaggtgaatataccatggaaaacagtaagaaaccattcttcgatatagtcaatgtttttgccgccaatattcgtttaaatgaagagggaaagccatacgtacattgcaatccgcaagtaactttcgttttagagaatgctgataagctaattcgtccgttacagcaaaaaggaataaaagtccatttaaccattttaggcgaccatacaccagcgggcatgagaagtttaggggatgaagccgctaaagattttgccaaagaactaaaatcatatgtggacatttatggatttgacggtataagttttgatgatgaatggtcaaactatgaacaagtgggagggcatcccggattggtagttccatcacaagagcaatacagccgcctgatttacgagtgccgacaaataatgcctgataaacaaattggggtatattggtgtaaacaggaaaatggtgaaccttctatcaattatccattaggagaaattgaaggtaaggatgtaaatgatttgttagattatactgtttttggaaactataatttatggaatgaattatcacatattg

SEQ ID NO: 11733 - DNA, 16028 bp, Unknown
  gut microbiota DNA sequence
aaatttaatacttttatcgctatgtttctaattataagtgaaatatatttattcttatatcgaactcacgttaaatatctatccccccaaaaaaataaagttctcctatccccaaatatacccgaagatatatttcagacaggagaaccaccataatagacaaaacaatagtctgtccctttcttatattgttcttaaaatccctctctaaagttttttgatagagaaatcagcaaaacggatttcctcgtcacgcaaccgatcttgccaactccggttctcacccaaataacggtagataccccatttgggacgaagtccggtacaatccgtacgccacatatccattttttcaggacctagtttttccatctttgatacgtgtgatgatcacttcataagaaccgttctcaccgaaacaggctttttcttctacctctacccagttgcctagaaaatcggcaaggtctgtactaataagggtagaagtgcttccaccacgtttatcataacgtacccgcaattgttgtccccctttgctgttagaataggcagtcagagtgataagaggagaactgacatctgctgtgcccgacgagttatcaatacctttcaactggtgaagatgagaaaatttagtcgtcgtttgaaaccctaccggcagacagaatttccaacgaaataccatagcctctcccttttgtccgacaagacttttcggagatttgttatccgtctttatctcattgcgctgacggtcagtaatatttgtaagcccacgatcatcatcgatcgtagcatgaatgaaaaaagcaaatacatacttattcaactgattatcataaacctgctgaatatgctgaaaatgagcggtcttatgttcacgtgaagaatcaggcgcttcatggttatatcccgaacgtttaatcaagtcatatgtttttatactattgccatcagcaatcaatgtaccatccacctgctgttcaggtttcggttgttctttctcgtctatcacttccgatgaactgttggagcaggcgataaaagcaaaaagggctaaaaataagattccttttctcatttggacttatttaacatggtcagtcaggaaatctaccgatttgaagaaaatttcttccattttatcagaagtctttgaactgacattatggtcataatattcatatctcaacagttcacagactccccctcttttctttaaagccgatgcaaatatcccgctctgctcacattctaccgtaacatcacatgtaccacataccaacatggaagcaggtacattcttttttggaatcaggttgacaggagatacttcccgaagtactttaggatccctgccacagaaatatccaatacgctgagggtctttcgtcttttgaatgatagccgccttttccaaatcataaataccggaataaccaacgaaggccttcgttccgggtacagtcattgcagctaccgcagccaaatgagcaccggcggaagttcccagaaagccaaagcattcagggttgatattcagctctgcagcatgttcccgtatatatttcacagcatcccaaacatcttggatagaaactttcacggttgcatcagattgcggagccaatgtataagatacacgtacaccagtgatccccttttgttttgctaaatattgggataaagacctagacgaaccgttattgccccgtgcccatccaccaccgtggagataaactacaaaaggagcagggttatcagtttctgcaaaatcaactgtcagtatcagctcataatctttatactttttgtaaacaatgtcttttgtaattactcctttataatccttgcttttcaagcggtttgcctggtaagtataaggagtcattacatcaggaattgtattcacatcaataaatttcgcatatttctttgcatatagcaacaaataagagccatcttcgttctgcttcatcttcataccataacgattggaaaactgttgtggttgagtttcctgcgcaagacaaagaaacggcagcatacacaaataaaaaaacaatttcaatttcatgttatcacttaatatcaggtgaggataaattatgtcttctaactctatttcttcttcaaaatcagatacggtatcgtttctacatcagatgtactgtatttcaacccaatacgctttgccgtatcaatatacttttgattgcccaatgctgttcctgcttcataaagaagaatagctgcacgagactggtcgaaaggtttaatttgtttgaatttccaactttcgggattcagatagtagggatatagataatccactgcctgtgaagccacttttccattgggagcaggcgtactccataaattaataccaacttgactggtgatttgattagcttccatcaaagcttccaaagcgaaagttgaataatgtaaagaaagggtacgtttcaactcttggggcaatgagccatcgtcagcaatctgtgtacccatcttgggaagaatactttgttcagccacctcacgaatacggtcggtacggtctaagtaggctaataccatcagatgattagttcactcttgcttatcattactcctgatatattaaaatattatcaaaaatataaagtctgcgctgttcctcaaaaaacagtccatgcagaacacagagagatgttacaaaagataaaagataaagacaaggatggaatgaaagagctggtactccgccacttgtccaacctgattgattttgccaaattatcgaccaaaggagagattccggagttcgaatacgggcatatctaaaaagcaaaagaaagcaataaaaaaataatagaggaggacatttgtcctcctctattattttttaagttaacagctagtctctcaattaagctgccggatcgggagcttctccgtgattaccgtccgaatttccgccatcgccagaatcagagccaccattccctccatttgttgccacaacgtccaatggtacatattttgagatactcatcttatccaacatcgtttttaactgacttcccggggtaaaaactatttttctcactatgatattactactatcgacatccttggcttctataccacttttagcgttaaaagtaggacgaagtgtaccgaactcacctagcttcaccgtttttccctcatccatatatccttccaatgaatcaagcagcccgtctaagactaatttgacctgaccacgatgagtaccacaaatcaatgatacatttttacacaatttcgagaaatcaattactccatcgctcaccggagcagcgacatacttcttagttttggtttcatcgaaattaaagactctttcttttactgcatactgtaatcccataattttaagtttttaaattgtttgataaaaatgttgttttgtgatcacgatgcaaagatacagcaagggaaaaccaccgaagtgctttaatgctccttaactacccgttaatctaaaaacactcctttgaacacctgcctaaaaaaatattcgcttttgcctaaaaaaagatatccatcctcctaaacgcagatatctttttagacaagtatcgtcttatttgataagataggtagccactaccggaacattacatttccgtatacgcaactctggtaagggattgactgaaaaacaaacgagcgaaatattcagtcgctttaagattttcgagagcagtaacctgaagcacgccggaagtaccggagtgggtctgaacctaaccaaaagcctgactgaattattaggtggagaaatcactatagaaagtactttgggagaatatgtagaattcaatgtatccctgccgcctatgtacgtgaattccgaaaaagaaagtcaggctacagaagaagagacagaggtcagtgaaatgcttttcattcctaagcagaaagaaattaccatactgattgtagaagacgaaaagaatatccgggaactgttgaaagatattctgcttccctactatcaggttcgcgaagctgccgatggagaagaggcgctgaaagaagtagaacaaaagcaaccggacatcattatcagtgatgtgttaatgcccaaactagatggcattacactgacagatatattgaagtctgatgaacggacagctcatattccggttattcatatttctgccaaaaactctattgaagaccagatcaatgcctataatcacggaacagatttgtatatccctaaacctttccatccaagacatgtgttgagtgcggtagagaatatgattaataaatactctctgatgaaagagtatttcaaatccggccgttcctctcttattgtaagggatgggatcaccatgcacaaagaggatgaattattactgaacaagattatcaagttcattgaagataatatcgatgatgaatccatgaatccggaatattatcagattcttacgaggtagctcaaatgagatatgcgactaatgggacaatatctgctgtaatgtgatgttcgagaggtccggtcaaggcaaaagtcggagtagattcttcaccagcatcgtcactttcccaaggaaacatggcaccccggtaaccatgagtgatagcacgtttgcaagcagctgcaagacggttggtacggtagttcaccatagattcggcaatgccttgattgagcaataatataggaggatacatccaaagttccgtatcccaaaagatatgcccgttgtccccctgtgaagacagccccatgggagaaatgctcaatccggtaccctctcttccgaaagaatagaggttgaacagggcgaaacgcactgcacgttgagcatcatcatcaccctcaatacgaatatcaccttgccaaagttcattccatagttggcaatggaaagtcatcagacggtcggcaccctcgtggatagcgtaagtgatttgacgttcagactcattgtaaggatctacgaagtcacgcttggaacagatgacacctgccaatgcaaaagaataggtttctccttttttcagagatacggtaaaagattattgaatgggaaaaggctctttccaagggagaagaccaatgccgccattagccataggagctcctacgtaatcagcatgaatatctgaagtatggagttgccacaagtctttctcggaagtaacggcacgcatggccgtaaaagagcttatcaataccagaatcagtaaatttagttttctcatgtttttctatgttgatttaccacattaaatacggggtaaagataagaataactatttgaaaataatcataatctgctcatcaatacccttatcgggtatgcgcacactacatacacaggtttctttatcccaactccacgccacagattccgtatcattctctaaattatcttccaagcgttccgtcttagctttctttattttctttcctttgacagtaacctctttcggaactttcgcagaataaatacgaaacaacagatttctcggaccggggacagtgtaacctttcccttcacgggcagagacaatcaattcatatccattcgccaaagtattacaaacaatcggtgttttgacaaattcatcgcgctggtaccctaagttttctccttcatcttcataaagagtaaaagcagcctgtgcaccctcctgtgcagggaaaacttcaaaagttagtggatataccggtttctcatgggtgtagttcatcaccggcatggtgggaatgatagaaccttgcttcacaaacacaggaacgaaggacaagggagcgtcaaccgtagtccattgctctccggtgtaaaccgtcttcttgttattatagtcaatccatgtaccttcgggcaaatagacatttttggtacgagcgcctttcttcaccacaggggctaccagtaattcacggccaaacatgaattgggcatccgtagaaaaagtttccatatccattggatattccagaaacagaggccgcatgataggcaatcctgtatcataagcttcgcgggcataagtatagatatagggcaacaaacgatatttcaactcgatagctgcctttgcgttcttttccgcttccggtccgaaaagccacggttccaccggattatctccctcatggtggatacgactcaaaggattgaatgcaccgaattgaatccaacgggtatagagttccgccatagccggataatcttcaatgtctccacagtaaccggtaatgtcacaggaagaaaacggtatcagtcctaaaccggcggaaagcattacaggaatctgattggctaactgtccccagccttgcaacacatcatctccgttcccgctatcacctgtccaaccgaacgtataacgttgcaatccggcataagcagcacgggtcatttggaacacacgacggtccggattcctcttttcaaattgttctttcaccactttatcccaagtcaatccatagacattatggatttcatcgtgcatacccagatagtgtttcatgacgagacgttccgtttgctcttcgttactccaggcaggttcgcccatgtccgtccagaagccggagataccgtcgtcaatcggtttctgctgataggttccccaccaatcggctacggcaggcaaggtgaaatccaccactccacagttaccaccccaaggccagggcatatcgtagcttttaccgttcgtactgtcctttacaaaataacccaaacgatcagcttcttcccattgctttttattagcttgtgcaattaccggatcttgagatactactaccttaaaacccatccctttcaaatccgaaagcatcttctttggactctcatagtttcctttgcgccattcgaaatcctgcagatattccgtccagccgatatcctgatagataatatcacaagggattccacgtttccggtagccctcggctatttcgcgacttagcttttcgcttgtcagcagaccgcggcattgagcaaaacccagcgcccatttcggtggcatgataggtttgcccgtcagtccgacgtattggccgataatttccttatagtccttgccgaaaataaaatagtagatcatttcaccgttcggagcttcaaagctgtaatagtcgcgactttccgtaccgaacttgaattccgttttgtacgtattatcaagaaaaataccataccgataactgctcataaagaaaggaatactcttgtagagcggatcttccactatactgtaacagggtttgtcactattccacatcttataagattcgccacgacggtccatctttcctgtcttttctcccagtccgaaaaaatgctcgtcacgacggagcactttatattccgtcttctttgttccttcactcacatgccccttgtcggcataatcactaaacaggagtttctgatacttatcaaatatctgaagactcaacggagatttatttacccgaatacgcaatttcggagtaaagatctcataacaggccgcctgttcgtccacatggacggtccctacatcttccaactcttcattaatcactgcaaaagaggcattcttccgttgcagctgtccatcgggcgaaaaccaaactttgactaccgaaggactacagagctgtagctgcaacgcagcactgtccgtcaggtgaaaagtcacctgacgcccttgttgtgtaaaagaagtgcatacctttgcgttatctgtggcacaaagcacagagataggtaacaaacaagctatcatccatcctattattctattcatattcgcactatcctcttatttattccatatctatcagcctcattcatactctactaccaacattgtccaatatttcaatgacggaagtgctacctttatctcatttccttcctgaacgaaatcaagctcttgagagactccgaaacgtgcatccggagaggctgcccaaactgttcttaccgtcccctttacgcttacctttgtttggaccgattcaatcaaagagggttcaacctgcgtcccattagagtcacaccaatccaaatgtacagcattggtataattaaggaaatgaatcacgtccctacgatcaaagcgtttcccgatagtggcaatctgattacggacagggggccattgattgacggtcatcttcccatctgtagaagaagctgtaactccataaaactctccaccatcacgtaagagattctcatacccggtgataaaatcataataagtcaccattgctttcttcaattcccctttcattgccaagctgctgttagggaaatactcggtagtcaacatatgttctcctaattccagatgcgcaccaccccatgcatggatagcggcatttgccattaatacaccaggggtattgaaatagccacgcccttcaccgccaagcttataattcatataagcagccaatacagttttctttccgttcgaccatcgatcgttgtttgtgataatatttgaaaggacgctaaagccgttatcggtcggtttttcccacacttcagtataaaggaaatctaccggagagttcgcaatcaagttttcttgaccatattgtcccacagcattcatcaccaacgactttttcggttgagcttctttcatcgcctttataaacaccgggaaagtagctgcgagatcaacagagtttccattataatcatataattctccccgaccacctaactggtcaatctgatagccgtcaaaatcaaaaacttcatatacgtcgttattctgctgagccatatagtctctccattcctgcaatgccggattcgtcagatagatgttacttttgaaaggagaacctagcggatgataatccttgtttccgtgcttcttgtccttaaacaggtaccaagtttctttcacgccatcatcggccgcatcgctcaaagctccataagcaagattgtagaaaagagatttcataccccgtttatgaccagcgtcaatgtacccctgcacagtagaacgataacaatcgcgattgataatatctttccacacatccatcggagcagaaggcgaacctgctaatggcttatggtgtttgtaatgccagtcctgatactgcacatagttgatatgatggcggttcaggttatccattaccttgttaatctccttttcgctcattttgccatattcggagagaaatccgttgcgcggaaagcgtgcagggtcggaagacacatcaatggcaatgctgctcagaacaacctcttcgccattctctactgtatataagtcgaccatataacctttaaagtcatctgtcggcggattccaactccatgactttccggtgaggggagtttcggaaagcaccttgttgaggtgcttatagcgaatggtcacctgcccttcgggaagattgttcaaagaaagttgtaccggttctcccggctgataggcggctttatcggtagacagcagtacggtgatatagccgtctccgtaagtaataggattgttcgaaggctcgtcgtcgatacaaccggccaatgaaaaagccaggatacaagccattatatatttcgtcagtttcataattcaatctgtattaatcgttatttcttttgaaaatgaatctcctttttataggtattgatagtaaccttaaaggttccggcattattcatataccatttattgtcgcccttatcagaagagagataacatgagcctgtaaactcatcatacactcctttattatcttcttccgcaacaaagaataaaccatcgtaatcaccgaattggagaggaaactttatctgtccggttcccaattctccttcatatacaaattcattcttgttagagttgctttgcgtaagttctttcacattcttccaggcaaaatctccggatactgcttctcccattgcccaaaccttctcgtaaactacaatttgttccactgtcaagtcctggctaccgacattgaatgtcacaacatatttacttttatacgtctgcttctcttctgtcaccacttcagtcccttctttgtcttttgaaattcggaaagtaccgtcctgcaattctccattataagtgaaaagctctgggttcgaatcatcttttgtcatggctatcggcgtctctcctgccgcagttccaatcatccaaaattcactgttatccggttcttcaccatccaaattggtgatttcaatatccaatgtattcagatttactttcacccgatagctggcaccacgcttgatattgaatttattatccggcccgtcattctcatcctgacgataaatcagtttattctcatcacttccgtccctgccaaacgaaggatagaaatcgctctgctgagtcacaaatttaagttcacccgttctaagctcaccttcccaaacaaatccgttaggttcatcagctatcggagtcatcttcgttgcatcgtccaatgaccaaccgcccgtagtagccgaaccaatcatccaaagattaggataaaccatctctccgcccaaatccgtaatctcaatatccaatgtgcttagattcagttttatccgatagttacccggagtgcttatcataaacttctcatccggttcgtcatcactttccctatatacaagtttattctcatcttcaccatccttattaaaagaaggaacaaaagaagttttctgtaagacgaatttcagttctcctgaaagaagcacgccttcccaaacaaatccgttcggttcatcctcaattgattccatcggagtagcattatccagactccatcctcctacagttgctccaccaatcatccacagattcagataacgttctatataaggtgtcagtttgaatgtaacgacaggagaaacctgagtaaactcttcatgccccaatacagcagcagtcacacgagcttcaaactccaatgtttcatccaaagaactattccacacttctgccaacaagtcattcatctctttatggttaaatgccagaatacgggaatccgttgcacctatatcctttttcagtcctcctgcgaaattgttacctttcaaatccatttcaagaacatagctgatacgggaatctgttccatagttactaccagcagtccaagcaaaatgaaaagcttccctatcactcatcaactggtccagttccactacttcggacgatacagacaataccaaagactcacttcctttatctgtctccatctcatcagaagtacacgaattaaatacaaagcccgccaataaagccgtcagagcaatatatatctttgttttcataatctttcttttttactattaatatcccggattctgtttcaaattgccattcgcctcaatctctttcaacggtataggcattaacaaatgtttttccgccgcattggtttttccgatagagtgaaggaatttcagagcatagttgtctttcaggcgaaccaaatcaaaccaacggtctccttcaaacgccaactctatacgacgttcctgaataattttctccctcatctgatcctgtgtcaatccttcgatatccgcccggttagtcagtcctgcccgttttctaacctcgtacaaaggggcttccgcatcagttgtcaaagcttgttcattcaacgcttccgctttcatcagtagcacatccgcataacggagtaccacaaagttggccggactggtattgtaatccatagagatggatttcgggaccagaaacttacgcaaattgtatcccgttgtagaataagaagactgatattgctttccgtcaaagtcaggacatcccaaataaagaatagtcttatctttacgattatccccttcttcgtactggctgacaaactcggcagtcggctggttccatccgtagccgcccgccaccatatccgaattacgagggcctgtaaacgcactcaaccaagaagattggttttcattactccagaaatcataattggtcttaccataatactgtacctcaaacaatgattcaggtccatttttcttattcggattaaagttatcactataatcatcattcaaacgataacccaatttctgtatttcctcacaaagacgtacaatctccgcatactcctttctttgggtcagatacactttggctagcaaccccatcgctgctcctttggaagcacgtcccaaatcggaagcggaataagaagatttatccggaagcaagttgatcgcttctttcaaatcatcttctatcaacttatagatttcttctttcgaagcacggaaaggtttcaaatcatcttccgaagtctgcggttctgtcagtaaaggtactcctccaaaaagacgaaccagaataaaataataatgggcacgcaagaatttagcttctcccaaacaacggtttttcaaactttgatcaatattcatacccggaacgttcttgataacgaagttgcaacggagaatacccggagacggaccgcgccatacatcaagcacaccggcattatcggtggtggttatgaagttagccatatcggtagtctctatgccatccgtacctccacctgcaccgacaatactgttaccggctacgatatccagtgtccacatacgcatattatataatttgggccattgaagcggttgataagcaccatttacggcagctatcgcatcttccgctgcctgaaaactcttggaagtatcgatagagtcccacggttctttatcaaggaaaccattacagctgctcaatgtcaagcccaacaggaagcaaggaagtatatatctgaactttttcatatttgtcaatcaattaaaggttctatataaaagtagttagaaagaaacagatgcgccgaacgtgatgttacgggctatgggatacacgttattgtcatttcccgatccggaaatttccggatcaagccccgtataacgggttaatgtcagtagattctgccccgaaacgaagaagcgcacagaagacatcgccgccttcttgctccatgcggccggtaaggtgtagcccaatgtcacattcttcagacgcaagtatttaccgtcttctataaaacgatttgaaacacgcccgttcttattcgggtcaccgaatacagcacgtggcatactgttgcttgttccttcgccacgccaacgatcgagaacggtcgtcatctggttctgtgctacggacatggcttccaaagaggcccggtttgcgttgtatatcttgtttcccgccgccccttgcaggaagatttccagatcgaaacctttccaggcaaatgaattgttcattgaaaaaatccatgtcggagtgggactgccgagataagtacggtctttatcattgatgattccgtcgttattcaagtccttaaacttaatatcaccggcagaagtacggttgtaagggtcattgccttgcgtctgaatggcgtagcggtctacttcctcctgtgtctggaaaataccgttcgtcacataaccgtaaaaagaactgaccggatgaccgactgcatgaatattattatcgaaatacatcgggacatccccattcaagcggataatttcattcttgttgtaagaagcattgagagacgtattccatgaaaattcacccaccagattacgggaactgacagaaacctcaaatcccttattccgcatcttacccgcattgatcttaggaacattgatatccgaatacccggtagagataggcactaccatatctaccagcatatcgttcgtattcttgatataagcatccagactaagattgatccgaccgtcaatcattgtcaggtcggcaccgacattatattgctccacctcttcccagcgaacattcgggtttggcattaccgacggggcaatggcattcacttgcgtaccattgaagttatactgaatagtctggatggtggaagcatacgcataattacccacactcgcctgattaccggtcaatccatatcccgcacggagtttcacatcactcaaccagaaactctttttaaagaaaggttcctcagaaagcctccaggcaagagatacggacgggaaattagaccaccggttctttttgctgaaacgggaagaaccgtcacgccggatcgtagctgtcaacaggtatttattatcgtatgtataattgatacgccctaaataagagagcaatgcccagtcacttccatttccgttcacagtcggttcgagcgtaccattatccaattgctgcgcagtaggactgatgaatcccataatggaaccgcccaaatactcatacgtgttactctgtgcagaagaacctaccatcacagtcagttgatgtttctctgcaaacgtcttattaaaagtcagagtattgtcccacaataaagtaaggcttttgttatacttccgggaagcatacgattccggttgggaaatcggctgccagtcatacttgggcgaccagcctttatcatcccaaaagagtgcctgtactccaacaatagttttgaaagtcagccattcccacggttttacttcggcgtagatattacccaatatattgaaacctttagtagcagtagagttggtcatcatcttgccgataggattagcaatatctcctacatacatcggaagccctacaggacctgcccaagaaccatcatcattcttgatagcctgtgtaggcagtgccaacatggtatttttaatactatactcgcccttctttttaatatcatgattcagcgaaagtttgtttcccatctttaaccaattattcatctgcgtatccatattgaattgcaccgtatagcgctcatattgagtggtacgtacgataccttcctggttgaaataagccgcagatacataataagtcgttttatcattcccaccggaatagttcagtgaatagttctggatagcggcagtctgaaacaattcatctgtccagtttgttcctctgcccaatgaagtaggatcttcaaacagagggttctgcggttgaccgttagctgtcatcatttcattatggagggaagcaaattgagtagcatccagcaaatcaagtgtacggatagccttttcgataccgtaagaagccttaaagttaaagtgagcggcgtccgatttccctttcttcgtggtaataataatgaccccgtaagctcctcgcgaaccgtaaatagcagtagcggaagcgtctttcaacacgtctaccgtctccacatcatccatattaatcatattcaaaggaacatccgtcggcaccccgtcgatgacaagcaacggatcactattgttgatggaaccgataccacgtatcttcattgacacattatcgcccggcgcaccactggaaattacctgaagcccggttgcacgtccttgtaaagctgctcccaaactaggagagggttgtttcatcagatctttggaagaaacggaagagatagccccagtcaagtcactcttcttcatcgtaccataaccgatgacaacgacttcatcgagcacctcggtatcttctttcaaagtaatagtcagggacgttttgccattcaccggaactgtctgagtggcatatccgataaaagaaacggttagcatacttttaggggacactttcagggagaagttaccgtctatatcggtaatcgtaccgttcgtcgtactttcttctactacactggcaccgatcaccggctcacccgcagcatccactacatgtccttttatggaaatctgttgtgcgaatgcactaagagataggaacaagccccacattattaataagaggcggcgttcaaagcctttcgacttcatactctgtttcatgtacattaatttaaagttaatattagggttacttttgtttttattctctgtgtcattgctgaaatgactacgaaacaaaagtatctacattttatactgttccttaaagcagatagcaaaaatatagtgatttgcatagtaaac

SEQ ID NO: 11734 - DNA, 5356 bp, Unknown
  gut microbiota DNA sequence
caacttgaatattataaaaagtatcattgagaataataacaccttgttattacaacttataagtgatattttggacttatcaaaaatagaagccgggacattggactttaattattccaatgtagagattaacgatttaatgagtgatttagaaaacaactgccaactgaaactaaaatcggacaaggtaaaactggagttcatcgctcccgaacaaccttgttgcgcatatatagagaaaaacagactatcccaattgattatcaattttgtaacaaatgcaatcaaattcacaaccgaaggcagcatccgattcgggttctacattctggtttacattaccttataaagaagcgagtaacataatagaaaaagctccccaaaaagaaatccagaccattgagatagaaaaagacaaactgattatcctggtagccgaagataacgaaagcgattataaactgtttgagtctattttgaaatacgattaccgcttgatacacgcatgagatggacaagaggctgtaaacctattcaaggagtacaatccgcaaatattcggccaaagtacctatcatcgccattactgcctttgcttttgcctcagatgaatagagggtaatggaaagcggctttgacggttatatgcctaaacccatcaatgccaacttattgaaggtgcagctaaaagacatcatgcagaaacgcattatcttactgtaagtaaacttctaataattcagccacatcctgaaagaagccatcttatccttactgacaataattttatctttgaagggaggcaatacgtgtacgattgctttccctaaaaaataggattcaatacgttgaattgcatcaatacagacaagagtctgacgattcgtacgaaaaaaacggtcgggatccagttgctcgcacaatctatccaaagccaaatcaataagaaattcccggttcttatgtgtcaccgcaaaggtatacttattctccgaataaaaataagcaatgtcactaacctgcaaagtcagaagtttctctccactggaaatcagaaaccgcgtacgatactttttatgcgccgacgataaagcttcctgtgcaacagaaagctgctgcaaaacttccatcatccggctttccgaattgaaatcatgaatatttttcttagtcagtccctcaaaacgtcggatagcctgcaacagacgttcttcatgaattggttttagaagataatcaatgctgttgaccgtaaaagcgcgtacggcatattcatcataggcagtagtaaacacaatcatgctttccggatgggcttgttcaataaagagaaacgagttgccatccgtcaactgaatatccagaaaaagaatgtccggatggggatgctgagcaaaccactctaccgcttcctctatattgcccggaagtaactgtacgtcccaaccaggacgcagagacaataaagtgtcgcgaagcagacgggcggccggaatttcatcctctattatagcagctttaatcttattcatagagcaaaggtatttttacagtaaactcttgcgaatcattttctatcacaatatcacgaccgcacaacaatttataccggacagaaagattcttcaatcccgtaccgaaagctgttgcactttttttcgcctgtatccggtttctaacaaccagctctttttccttttccatatagataagttcaatcgtcatcggctttcccatgtggatgacattatgttttatcacattttcagcaagtagctgtatagtcagtggtggaagctggcattccagacaagactccggaatacgattatcaatataaatacaatcccccaaccgcacccgatgtagaaagacataagaattcaaaaagtccaactcctcccgtaaggttgtcagccgttggttttggcattggagcgtatagcggtatacgtcggaaagatgttgggtgaacaattccgcattagcgggattgtaacgaatttcagaaatcaatgtattcagactattaaacagaaaatgaggattcaactgattctgtaaggctgtgtaacgtgccgtattgttttctttttgtaaggcagccgcttcctgttgcagtttcaaggcattccgtatggaacggttggccaacagcaaacctaaaatgaccagttccaccagccataccgtaatcagaatccgccaccctccattgggaaacatgaacggatgggaagctccggccagcagtttagctgttaccagcaaaccgtaattcaacaggaagaacatccccatcacaacgacatagacagatatcaatttccagcgacgatgcagattcagtgcatactgattatccacccacgtactcaaccgcatcgtcgcatatcccaacacgttgaatgccagcacaaagaaagacaatgtaccgacagaatgaaaaatgtcggcaaccttatcgggaaaggcggcataattgatcagcaacagaaaagagaacacacccaatcctgaaaataatgcggtatagaataaggtattaaacttcacattcataatattggcagttcttttcatacaaagttactgttttttaccgataatcatagccatgaagagcttttattaattccgaataatgtccctgagcggcagctttggcctgcacatagtttacctgcgaggtttgccggtaagtctgcgcatcaattacttccaccacagacaccttaccctcattatagcgttccacagctttcgcttcattttcctctgcttttgccaatgaactttcactcaagcgaacacgctcgatagcttgtgacaaagctttccgtgctacacctatctccagctcaacctgatccatcaccttattcagattatcttccgccataccgacacgaaaggacgacgcacgcttctcacttttccgctttccccattcgaagatagggacggacactttagcataaacagcgtaattggggtctaaatcttttttgaaattataaccgggagaagaatagctaccatctattcccacataaaactgcggcttaaactgtgaatcattcagtttcttcgtactctccgctatacggatccggtcataggccatccggatttcaggacgttccgcacctgtagacaaccagacagaatcttcaataacgaccatcggtatctgatcatccagttccgtcgcattttccaatcggactccgatcattgagttcagtgccattctacctgtctcgaagttactttgcgcctgtagcaattgatactccgcttcattcagtttcacctccgccattaataaatcctgcggatctacaagccccacttccaccctttctttgatggtctttaccaaagctgctatcgaattacgaaaatcttcggcaacagatacaacctcctgtcgcgctacagcactccaatattgcatatccgtctgataacagactgcgtcattcagtacctccgcctgattgcttgccaatgattgttgatgtttcgccatacggatagactccaatacacgtccgcccgtataaatcggttgcaaaagagaaagagagcctccataattcaattgctttccttccaccgtcttcgacaatccgatagaaggggcatccaaagtcaactccaacgggttgcctgtatattgaaagttcgcagctcccgaaagtttgggtttcaaatccgcttttgccgatttctctatctccacactagcggcaatattcttctcagccgctttcaaatcatgattataatccaatgccatcatccggtatttctccaacaagggactttgttgcgccataagaggtaaagacagaaaagcgcaacagcagaataacggataaaatattctctttttcatttttattttccttttactttgtagaacatagcatataatgcaggggtgacaaacaaagtcagtcccgtagcaaatgtaagtccgaagataatagtggctgccataccgccgaatgcgacatcaaacaacagcggtaccataccaaaaatcgttgtcgtagccgccatcaataccggacgggttcgggaaaccgtagcctcaacaatagaagtatatagatcaataccactccgatgttgcacatttatttcgtcaatcagtacaatcacattctttataatcattccgagaagtcccagccagccggctatcggaaagaaaccgaagtcaaatcccgtcagcaacatccccacagcaataccaatgagcgacagcggcaagatgcagatgataataatcggttcacggaaattgccgaacaaagcaaccagaataagcaccagcgcaaggaatgccaacgggaaatatttagcaatggcctgcatcgcttctccctggtccttatattgcgcatcccagaagaaagtatatccctcagggagttgcattttctcaatctcttccctgatttctccgtgtacttccgacattgtatgtcccggcttcacgccacacatggcagccatcgaaagctgacggttgtaagtccgtatctgtggaaattcccaagtcgtttctatacgttccgtcacttgtgaaagcggagccgacctttcaccgttccagatagagaagtcgcctaaggaatgtacatcggtgatgttcacattacccgatttcagaagtacgggaactttcttctcatcatcccggtaaatgcctacaggcaagccgtcattaatagatttcacagactccatcatagccgctttcgtaatccccaaagctccggctttcaccggatcataaaccggacggataaccattgccatatttccccactcatttcgcgcatccgctactttaggattccgtcgcatcacctctatcgcctgacctaccagcgaatcgagtacggccgggtctggtccgagaaaacgagcttcaataaccgcttccgtcaatgggctcaattcaaaattattcactttaatcagaggttcgggatacttgatcgaaattgaatcttgtaagcgtgtgtgtaattggcgggaaagtttcgaagtcttgcacttcaccaatatctgcgcataattggattgaggtccgaaagccacattagacaagtaataacgcggaggtgtcctccctatataggtagataccatttccgcttcttcttgtccgcgaataaagtccgccatctctgtcgccattttatccgtttcttctatctgtgtcccttcgggtaaccacatatcaagcgtgaaatattgtttatccaatgccggcacaaatactttcgggataaatttaaaactccaggcggacaacaccaacaatataaccata

SEQ ID NO: 11735 - DNA, 18312 bp, Unknown
  gut microbiota DNA sequence
tatttaattagttaacgacattttctactcaaaagtaaaccgctactcctttacattcgtaaagtcctttggcaacactccgaactgcttctggaaacattttgcaaagtaggacggtgaattaaatcctaccatatagcagatttcattgaccctgttttcaccctctttcagcagttgggcagcctttttcagacgctccagacgaaggaactcattcggactgagatccagcactcctttaattttccgatagaagttagaacggctcatattcaggttatccgccatgtcatccatactaaactccggattggcatagttcaccctgataacctcgttcagtttcttgataaactcttcatcggctttcgtcaatgccattgtattagcggctataaaaggagattccgcaaaagcctggcgcagcttctccctgttctgaataagattggaagcgcacgcctgcaaatattccacagagaagggtttttcaatataggcatccgcgcccagttccattccctctatcttcgattgtatattagtcttcgcggtcagcagtatgataggaatatggctgtaattcaaatccgacttaatcgtcttgcacagttcgaagccatccattacaggcatcacgacatcacttatcatcagattcacataattgccgtccagtacacgcaatgcttccgcgccattggtagctgtcagcaccgtgtaatctttcgacagttggcgaaccacaaaggcaagcatatccggattatcttccgctaccaacacagtcgggcggttatccttctctactgcttgttccgcaggagcttcgtttatcttgtcagttcccgcttccacttccgttgtcaaggtgattgtcgtatcctgtactatcggcaaagtcatacagaaagtattattctcctccccttttcccatagtcaaagtcccctgatgcagttcggcaagcgagcgggagagagccaacccgatgccggttccggtagtcacttttccatcctcctgctcgttgaaacgaacaaaaggcttgaatatctcctctttcattgcatcaggaatgattactccgtcgttcaccgtgcagatacggaatgaattgcctccgtccgtatccggcactgccagcgatatatgcacgtaactttccgcatatttcaccccattgttcagcaaattgctgatgattttcgtaaatgcttcctgattgatatgagcataaaaatccttttccggcatctgcaaaacaaaatccaaccctttctgcttggcaagggaagtaaagcgtttatgagtttctttcaagatttcggtaacattacattcagtaaagttcagtcggaatccctgtctctccgtcttgcggaaatcaagcaactgattggtcaggttcaataaccgctccgtattctgcttcatgacgttcaagtcctcacgggtttccgtatccacttgcttctttagtatgatattttccaacggacctttaatcaatgtcaacggagtacgtatctcatgggccacattcgtaaaaaagtcaatcttcgcattatatacttcgcgttccttttcctgttcgaatttctccatctgccgacgatgcttcctgttgctgcgtctcttgaaatacataaccgtatacagagaacaacctataatcagcaaagcatacacgatataagcccagacggaaagatagaaaggcggaagaatatgtactttcagggatattccctcttcattccataccccgtcgctattagagactttcacccggaaagtgtaattgccataccgcaggttggagtaagtgacgatagggctctcgcctactgtcagccagtctgcatcaaaaccgtccagcttatacattatcctgctcattctcggagcctggaagtccagtgccgccacacggaaagagaaagagttctgattggattgaagtacaagttcgtcggaaaaggtgatgctcttctccaacggagaacccggttcgcctacatacacttccttgccaaagagcagaaaatcagtaatcacgatagacggaagcgacttgttctctgaaaagttcttgggattgaaagccacaaagccgtcgatacttcccagatagatcgtaccgtcttccgtttcaaaacttgaacgataattgaactggtcgcccagcaaaccgttggaagtggtatatactttcatagctccggtggtaggctggaaacataccaaaccattattggttgtcagccagaaaagcccttctttatcttccacaatctgataaacgacgtcgtttggcaatccgtccgccagattataactggtgaaggtttccgtctccggatggaacaaacagaagccgccaccctgcgtcgtgagccagacctgccggtgggaatcctcgaagacactcactaccttgtcgtaaggaaggcttttcggattgctttcatcatgcaggtaattcttccatttcttctcactcacattataacagtaagcaccgtttgcataagttgccagccaaaggtttccgctggagtcttctttgatgtcatatacaaaccggccgttcagttccggaatccggtcaaaatcgtcggactgctcattataacgcagcaagccgaataatgtgcccaaataaatatctcccgtcgttgtccggcaaatggagaaaacactattatctatcaacgaacgcggcgaatctgttttccggtatgttttcacaatagctcccgtgtgtgtgtccaccactttcacccctttcgagaaagtgcctacccaaagatggtcgccaatcaggcacaatccgtgcacgttcgtaaaggcattgcttggcgtgaagaaagagaaagtcttagtcttcgggttaaagcggttcaggccaccgtcttccgtgccaatccacaggactccctgattatcctggcagaattcacgtacccgctttccctgcagcccgttttctgtccctttcggataatacttctcaaaattcgtatagaaacggggataatagtttacaccaccgaaataagaaccaatccagataccaccttcacgatccttgcacagcgaataaatagcattatcggacaaggagtaagggtcattgatcgaactgcgcaagtgaacaaatttccccagccggagattataaatataaagtcctgactctgcgccaatccacagctcattgtcggaagccatcagcagttcacgacaaaatacagattccccgttctcatctgccaagagcaaatcatgcaatttgtttgaggtcaggttcagttccttcactccacctttcaaagagccgacatacagacagttgtatgcccctttcgcaagacttatcactacatcgttcgcataggtttctttattatctatcggagagcgataaggatggagcgttttcaagcggtctttcgaatagaaaagaccgtcaccgtaacagcctatccaaagggttccgctattatcaaagacgaaagtctgcacattagtggtaagaaaagagaaattctctaacgtatagttccgaagtttctctttttccagttcatagcagaagagaccttgagattctaccgccacccagacacaaccttgattgtcgccggagattgcagtcacggtatgttctattttcgtgttttccgcactcagttccgtgaaatgctcaaagaagtccttttccggataataaatataaagccccacatccgtgcctacccagatatttcctttctcgtcttcataaagcgctgtgatgaaattgttgccgatacttcgttggctacggtcatcgtgcttgaatttacggaacgacaagccgtcataccgattcaatccatccttcgtaccgaaccacataaacccttgcttatcctgcagaatcgtattgactgtattttgggataacccgttctgcacgctcaggtttttgaaataatggcattcgtccgccacttgtgcatgacagcttatctggtagcaaataaaacagaataaaagtgtcagtgcttttttcataacatacgtgttttctatcttcccgtttgagttaccaaatgtaggcaaaataacaacgggaagatgataaatacgtcccaatgaatgaaaaaatagtcttatttctctattctgatacgtgcgtcaactgccacaaccgccttttctgtagccaaaagcgggtttatatccatttctttaatctctgtcgcaaagcggagcaaggtagaaagacggactataatttcagcaaatttatcttcattcacccccttttgtccacgtgtcccctgtatgattttataagccctcagcgaatgaatcatcgaataagcctcttcataagaaagtggggccaaacctgaagagacatccttcagcacttccacaaaaatacctcccagaccacaaaggaccacatgcccgaacttctcctcatatttcgctccaatgaaaagttccgtacctttcagcattggctgtaccatgattgctttcgcatcagctatttgcatcatacggtcaaactccagagacaaatgttgctcactcttgatattcaacacgaccccgccaacatccgatttatgcacaggtccaacgacttttgccaccaccggaaatccgcaacgacgggcaaaagccaccacttcttccttattatccgacacaaattcatctacaagcggaataccggctgcatgaagcaaagcctgtacatgatgaggcgcgatatatccgtcatccggaatagaatcaatgatccgccgaattctcggaacatccactccgaacagttctatttcaggaactgctggtttaggagcattcacaatgcgggaaagagcagtccctaatgtgacctcatccgaaaagttcacgtgacctttagcaaggaacgctgccacttccgctccagctgtattgatggaaggaagtatcgggaaaatcggcttactgcaaacctgcattttctcatgaagcacatcgtacatctcgaacatagtgactagtcccggagttccaaaaatggccatcacagcatctatattcttaaatttctcttcacaatagtcaatacaaagacgcagatgttccggagttcccgtagcaagaatatcaatcggattaccgacagcagctcccggaaagagttgcgctttcagttcttctgccaggttaccttctaacttcggcacattcagcccccccttgctcaacgcatccgtcagcattactccgggacctccggcatgagtgataatcgcaaaattctttcccttcagttcgggcaaggtaaacacacaaccgacagtagtcagctcctcacgtgagaaacaacgtacaattcccgctttacgaaacaaagcctcaacagcagaatccgagctggcaatagctcccgtatgcgaagaagccgcacggcttccactttccgagcttcccgccttaatcgctgcaatcttacacccttttcttatcaatgaagaagcatggaataataatcggtccggattttggatactttcaatatagagcaatttgattcgtgaatctttttcagaatcgaagttctcatccataaactgtaatacatcctccaccccaatctgtttggcgttccctaccgaccatacagagttgaactgcaatcccttagtcaccgcgctttccaaaatgaatacggctgtagcacccgaactggagataagatccactcctttcggacttaaatttggaattggttgactgaacacactatggtgccaagtattcatcaatccgatgcagttaggtcctatcaacgacgcgccatatttgtttacagtttccagaatacgttcttccaacaatgccccctcatgagtctcctcaccaaagccggcagaaagtatgataaaagcccgggtatgcttccgaccagccaatgtttctacgatgccaggacacattgaagcaggaaccgccaataccgcaaggtccgtatcaggcacgtcctgcacatccgcaaaggcaggaactccctgcacttctttctcttttgggttcacagcccgaagttctccctgataacccccgtttatcaggttctttaatattgcgccacccggcttatgtacattatttgaagcccctactacaacaatgctctcagggcgcagcaactgggttgttatcatatcatactctaattttcgtttaacttgaatacaaatatattctttcttacgagaaaaaagaaagaaaagtcactatctttgcacattacaaagctgaaaacaataaaatcacacgatacaatggaaaagaaattcaaaagaaccaccgtcacatcggcattgccctatgcgaacggacctgtccacatcggtcatctggccggtgtatacgtacccgcagatatttatgtacgctatctgcgcctgaaaaaagaagatgtattattcatcggcggttcggacgaacacggagtgcctatcacgatccgtgccaagaaggaaggaatcaccccgcaggatgtagtagaccgttaccattccttaattaaaaagtcatttgaggaattcggaatctcattcgatgtgtatagccgcaccagttcaccgacccatcaccaactagcttcggacttcttcaaaacattgtacgacaaaggagaatttatcgaaaaaacgtctgagcaatactacgataaagaagctaaaacattcctcgccgaccgttatatcaccggagaatgtcctcactgccactcggaaggagcatacggtgaccaatgtgagaaatgcggtacttcactctctccgacagatctcattaatccgaaaagcgccatcagcgggagcaagccggtaatgaaagaaaccaagcattggtatcttcccctcgacaaacatgaggcatggctgcgcaaatggattctggaagatcataaagaatggcgtcccaacgtatacggtcaatgcaaaagctggctcgacatgggcttgcagccacgtgccgtaagccgcgacctcgattggggaatccccgttcccgtagaaggagcagaaggaaaagttttgtacgtatggtttgacgcgcctatcggatacatttccaataccaaagaactgcttcccgatagttgggaaacatggtggaaagatcctgaaacccgtttgattcacttcatcggcaaggacaacatcgtattccattgcatcgtattccctgcaatgctgaaagctgaaggcagttacattctgccggacaacgtgccgagcaacgaattcctaaacctggaaggagataaaatttccacttcccgcaattgggctgtatggctgcacgaatatctagccgattttcccggaaagcaagacgtactccgctatgtactgaccgccaatgcaccggaaacaaaagacaatgacttcacctggaaagacttccaggcacgcaacaataacgaactggtcgctgtatatggcaactttgtgaatcgtgctatggtacttacccaaaagtactttgacggaaaagtacctgcacagggcgaattgactgactatgacaaggaaactctgaaagaattcgcagacgtaaaagcagaagtagaaaaactgctcgacattttcaaattccgcgatgcacagaaagaagccatgaatctggcacgtatcggtaacaaatatctggccgacacagaaccgtggaaattggccaaaacagatatggagcgtgtaggcactatcttaaacatttccctacagctggttgccaacctcgccatcgcttttgatccgttcctgccgttcagttcggagaaactccgtaagatgctgaatatggacacattcgaatgggctgaactaggaaaagacaatctgctgcccgtaggccatcagttgaataagccggaactgctgtttgaaaagatcgaagacgctactatcgaagcacaagtacagaagttgcttgatactaaaaaagcaaacgaagaagcaaactacaaagccaatccgattcgtccgaacatcgaattcgatgatttcacgaaattggatatccgtgtaggtactatcctcgaatgccagaaagtaccaaaggcagataagttgttgcaattcaaaatcgatgacggactggaaacacgtactatcgtatcgggcattgccaaacactatcaaccggaagaactggcaggcaaacaggtttgcttcatcgccaatcttgccccgcgcaaactgaaaggtatcgtcagcgaaggaatgattctgagcgccgaaaataatgatggcagtttggctgttattatgccgggacgggaggtaaagccgggcagcgaagtaaaataaaaaaatgggtgaagagcaatcactgagacaaaagacagccaaaggattattttggggaggactcagcaacagcttacagcagttgctggggcttcttttcggaattgttttggctcgtttgttgtcacgctccgattatggcatgatcggtatgctgaccatcttttcaacgatagccaacatcctacaggaaagcggtttcatctccgctttggtcaaccgtaaaaatgcttcggacaaagattacaatgccgtattctggtttagtgtttcttgtagcgccatcttatatatattgctctacctgtcggctccactgattgccgagttttaccgtacgccggaattagtccccctttcccgactgactttcctaagtttttttatcgctagtttagggatcgctccacgcgccatccttttccgcaacctcaaagtgaaagaaaatacgattatttccctttcctcacttacattatccggtattacagcaatagtccttgccgtaaatggatttgcctattggggcatagccatacaatcacttgtatacgtagcagttgtcgttatactcaattggtacttcgccaaatggatgcctagcttccatttcgacttttctcctataaaagagatgttcggttttagtagtaaaatgttaattaccaacatattcatgactatcaacaacaatctgttctccgtactattagggaaattctataccaagcaggcagtaggagatttcagccaagcaaacaaatggaataacatgggacattccttaatcacaggaatgattaacggagtagcccagcccgtattagcaagcataacggaagacacccagcgtcaggtagccgtattccgtaaaatgctgcgcttcaccgcatttatctctttccctgccatgttcggcctcagcattgtatccaaagagttcatcgtgattaccattactgataaatggctcgtttccgcccaaatgatgcagttgctctgtatctggggtgcgtttatccctattaataacctgttctcaaacctgttggtcagccggggacgttcttccgtgtttatgttctgcaatatcacactcagcattttgcaacttatcacagcatgtctcagctatccttatggtatcacaatgatgatttatctgttcattaccatcaatatcttatggctttttgtctggtatttcttcgtcaaaagagaaatacctttgactctatcctgtgtactcaaggatatcgctccttatttcttattagcagccacattgactgcctccgcttattatatcactctcggaatccggaatctatatttatccttactaataaaaatagtgctggtagtatttttgtacgctctgattttatggaaattacaatccgtgatattccgtgagtgcattgaatttataagaaagaaaatctaaacacgaagtatttgcaggggaatatctcctaattgggcagccagttccgaaaaagaactgcctgaagatccataaatcttttgagtgcgtgacagtgtatacatatcggctacagcatccttaattccggaaatcgagccacgatcagaaaccgtctcagccgtatgcaccctgctaccataacgattgcgtaactgctgtttcacctcttccgaatcagttgccagatagatacacaaatcatcatacatatcactttctttgtccaactgtgtaaaaaacaaatccaatggactttgacggatggctaccgtatgatctgcacgacgaatatgtacacctaccgtatgcttggaaaagtgacaaaaacggagttcgacttcctcacaaacggaagcgacagggtgaaacaaagaacgaagtaaatttgtactgtaattcacaaactggtcacaagtagcaatgtacaaccgtccactttgagatgcccactcttccagctccgactccttataacaaagagcacgtacgtccctttcatacagacaatcctcaaacaacaatttctgaaaaagtttcggaagataaaaattacgcctgcgaggacggtcatacataagcaaatgtttgcaagatgtctccgaaaaggatatattcatcaactccggttcctcaaacactttgaaaaagggagcattcagtccccaatcacggaaccatagtacctccaactttctccttactctatatgtcaaggtaacggcagaagctacagcgcgcatacgattagctaatcctcccaccggcactaatataatcttttccataatcatatattcatttccaacacaaaagtaaacaagtttattattctttggctatttttgcagacagtatttacacaaattcaaaaatatgaatattaatccgaactcaccggtttccatttcagtcgttatgtgtacctataacggagataaatatcttgaacagcaaatagattctatattgtgccagacctatcccatccatgaattgatcatacaagacgattgttctaccgatcgtacagtaacaattattgaagcatatcaaaaacgagacccacgtgtcaaactctatattaacgaggcaccactaggattcaattacaatttttcatccgccttcgccaaagctgaaggtgaatatatcgcctcttccgaccaagatgatatctggcgaccggataagatagagattctgatgaaccacgcaacaaatcattctctactttttcataactcttacctattcaccacggatattcaacagaccatgggaaaaaaaacaaatctaatgtactttacaacgaactttatctattaatgaaaccatatgtcccgggacacgaatgtttcttccaccgcaatatcctacccattttccagcaagctgtgaaacaagagaataacatctcctatgactccttgctaatgttggctgccgttgtctccggaccaatagagttcattgacgaaggactggtctattggcgtagacatcctcaagccacttcctaccatacggaacaaaaatacaatgcatgggaaggactacaaactgctctgaaaagcctaagcaaccactcacagcgcaatgttacaaaaagatattttcaagctgtcagcaactatccattcaggcagaaatataccatccgaacaattcggtatatgaagacaggcagtattattggaattctgaaagcctgttgcgtctgttgcattcagcataaacaactttatccccatacacgttttttgcaatcatgcatcaagtcttttttcactcccttgtattttatccgagattgtagtaaatttgccatccattaatgacttaggaatatgataacatttactgtatttccgcgtttaaggcaaaaccctaacgaaaaaaacaatccctatatagagaatttcatcgcttccttgaaccgtgaaggagaaagtactgttatcaatcctccacaccgaaacccgcttcttagcatattgcctcccaaacgatggggagacgtgattatcttcaattggtttgaaagtattcctgatttcaaatacggacttttacaaactgtcacggcaatctgtttcgtaacagtactcaaattggcaaagaagaaaatcgtatgggtactgcacaacaaaaaaccacacaatgacgggtatacaggcatgaaaaaattcctcatgcgtttcatcgtccggaaagcggatttaatacttacacacgctaccgaagggctggaaatcatccggcagagatatccgcaagccagcggaaaagttcattttctgcaccatcctaccatcaatcgacttccccgacagttacctgccgagaataatattctttatgatttgctgatatggggtactatctcacgctataaaggtatacatgaatatctttcatacctacgtaaccatccggagcaacaccccaatgtctgcattatcggacgatgtgcctccgcctctttgttgaaagaattgcaggacaaagcacctgattatgtcaaaatcatccctgaaagtccatcgtttgaaaagctaagtaattacgtagcctgctcccgttttgtactcattccttactgtcccgattctgtattaagttcgggagtattaatggattccctttctttcggggcaaaggtaataggaccagccaccggatcattcatcgattacagccacaacagtctattaaacgtccacacatttaaaagtctggatgatattgccgtcatcctctcagactataaaaaagaaaaagcctcactagttggatataggcaatttctcgatgaaaacgcttggcagtacttcggcagcaaaattattgaactagtaacaaaaaccaaataacataatgacaaaatacgctcccatattgctgttcgtgtacaatcgtccggaacatttaaaacaaacgatggagacacttcaaaacaacacactcgctgccgaaagtaagctctacatctattccgatgcagcccgcaaggacacagacgaggcagctgtagctgaagtccgcaactatatccataagataacaggatttaagagcattaccctcatcgaacgggaaaagaactggggacttgcgcgtaatatcattgacggagttaccacacaagtcaaccgcttcgggcgggttatcgtaatggaagacgacttgattacagcaccttacttcctacaatttatgaacgatgcacttgagacttacaaagacgagccacgcgtcggtcacatacaagcttgtgatttcaccaacgacccttccctacccgatacatttcttatcaagtttaccggaagttgggggtgggctacttgggacagagcatggaaatatttcaatcccgacgggaaagagctgctccgccaattggaagaacgtaacctcacacggagatttgacctcaacgggaattatcctttcacgcgaatgctgaggcgccaaatcgagggaaaaaacaattcatgggccatccgctggaatgccagcctgtttttagcagatatcctctcgttaaacaccggacgttcacttattcagaacatcggtttcgatggaagcggcaccaactgcggtggtggaggtttatacagttccaccttatggatgaaaccgctcccaatagaaaaatggtcgccaatagaagaaaatgaaaaagctagagaagcattcgcacgctattaccaccgcacaaattgctttatggccaaagcgattcgacgaattaaacgtaccttgaaaggagacttcggcgcatgaaaatatactattatcacacacgccccatacaagaagcattggacgaatggaagaaccatttacaccccggacatatattatatgggctcactcatttcagtaaacacggtattcacccgatactccaccattaccgtcatttcgcatcccgtatacggttctcactctacaatttctttgaaatcatacgttgcaaagaaccgtatgaccttttgtatggtacctccttttacggactagagcttattatcttcttacgtgcgttcggattgtaccgcaaacccattgctatctggcaccatcaagccgtagtccgaaactccaacaaactgaagaatttgatttcccgcttttattatagaggtatcgatcaaatgttctttttcagtcagacgttaattgaggactctttaaaatcaggcaaagtcaacgccggtcagttgcaccttatacattggggagccgaccttgatttctatgactatctgagacagcaccttccaaccgcaaacgaagaagaaccagaaaagacgtttatcactactgggaaagagaatcgtgacttcaccaccttgctaaaagcatttgccgaaacagggcttccccttgatgtgtttaccacacctgccgccggagacaagaactatgagcttttactaaaaaaatatataccatataccaacatacggatacatttcacgggcggtatcatcccacacaagctcgccacagaagtagcacattcaaaagtagtagtcatctgctgccttgacaacccctacaccgtgggactcaccacactggtagaagcttttgcattaggactcccggtgatttgctcacgtaatcctaaatttcaaatggacattgaaaaagaaagagcaggtatctatgtagactataatgatacggaaggatggaaacaagccatccgttacctctacacccatcctgaagaagcacagcaaatgggagccaacggtcggaaactggcagaacgggaatataatttagaacattacagccgcgaattatcgcaaatcttaactactacggtaaaaacttatcgcaagcaaccatagatttgcaacgaaaagcgtacatttgcataaacttttatgcgcatgagagtactaatcatcaatacttcagaacgaatgggcggtgcggctatcgcagcaaaccgtctgatggaatcgctcaacggtgccggaatagacaccgggatgttggtactgcacaaaacgagccactccgataaagtacataccgtcggtaagtcttggcaaagaaagttcacgtttatctgggaacgtctcattatttgggcaaataatcttttcagccggaagaatctttttaggatatccattgccaatacggggttcgatgtcacccggcttccggttttcaaagaggcagatatcattcacttgcattggatcaatcagggcatgctgtccttgcacaatattcaacaagtcatcacctccggcaaacctgttgtttggacgatgcatgacatgtgggaatgtacctccatctgccattattcctactcttgcgaatcattcaaaaacgaatgcggaaactgccactttctccgttttcccgggaacaacgacttgtctcaccgcgtcttcaagaaaaaacagagcatactctctccggcaagaataaatatcgttacagtaagtaattggctcgcctcacaagtacgccaaagcacactactcaaaggaaagccggtcacagtgataccgaatacgctttcactgagcaacttccggatacttaataaagtagaatgccgacaagcattatctcttcctgacaaacggattatcgtgttcggggctgcccgtattgatgatccgataaaaggattcccaacgttgatggaggccattcgccttttaatccgacgaaaagactttcggagtaaagagttgcacctcctactattcggaagaatcaaataccccctgcaggtgctcccgtctattccggtcagtcatacctacatgggctgggtaagccaagcggaggagctttctcaaatctattcggcagccgatgtcgcagtgtccgcctcgctctacgaaaccttcggacaaacactgattgaagcccagtcttgcggttgcctgcctgtttcgttcggcaacagcggacaagcagacatcatccgccataaggagaatggatacttagctgactatcagtcggcggaaagtctggccgacggaataaaatggggacttaccgaagggaaagaacgggtgtcaccggaagcaatgagaaacgaagtaatgactaaatattcgggcaaggtggtagccggacaatatatcaatctgtatacaagcctgttggcaagcaaactttagaaaatgagaatactgattattaatacttctgagaagatgggcggtccggccgttgcggcaagccgtctgatggaatcgctgaaaaacaacggtatcaaagctaaaatgttggtacgtgacaaacagaccgaccagattagtgttgtcgggttgaacagaagctggttgcaagtatggaaattcatgtgggaacgtcttgtcatctggagtgccaaccgttttcaccggaatcatatgtttgatgtagatatagcgaataccggcacggacattacgtcacttccggagttccgtcaggcggatgtcatccaccttcactgggtcaatcagggaatgctctcattgaaagatatccgaaagatattgtcatccggcaagcctgtagtatggacaatgcatgatatgtggccttgtaccggtatctgccactatgcacgggaatgtaccaaataccagaaggaatgccatcactgcccctatatatataaggaaggaggccggaaggatctgtcatatcgcactttccgcaacaaacaagaactttatgctcatgccccgattcatttcgtcacttgcagtcattggctgaaagaacaagcacaaagtagtgcattgcttgcaggaaaagagattgtcaatattccgaacgccattaacacgaatctcttcaaaccacaaaagaaggaggaggcacgtacgaaatgtatgttgccgcaaaacaaaaaactaattctgttcggttcggtaaagattaccgataagcggaaaggagtcgaatatttaattgagtcctgcaaaatgctggcagaaaagcatccggaatggaaagattcattggaggtagttgcattcggcaaccaatcccaacagttacaggctctgcttccctttcgtgtacactcacttccttacatcaagaatgagcatgaattagtgaatatatacaactcagtagatattttcgccatcccgtcgctggaagagaatctgcccaacatgattatggaagcgatggcatgcggagtgccgtgcgtagggttcaatgtaggcggcattcccgaaatgatagaccatctgcacaatggctacgtggcacaatacaagtcttcggaagattttgccaacggcattcattggatattgacagaaccggaatacagcgaactctcagaacaagcccgccgcaaggtattgggcaactattcggagagtatcgttgccaaaagatatacggatatctataacaaaataacaggaaaatatgcatagcgtccatcccaccccgaaattctcaatcatcacggtaacatacaacgctgagaaggtattggaggacaccattctaagtgtcatctcacaaacctatcatcacgtcgaatatattatcgtagacgggggatctgaagataagaccttatccatcatcgaacggtaccgttcgcggatacacactgtcgtcagcgagccggacaaaggattatatgacgccatgaataaaggaatctctcttgccaccggtgattacctttgctttctgaacgcaggcgactgcttccacgaagataatacattacagcaaatggtacataccatcatcggcaacgaacttcccgatgtgctttatggagaaaccgccatcgtagacaagaacggtcatttcctacgtatgcgcaggctatccgctccggaaactttaacgtggaaaagctttaaacaagggatgttggtctgccatcaggcattcttcccccgccacacgttggtagagccgtatgatttgcagtaccgcttctccgctgacttcgactggtgcatccgcatcatgaagaaagcgcatacccttcacaacactcacctgacaatcattgactatttggacgagggcatgaccacccggaaccggaaagcatccctcaaagagagattccgcattatggcagagcattatggatggatcagtaccacgatacatcatgtatggttcgtgatccgtgcagttactcaccaataggcgaaggcatataaagcattacctggtctaatatcactccttcgtccaatgccttgattaccaatttgtgggacttctttccagatatcggaagtcgaactgttcgaatggcttgattgcgcagcacgttctctttccattcttcactccgtcctttcgtttcataagagatcacttcaggctctgcatcgtctaacgatattgagaaacgtagttgatctcctcccacaggatgattaggca

SEQ ID NO: 11736 - DNA, 13248 bp, Unknown
  gut microbiota DNA sequence
ccctcattaaatattctggcgcacagtttgcgcattttgaataaaaaccgtatatttgcacgcaataaattttaaacgcatagccctatgtcatttattgctgataagattgtaatggacgggttgacttacgacgacgtattgttgatccctgcttattctgaagttttaccgcgcactgtcgatctctcgacaaagttttcaaaaaacattgagttaaaaattccttttgtgacggctgccatggatacggttaccgaagcgaaaatggctattgccattgctcgtgagggtggtatcggagtgattcacaaaaatatgtctatcgaagaacaggcaagacaagttgccattgtgaagcgtgccgagaatggtatgatttatgaccctgtaacgattaaaagaggctctaccgttcaagacgctttggacattatggcagaatacaagattggtggtatccctgtggtagatgacgaaggctatttggtaggtattgttaccaacagagacttacgtttcgaaagagatatgactaagcatatcgatcttgtcatgactccgaaagaaaaattggtgactactaaccagtctaccgacttggagtctgctgcccagattcttcagaagcataagattgagaaacttccgattgtcggaatggatggaaagttgatcggtctggttacttataaagacattacaaaagcaaaagacaaaccgatggcttgtaaagatgccaaaggtcgtttgcgtgtagctgccggtgtgggtgttactgccgatacgttggaccgtatgcaggctttggtagatgcaggtgcggatgctattgtcattgatacggctcacggacattcgatgtacgtgattgagaaactgaaagaagctaagaaacgcttcccggatattgatattgtagtaggtaatattgctaccggagaagctgcgaaagcattggtggaagcaggtgctgatgcggtgaaggtcggtatcggtccgggctctatctgtactactcgtgtggttgcaggcgtaggcgttccgcagttgtcggctgtatatgatgtagcgaaagccttgaaaggtacaggtattcctttgattgccgatggtggtttgcgttattcgggtgatgtggtaaaagcgttggctgccggtggatattgtgtgatgatcggatcattggttgccggaacggaagagtctccgggtgatacaatcatcttcaacggtcgtaaattcaaatcctatcgaggcatgggttcattggaagcaatggagaatggctcaaaagaccgttatttccaaagtggaacggctgacgtgaagaaattggttccggaaggcattgctgcccgtgttccctataaaggtacgcttttcgaagtggtttatcaattgacaggtggtttacgtgcaggtatgggatactgtggcgctgctaatattgaaaaacttcatgacgcgaagtttacccgtattaccaatgcaggtgtaatggaaagccatccgcacgatgtgacgattaccagtgaatcgcctaattatagtcgtccggaataataaatataaacggtgaactgttaacggtgaacggtgaacaggctgtatgaatcagcagatgttcgctgctcaccgtttattgtttgtaaaatgagaattgatgatgaatagatgtttgttgccactatgtgcctgtcttttgggaattctggcttttgcgcaggaaaatcctgtgctgatgcgtgttaacgggagagaggtttcccgttcggaatttgaatattcgtatcatcattatagggcaggtggggggagggatctttcccctaaagaatatgcactgctgttttctcaggcaatacagaaagttgaagctgctaaagctatcagacttgatacaactgctgcctttcgcaaacaacaagaagagaatcggattaagttgatggaggattgtctggttgataaacagacggtagatagctgcgttcgtgtttcctatcagaaaatggcactgaaagcacgtactgggcaagtgcaagtaatgcagatttttaagtatttaccacagacaataacttcccgacatttggaagaagaaaaagctcggatggactctatttatcaggctatccggaatcagcccggattggatttctctgctttggtgaaatgttattcggatgataggcaaaaccgttggattggaggattgcaaactactgttgagtttgaaaatattgcttttgctttgtcgaagggagaaatctccgaaccgttttttactcctgcgggaatccatattctgaaggtcatggataggaaggagttgcctgtgtatgaggacgtagtcgatggaattgtacagcgcatattgcataaggaaattcggaatcaggggatcggaaaagtaatagagcgactgaaaagggagtggaggtatactccgaatcagacaggtatagaggaactgttgacaaaaggagatacggaacggacattgtttgctattgatgggcaggagtatacaggaggtcggttcaaacaatttgctgcttcccatcctatgactgtgaaacgtcaacttgaggaatttgtagcaaagtctctattggactatgaaagtaaaaaattagataaaaaatatccggaggctcggtacgcattgcaaaaggcggatgaagattatcttataaaggaaatgacacggcagaaagtggagttgcctgcaatgaatgatcgggtcggattggctacttactttaaatttcattcatctgattaccaatgggataaccctcgctacaaaggtgttgttcttcactgtgccgataaaaagattgcgaagcgggcaaaaaagatgttgaagaagttacccgctgatgaatggatggataagctccggcaaacttttaatacatccggagcggaaaagatacagattgaacagggaacgtttgccgacggagagaataaatatgtcaataaactagtttttaagagcggagattttgaacctttattgtcttatccttttactatagttgtcggcaaaaagcagaaaggtccggatgattatcgggaagtaatagaccgggtgcggaaggattatagaacctatcttgacacgtgctggacgcgggaattgagggagtctggtaaggttgaaataaaccaagaggttttaaaaacagttaataataactgatgtaaccgattattcactatcttcgtaccttaaataagtagatttcagttgacaatgcgaatattagtcctcttactgattacccttctcggttgtggggcgtgcaaggaacagcgcgaccacaaaggaaagactcctttggtagaggtggacggtaactttttgtataaagaagatttgatgtccgtgcttcctgtcgggttgtcaaaagatgatagtattctcttcaccgagcattatattcgtagctggacggaagagatcttattgtatgaaaaagcggcaaacaatattccggacaatgtcgatgtggacaaactggtggaaaattatcggaaagcgttgattatgcatacttatcagcaagaattgataaaccagaagttgacgaatgatatctccgaacaagaaattacggattattacggacagaacaaggaactgttcaaattggagaatccgttgattaaggggttgtttatcaaagtgccgttgacggctccccaactgaataatgtgcgcaggtggtataaatctgataaacaggatgctattgaaagtcttgaaaaatatagtttgcagaatgcggtgaaatatgagtacttttacgacaaatgggtatccgtgacggatgtgttggatatgattccgttgaaagtggaagctccggaagaatatgtgaataaacaccgtcagatagaattgaaagatacggcattctgttatttcctgaatgtgagtgattatcgtggagcgggagaggaaaaaccgtatgagtttgcccgtccggaagtgaaagacctgctggtcaatcaaaagcgggtagattttatggaacgggtgaagaatgatctctatcagcaggcagtaagcaagaagaagattatatataattattaaatacaaagaatgaagaagtttgtgaactttagatttgttgttacccttgtcttggcagtatttgctaatgtggcaacttatgctcaggataatgtggttgatgaagtagtttgggtagtaggtgacgaagctattttgaaatcagatgtagaagaggctcgtatggatgccctgtataatggacgcagattcgaaggcgatccgtattgtgtgattcctgaagagattgccgtgcagaagttatttttgcatcaagctaagttggatagtattgaggtttccgaagcggagatcatccagcgtgtagatatgatgaccaatatgtatatccagcagatcggttcaaaagaaaaaatggaggaatacttcaataagacttcgacacagattcgcgaaactttgcgtgataatgcgcgtgacgggttgacagtgcagaagatgcagcagaaattggtgggagagatcaaggtgactccggcggaagtacgccgttacttcaaagatcttccgcaggatagcattccttatatcccgacacaggtggaagtgcagattatcacgttgcaaccgaagattcctatctcggaaattgaagatgtgaagaagaaattgcgtgactacacagaccgtgtgacaaaaggggaaattgacttctctacattggcgcgtttgtattctgaggataaagcttctgccatcaaaggtggtgagtgtggatttatgggacgcggtatgatggatccggcctatgcgaatgtagcattcagcttgcaggatccgaagaaggtttccaagatcgtggagtcggaatttggttatcacatcattcagttgattgaaaagcgcggtgaccgtgtgaatacccgccacatcctgttgcgtccgaaagtatcggagaaagaactgaccgaagcttgcgcacgtctggattctattgctgacgatatccgtgcgaacaaattttcttttgatgaagcagcagccgttatctcacaagataaggatacccgtaacaaccatggtatcatggtgaatgttaatgagcactcgggtattactacttctaagttccagatgcaggatcttccacaggacgttgccaaagttgtggacaagatgaatgtgggagaaatttcaaaagcctttacaatgataaacgagaaggatggaaaagaagtttgtgcaatcgtgaagttgaaaacaaagatcaatggtcataaggctaccattgcggaagactatcaggacttgaaagaaattgtaatggataagcgtcgtgaagagatgttacaaaaatggattctggacaaacagaaacatacctatgtacgtatcaacgaaaactggcagaagtgtgacttcaaatacccgggttgggtgaagaaggattgatgtttaacagcttgattttatatgctgaaacgaaataagaaagataaacaacaagacaggcatagatggctccttataggctttctatgcctgtttggcgtatgtcttgtggcgcaaaatcccaagaaaccggcagacaagaaacaacaaccggcgaataagcaacagtcggaaagtaagaagcagccggaaaataaaaagacaaaggtttatttgcttcatgcggatgagggacaggcggataaactgtctcgtccggacgtgcaagtactgatcggtaatgtgaaaatgcgccatgacagtatgtatatgtattgtgacagtgcgctgatttttgagaaaaccaattctgtagaggctttcagtaatgttcgtatggagcagggagacaccttattcatctacggtgattatctatattacgacggaatgacgcagattgcgcaactccgtgaaaacgtgaaaatgattaaccgtaatacgactttgctgacggatagcttgaattatgaccgtctttatgatctcgggtattacttcgagggaggaactttgatggatgaagagaatgtgctgacttccgattggggggagtatagtcctgctaccaaacagtcggtgtttaatcatgacgtgaaattggttaacccgaagtttgtattgacttccgatacattaaggtataatacagagaacaaaatcgcagttattctcggtccttcaaacatcgttagtgacaataaccatatctactccgagcgtggattctataatacattgaccgagcaagccgaactgttggaccgttccattctgaccaatcaaggaaagaaattggtgggcgacagtctgttctacgaccgtgttgccggttatggagaagcgttcgacaatgtgaagatgacggatgccatcaataagaatatgctgacaggagattattgtttctacaatgaattgactgactccgccttcgcaacaaaacgggctgtggctatcgactactcacagggggatagcctctttatgcacggagatactttgcagctagtgtcttacaatctgaataccgactcgttgtatcgtttaatgaaagcttatcataaagtacgtatgtatcgtacagacgtgcaaggagtatgcgattcactggtttataattcgaaagattcttgtatgaccatgtataccgatccgattctgtggaatgacggtcagcagttattaggtgaggaaatcaagatttatatgaacgacagtactattgattgggcacatatcatcaatcaggcattaacggtggagatgaaggattccattcactataatcaagtgtccggaaaggagatgaaggcttatttcataaatggtgatatgcgtcatatcgaggtagtcggtaatgtgcaaacggctttctatccggaagagaaagacagtaccatgacgggatttaactgtttggagggcagcgtgctccatctttatatgaaggataagaaaatggaaaaagggctgtttgtcggcaaatctaacggaacgatgtatccgatggaccaaatccctcctgacaaactgcgtctccctactttttcctggtttgactatgtccgtccgttgaataaagacgatattttcaactggcgtggcaaacgtgcgggagaaacgttgaaaccgactactgacaggcgtccaaagacagataagcgtaacttaattaatatgtagcagtatgggaatgtttaattcgatgaggaaaccccgtggctttaatcatcaatacatttatgtagacgagcgtaaagagaaactcgccaagatggaagagaacgctaaacgcgacttggggatgttgccggagaaagaatttaatccggaagatatccgtggtaagtttatcgaaggaactacccacttgaaaagaagaaaagcaagtggtcgcaagccgatctctttcggaatcatattgattatcattgcctttcttctctatctgtggcattatttagcaacaggaagctggagtttttaattaaagattataaattaaaaattaaagaagagaaaggtactggatatttatttgaacggctgtaacattgaattgacggaatacgatttccggcttttaatttttaattgttaatttacgaagtatgagcgatattattcatttgttgccggattcggtagccaatcagattgctgccggtgaagtgatacaacgtccggcgtctgtagtcaaagagctagtggagaatgcaattgatgcggaggcgcaaaatatacatgtgctggtgactgatgcgggaaaaacgagtattcaggttattgatgatggaaagggaatgtccgaaacggatgcccgtctttctttcgaacgccatgctacatccaaaatacgtgaggcttccgatttgtttgctttgcgcacgatgggatttcgaggagaagctttggcttccatagccgcagtggcgcaggtggagttgaagacacgtccggaatcagaagagctagggacaaagctggtgatagcgggctctacagtggagagtcaggaagctgtttcctgttctaaaggaagcaatttctctataaagaatctgttctttaatgtgccggcccggcgtaagtttctgaaagctaattccaccgaactgagcaatatccttgctgaatttgaacggatcgctctcgttcatccggaagttgccttctcgctttacagtaatgattccgaacttttcaatcttcccgtatctccgttgcgccagcgtatcatggctattttcggtaaaaagcttaatcagcaactgctgaatatagaggtgaatactacgatggtgaaaatctccggatacgtagctaagccggagactgcccgcaagaaaggtgcacatcagtatttctttgtcaatggacgttatatgcgccatccttactttcacaaggcggtgatggaagcttatgagcagttgattcccgccggtgaacagatctcctacttcatttattttgaagtagatccggctaatatcgatgtgaatatccatccgacaaaaacagaaatcaagtttgagaatgaacaggctatctggcagattctttcggcttctgtcaaagaatcattgggtaagttcagcgctattccttctattgattttgatacggaagacatgcccgatattccggcatttgagcagagcacctcttccgaacctcctaaagttcattataattcagattataatccgttcaaggtttcggctggaggcagtggtggcggttcatatagtcgctccaaagtggaatgggaagatttatacgggggattgacaaaggctagcaaaatgaataatccgatgcccgagcctgagacagattgggaaaacccttttagtggtgaacaacaatcgtttgtcacggagaaagagggagaaacgctgacatccatagcttcgaccttgtatggcgatgagcctgtggtggagaaaggaaaccaacatttgcaatttaaagggcgcttcattttgacttctgtgaaatccggtttgatgcttattgatcagcaccgggcacatatccgagtacttttcgaccgttatatggaacagatccggcagaaacaaggagtatctcaaggcgttctcttcccggagatattgcagttgccggcttcggaagcagccgtgttgcaaggtatcatggatgatttggcggcggtaggtttcgatttgagtaatttaggtggcggaagttatgctataaatggcattccatcgggtatcgaaggattgaatccggttgaattggtgcgtaatatgctgcatacggcaatggaaaaaggaaacgatgtaaaggaagaaatccaaaatatattggctttaacattggcgcgtgcggcggcaatcgtttacggacaagtattgagcaatgaagagatggtaagccttgtcgataatctttttgcctgtccttcaccgaattacaccccggatgggaaaacagtgttgacaacgatcaaagaggaagatatcgaacgtttattcaaataaaacaaattattttttctattcataaaaccttttagttcggttcgtgttatttaattagttaaacaaagaaaaagatttaaataaccacttaactattaggtatatgaaaaagattctgatgttgctggcttttgccggcgttacgtctgtcgcttctgcgcagcagactatgacggtaactgaatacgaagtgattcaggtacaggataaatatcaagtaataaccaatccattctggagcaactggttcttctctgtaggaggtggtgctcaggtgctgtatggcaacaatgaccatatcggcaaattccgagatcgtgtcgctcctacgtttaatgtatctgtcggcaaatgggtgactccgggttttggtgtacgtttgcaatacagcggactgcaagctaagggattcacaatgaatgaaacggccgattatgtagtcggtggtccgagagaagatggttcttacaaacagagatgggattatatgaaccttcacggtgatttgatgattaacttaaatgcattattcggtggatataatccggatcgtatttatgagatcataccttatatcggtgcaggttgggctcactcctatactcgtcctcataccaattcggctactttcaatgcaggtatcatcaaccgtttccgcttgtcgaatgctgtcgatttgaatctggaattgagtgcaacagggctggaaggtaagtttgacggtgaacacggaggtaaacgtgactatgacggtatcttaggtgctactgtaggtgtaacctattatttcccgactcgtggattccaacgtcctgtaccacagattatctctgaaatcgaattaagtcagatgcgtgatcagatgaatgcgatggctgccgctaatctgcagttgcaacagcagttggctaacgcacaacaaccggtggaaatagaagacactgaagaagttgtgattgcagataccaacattgccccacgtactgtattcttcaagattggctctgataagttgtctccgcaagaagaaatgaacttgtcataccttgctaataagataaaagaatctccgaatactacgtacacaatcaatggatatgcagactctgcaaccggtactccggctttcaaccagaagttgagtctggaacgtgcacaagttgttaaagatttgctcgttaagaagtatggcatttctgccgatagactgaaagttgctgccggtggtggtgtcgataaattcggtcaaccgatcctgaaccgtgtagtattggtagaatcagcacagtaacgaaatgatttcagcattcaacgattctttatagtcgcttgctgaaaaaagaaaaacggctgaaagcgaaacctgaaagtaggtgttctcgctttcagccgtctttttattagttctcctgttgaatacagttttatttttctctcctatatttttcttttagttgaatatcggcagtgaaacttttaggttcggatacaggtcgcctagttgtttcaaaaaatcatttgctatgataatggcttctattgtcttttggggattcgttggtatttctgcaatattggtaaaaatcaagcaggagtagatgatgagtacgacaggtttgtcatcagtctgtagtgataacttataagcttttacgttatttccgcgagcttgagcctgtgcctgtaccgaaccggtcagtggaagttcggtaagtctggaattctcaagacgtgctgcatcgaagataaagtgccgattgatctcaccgtccgtatctgtgtcgaataaatgtaagttttttccgcttagtacgagatatttaggtgtttgcactgtggtgaaacgtactgctcccaaagttgccattccttttaatttatcttttactccgtctttgagggcagaagctaccccatattcattgctggcatagttgaaagcatcaatcttttcctgttccatcgctttctttaagaaaggtagttcggaagtcaggaagtggtttttatacttctcggcatttgcaaattctgctttgaaatcagtgttgctgacaatttgagcttgttgtgagttcttgttctttatatagaaccaataccctaaatatagggcgataaaaacgatgggaatgagtgtgtaaattgacataatttatctttttaagttattgacttaggcacaaatatataaaaaagttaagcaaaaaccatacaattgtttggttttttgcttaactttctgtcaatgtacactttatcagtggcttatcatttcagtaatgagtaaatataacggaaattttcagcaagaagatcgacatccaatccgtttaagaatgattgctcataagacagaccgaaatacatttgacggaacatggttgccgccttcttcacatctgtatcaggacgtatttctccactatcttttgcttgttgtataatggtagtccacaaatgataatcttgttcataaaacttgggtatctgtttccggatattgggatagtacatcctgacctgtgtgaagaagtgaaaatagtaaaagttgggacaagaatcataaggattgttgccgtcatctattaattccaccaatcgcttcatggtagcggttacacctttcaaatacagttcgataaaatcttttaaggtacattcttttacatcgaacttattattcggatgatggatttgaaatacaaatttgtctactactgctacaaataaatctaatttgtatggaaagtagtggatgatgcctgcccttgatagtccgcaggctttcgcaatctctgtaaagctggctttctcgtagttcattttgacaaataccttaaaggccttttccagcacttcttcccgattggtaatcatactttttgtaggttttatgtttttattacgaagatacagaatttttcaaattgctccttatttttattggatagagtttgttaattagctttattcaatttttgtatgactatggtgagaaatgtaatacttaagacttacgaaggtgtaatgaatgattctgtttctttttgaaccaaataataaagccggtgacaggtaacgatgctccgattagtgcacatacgaatacaatgatttccccgaagatacccaaaattcttccatcgtgaatttcaagattcatccgtcttagtttgtcggcaggtgatgcttctgtgtattttccggcataagctcctgagccttgtaagggagcaagtgtatattgatcgaagaataagttgtcggttttataataagagcctctttcatgaactacgctgacacgtattacctcttcctttttctgtggcagggcaaaataaaatgtggcggcgttgggagattcttcttttaatttcttaaagaggacattcagactggcttttcctgcttcgatatgtaaagtgtccgattgcggaagtacataaggtttcagttcttttcctccggaagtgatgtaatatgttgccttgctgaaccaattaaaactccatactagtccggtagcagagaggacgaacaatacgatggcggcatatccgcctaaaacattatgcaggtcataattgagccgtgcaaaaggagctttgattttcagtgtgaaattacggagggcagttttcttattccattatcttttaccgttttctcttttacgtcaat

SEQ ID NO: 11737 - DNA, 14132 bp, Unknown
  gut microbiota DNA sequence
ggctttcaattctttatctgcccatctggtcatttcttccgattgcaatgtacttacttgagcaaagaacttaccgttacccaaatattgcaaatgaacgggtttcagacctctggctgcggtttcaacgtcaaagtaatagtcatcgaattgggttgttcctttcgggatatgtaagaatgcggctttctttgtactgttctctgtaaaaccgttagctatggatgtatttgagaacgtgtacatgttacctgattcggtttggaagatcccattgtaagcattccatgaaccggctatggctgcacgttcatcttccattgtcgtgatatattccagttcaggataagagtatacggctacatacgctttgttgatgtaacgtgtcacactcggcttttttgtttcgtctgtcaagtaatatgtgatataaatcttgttgtcactgacagtcataccggtaaggcggggctagtccgaagttgacagttcattcacaggctttgtcacctttcgaacaaggtagcattccatcgtgtatatttggccatccatcccagaccaagtattgcttgtcaatactctgaggaactttattgtattcgttggcaggatcttctacatcggacactttgcgtgtcagtccggagtagacatgatttagtgataaagtgtgatactgattgaatgtatagttcagactggtatttgttctccattctttgttattgatatggagttgtgagcgcgatctttcgcctgaactggtggaagcgtttggcacccattcgccctgccagttgtatcgtcttgggacagtatccgtactgttattgtcaacgtcactgtaagaaccgtaaaaagaaagtccccacccttctatgaacaggtctgattttttataacgcagcattggaatgaccgaacggctgtctgttgttcgagctccatatacgagctccatgacgactccgttctgaatatctttgtcgtttccggcaacaataatgcctgccagcagataatcagcgaacggacggtttacgaaaccggtttctaatcgtactctcaacgacttatatccatcgtggaaacgcttaacccattgattgcccaatttctgcccgctttccaagtcaatgatcggtacatataccttataattattatccgaataattgaggaaagaagtgaggcgggttgtgagtccggtttttccgttagtatatgctccgttaatggaggctttgtgtgtgttgaatgagccgaaagagtatgaaacatccaaataatttgcagtcttgcgggtgattacattgaccgcaccgcccaatgcatcagctcccaagcctacggggagtacacctttgtagacttccgctcgttccaccatattggcaggaaggttatttatactgaaagcatcaccgaaattgtccattgccagaccgttcatgaaaaattttacctgtcgtccggaaaaaccgttcaaggtgaaattgtaatcagagccgactccactatttacacggagtttgactcctgccatacggttggtgatagtaccgatatcgacagaagtgttatagttcttgctcaaatcggcaaccgagatggcgaatgcctgctcctgctgtcggcaggcctcacttttaccgacaataactacctcgtcgatttctacataattgctgtttttgatgtccggtatcgaagtggttcttcggaaactgtgttctgagcttcagaaatcagaggaatattaatgagaataggtataaccgacaaataccatttaaacatactttttttctttcttttcatatcaatcgttatcctgaatagtttgcggtgcaaaagtagataaacgggatatgcctggcaatcgttatatttgggtatttgtatggctgctgtttgtcggaggatttacgcaatcattatttattggtatattgggaaaccgtagtttggaatttattcatagaaataaaaagtccgggcaaatgagtccggacttttttagttgtaggagagtctgctaaaacgcagattaatctcttattcttgagagaagcgttttacctgttcttcgatcagttctttatcatcgaagtaattgatcttcattgctttctttacatcagccaatgtctcggctgcggtagctcttgccacttcgcatccttttcggagcatttcgtagacagcaggaatatctttgctgaattctttgcggcgattgcgaatcggttccagcgtctcctgcatgatggaattcaggaagcgttttacttttacatcccccaatccgccgtgttggtagtgagctttcaattcagccagattcgggtaatccggtaaataacgttcaaaatgttccggacggcagaaagcatcgagatatgtgaacacggtattgccttcgatttttcccggatcctgcacacggagatgtcccgggtcggtgtacatactcatgatttttttctgtatttcctccggctcttccgaaaggtagatacagttcccaagtgatttgctcatttttgccttaccgtcagttcccggcaaacgcaggcaagcggcattgtcaggcaacaggatttccggttctaccaatgtctcaccataaatataattaaaacgacggacaatctcgcgtgcctgttcaagcattggttcctggtcctcacctacgggaacagtcgtagcacggaaagcagtgatatccgcagcctggctgataggataagtgaagaagcctacggggatacttgcttcgaaattacgcatctggatttccgctttaaccgtcggattacgttgcagacgcgatacacttacaaggtccatgtaatagaaactaagttcgcacagttccggtatttgcgactgaataaagatggtcgctttggaaggatcgattccgcaagccagatagtcgagggcaacctcaataacattctgacgtactttctccggattgtctatattgtctgtcaatgcctgcgaatcggcaatgaagataaacatcttgctataatcacccgcgtcttgtaactccactctgcgtttcaacgaacctacataatggccgatatgaagtctgccggtaggacggtcgcccgtcaatattattttttcttttcccattgttattaccttattaatatctatttagcgacaaagatacggataaaaactgaaagatgtatcaaaatgggagcacttcactgtaaaaaagtagacgtttctttttgccatttgcaaaatatgtcgttactttgcacaaattttggaaccgacaatgaatcaacaggaaatcagaagtaagtattatttacattcggatgttttgcacccggaaacggcaggcttcttcttttttctccaaaaacgatattttagttctttggtaatgcgttaatccttttttgagggtaacgcattttttttatggacgaacttagaaataacaacttattataacaacaaaagaaatggaaaaggaaatcaagaaagttctcgttttgggttctggagcactcaaaatcggacaagccggagagttcgactactcaggctcacaagcactgaaagctttgaaagaagaaggtatcagctcagtattggtaaacccgaacatcgcaaccattcagacttctgaaggcattgccgataaagtgtatttccttcccgtaactacttatttcgtagaagagattatcaagaaggaacgtccggacggtattctgttggcatttggcggacagaccgcgttgaactgtggtgcagaactctatacacagggtattcttgataaatatggagtaaaagtgcttggtacgtctgttgaggctatcatgtatactgaagaccgcgatctgttcgtgaagaagctcgatgaaatcagtatgaaaactcctgtcagccaagctgtagaaagtatggaagacgcgattgctgctgcccgtaagattggctatccggttatggtgcgctcggcttatgcgctgggaggccttggtagcggtatttgcgctaatgaggaagaatttctgaagttggctgaaagttcatttgcgttctctaaacaaattcttgttgaagagtctttgaaaggctggaaagaaatagagtttgaggtaatccgtgacgctaatgaccactgttttacagtagcgagcatggaaaacttcgaccctctgggcattcataccggtgagtctatcgttgttgctccgacttgctcactggacgacaaggaactgaaaatgttgcaggagctttctacaaaatgtatccgccatttaggtatcgtaggtgaatgtaatattcagtatgctttcaactctgatacggatgattaccgtgtgattgaagtaaacgctcgtttgagccgttcttccgctttggcttctaaggctaccggttatccgttggcatttgtcgcagctaaaattgctttgggttactcgctcgaccagattggcgagatgggaactcctaactctgcatatgttgctcctcagcttgactattatatctgtaagatccctcgttgggacttgacgaagtttgccggtgtatctcgtgaaatcggttcgagcatgaagtcggtaggtgagatcatgtctatcgggcgctctttcgaagaaatcattcagaaaggtcttcgtatgattgggcagggtatgcatggtttcgtaggtaatgacgaactccatttcgacgatcttgataaggaactttcacgtccgactgacttgcgtatcttctccattgcgcaggctatggaagaaggctacactatcgaacgtatccatgatctgacaaagattgatccttggttcctcggcaaactaaaaaatattgttgattataaagctaagttatctacttataataaggtagaagatattccggctgatgtaatgcgtgaagcaaagattttaggcttctctgacttccagatcgcacgttttgttctgaatccgacaggaaatatggagaaagaaaacttggcggtacgtgctcatcgtaaatctatgggtatccttccggctgtaaaacgtatcaatacagttgcttccgaacatccggaactgaccaactatctgtatatgacatatgcagtggaaggttatgatgtgaactattataagaacgaaaaatcagtagtcgtgttgggctcgggtgcttatcgcatcggtagctcggttgagtttgactggtgttcggtgaatgcagttcaaaccgctcgtaagctgggttataaatcaattatgattaactacaacccggaaacagtttctacagactatgatatgtgcgaccgtctgtacttcgacgaactttcttttgaacgtgtgcttgacgtaatcgatcttgaacagcctcgtggtgtgattgtttccgtaggtggacagatcccgaacaacctggccatgaaactttaccgtcagtcggttcctgtattgggtacttctccaatctcgatcgaccgcgccgagaatcgtaacaaattctccgctatgcttgatcaactgggtatcgaccagccggcttggcaagagctgacgagccttgaggatgtcaaaggattcgtagaaaaagtaggctatccggtattggttcgtccttcttacgtgctttcgggagctgcaatgaatgtttgctatgatgacgaggagctggagaatttcttgaagatggctgccgaagtttctaaagaatatccggtggttgtttctcaattccttgaaaatacaaaagagattgagtttgacgcggttgcccagaacggtgaagtagtagagtacgcaatctctgaacatgtggaatttgcaggtgttcactccggtgacgctacactggtgttcccggctcagaagatttattttgcaacagcacgccgtatcaagaagatcagccgtcagattgccaaagaactcaatatctccggcccgttcaatattcagttcttggcccgtaacaatgaggtgaaagtaatcgagtgtaacttgcgtgcttctcgtagcttcccgtttgtttctaaggtactgaaacgtaacttcattgaaacggctacccgcatcatgctggatgctccgtactcacgtccggataaatctgcattcgatatcgattggattggtgtaaaagcatctcagttctctttctcccgtttgcacaaggctgacccggtattgggtgtggatatgtcttctacgggtgaagtgggatgtatcggtgatgatttctctgaagcattgttgaatgcaatgattgctaccggcttcaagattcctgaaaaagcagtgatgttctcttccggtgctatgaagtcaaaggttgatttgctggacgccagccgtatgttattcgctaagggatatcagatctacgctactgccggaactgcagccttcctgaatgctcatggtgtggatactactccggtttattggccggatgagaagccgggtgcggaaaacaacgtgatgaagatgattgccgatcacaagtttgatttgatcgtcaacattccgaagaatcatagcaaacgtgaattgacaaacggttaccgtatccgtcgtggcgcaattgaccataacattccgttgattacaaacgctcgtctggcaagtgcctttatcgaagcattctgtgacttgaaattgaatgatattcagattaagagctggcaggaatataaataaaaactgcttgagcggtatggtatattaaactaagtaggactccctctttggcttgttcaaggagggagttgtagataaaataggattcatcatgttagtacttctatcctgcgccaagaccatgagtgagacttcaaaggtgaaagcccctttgaacacagttccgcgttttcaaaaagaagcgtccgagatagctttgcagatgtcgcagttctcggtggacgagttggaacgtctgttgcgtgtaaacgcaaagatagctgtggagaattataagcgttatcaagtctttcatgcagaaggcactccggaacttccggccttgttggcttacaccggaaccgtgttcaagcgtttgaatgcgaaagatttctccaaagaagaatttgaatatgcacaggaacatctacggttgacttcattttgttacggcttgttgaggccgttggatgttatccgttcttatcggttggagggggatgtcgtgctgccggaattggggaatcagacaatgttctcttattggcagtcccgtctgacggatatattcatagaagatataaagaatgcgggtggcatactctgcaatttggcaagtgatgagatgaaaagcctgttcgactggaagcgggtagaaaaagaagtacgtgtcattactccgggatttcaagtgtggaaaaacgggaagtgggcttcggttgttatctatataaagatgtcgcgtggtgaaatgacacgtttcgtcctaaagaataaaatagaaaatccggaagaactgaaacatttctcttgggaaggattcgagtttgatgagtctctttcggatgagaaaaagtttgtgtttactaacggtaaagaaatataacgtatgacagaagtagaaaaaatgcgtagcagccggttgaccgatatggctgtgccggaaatacaagaacgttttgcgcatgccaaagcactgctggctcgtatgggaggaatgagtacatacgaagacggatacagaaagctattggaagaattggtgcccgggatacctgagacatcgattatctgtccgcctttccattgcgatcatggagatggaatcaaactgggcgagcatgtttttgtcaatgccaattgtacatttctggatggtggatatattacgattggtgctcatacgttgattggcccctgtgtacagatttacactccgcatcatccgatggattatctggaaagaagaggctctaaggaatacgcttatccggtgacgattggtgaagattgctggattggcggtggagctatcatctgtcccggtgtgacgattggcagtcgctgtgtgataggagcaggtagtgtcgtcacaaaagatatccccgatgattgtgttgcagtcgggaatccggcacgtataattcggaaacaagcgtaaccgtcgggaaaaattgcatgaaaaaaaactcctttattatttgctgataatcagtagattcgtttgccggataaaaactttcttgaaaaatattattagaaatgtttggaggtttcaaaaaaagccgtacctttgcatcgcttttgaaacggaagtgtacgggcgtttagctcagctggttcagagcatctgccttacaagcagagggtcggcggttcgaatccgtcaacgcccacacgaaaaaaacgaaacacttccggctcattaacaagggcgtttagctcagctggttcagagcatctgccttacaagcagagggtcggcggttcgaatccgtcaacgcccacacgaaaacagaagtcttgcgaagaaattcgtgagacttttttttatttcttaccgcttttatacaaactttctttatccttttgccttataactcaggaaaaagagttaattttgcgttctgataattatctaagaaaacgtatggaacttgatgtattaacggccatatccccgattgatggtcgatatagaggcaaaacgaaagctttggcagcttatttctctgaatttgcactgatcaaataccgtgtacaggtagaggtggaatactttatcaccttgtgcgaacttcccttgccgcaattaaaaggaatcgatagcagcgtgtttgaaactttacggaatatctaccgtaacttctcagaagcggatgcacagcgcattaaagatatcgagagtgtgactaaccacgacgtgaaagcagtagaatacttcctgaaagaagaatttgacaagatgggcgggatggatgactataaggaattcatccacttcggactgacttctcaggatatcaacaatacgtctgttcccctttctatcaaagaagcattggaacaggtctactatccgttgattgaagaactgattgcacaattgaaaacatacgcaacggactgggcaaatatccctatgcttgccaaaactcacggtcaaccggcttctcccacccgcttgggtaaagaagtgatggtgttcgtttaccgtctggaacgtcagttggcaacattgaaagccagcccgattactgccaagttcggtggcgctaccggaaattacaatgcacatcatgttgcatatccccagtacgattggaaacaattcggtaacagatttgttgcagagaagttggggttggagcgtgaagagtatacaacgcagatttcgaactatgataacctttctgctgtttttgatgcaatgaagcgtatcaataccattatggtggatatgaaccgtgacttctggcagtatatctctatggagtacttcaagcagaagatcaaagccggagaagttggttcgagcgctatgccgcataaggtcaacccgattgacttcgaaaatgcggagggtaatctgggtattgcgacttccattctggaacatttggccgtgaaactccctgtttcccgtttgcagcgtgacttgacagattcaacggtgctgcgtaatgtgggtgtgcctttcggccacatcgtgattgccatccagagttctttgaagggattgcgcaaactgttgctgaacgagccggctatctatcgtgacttggataactgttggagtgtagtggcagaagctattcagacaattctgcgccgtgaggcttatccgcatccgtatgaagccttgaaagctttgacccggaccaaccaggctattacagaaagttctattaaagagtttattgaagaattgaatgtaagcgaagatattaaaaaagagttaagagcaatcactccccatacttatacggggctttaattgtttactaatataataaacgtgtttttaaataggccgtgaggccaaagtctaattttattcgaataaaaaaatgagcacagaaaacgaagaatggcgcgaaaattctttcaatgaagagaatgcaggtgccggccgtgatggtaacaggtcttacaacagagaaggtggagaacgtccgtatcgtccttcttacaatcgtgaaggaggggatcgtccgtatcgcccgagatttaatgccaacaatgaaggaggcgaccgtccgcagcgttcatacggtgaccgtcctcaacgtcctcgcttcaatagcgaaggaggttcttacggtgaccgttctcaacgtccccgcttcaatagcgaaggaggttcatacggtgatcgtcctcaacgtccccgtttcaatagtgaaggtggttcatacggtgaccgttctcaacgtccccgtttcagtagcgaaggtggtgaccgtccttaccgtcctcgtttcaataacggtgaaggtggcgaccgtccacagcgtccttacaatcgtgaaggtggtgatcgtccgtatcgtccccgtttcaataacggtgaaggtggcgaccgtcctcagcgtccttacaaccgtgaaggtggtgaccgtccgtatcgtccccgtttcaacaacggtgaaggtggcggctatcgcagcaacaatggcggaggttaccgtccgagattcaacaacgaccgtcaaggaggataccgtcctcgtccgcgtaccgctgattatgatccgaatgctaagtacagcgtgaagaaacagattgagtacaaggaacagtttgtggacccgaacgaaccgattcgtctgaataagttcctggcaaatgccggtgtttgttcacgccgtgaggctgatgaatttattacggcgggtgtggtttctgtaaacggtgaggtagtaactgaattgggcacaaagatcaaacgctcggatgtggttaagttccacgaagaaccggttagcattgaacgcaaagtatacgtgttgttgaataagccgaaagatacggttactacatcggatgatccgcaggaacgccgtacagtaatggatttggtaaaaggcgcttgcaatgaacgtatctatccggtaggacgtcttgaccgtaacaccaccggggtactgttactgacgaatgacggtgatctggcttccaagctgacacacccgaaattcctgaagaagaagatttatcatgttcatctggacaagaatctgacgaaagcggatatggatcagattgcagccggtatccagttggaagacggcgagattcatgcagacgctatcagctatacagatgactttaaaaaagaccaggtaggtatcgaaatccactccggcaagaaccgtatcgttcgccgtattttcgaatcactgggttataaagtagtgaaactcgaccgtgtattcttcgccgggctgactaaaaaaggtctgcgacgcggagactggcgttacctgacggaagcagaagtaaactacctccgtatgggttcgtttgaataagaacgttaataaaagaataagttaaatggaaaagattggtagaacaaaaattgttgatctgttgaagcgcacggatattggcgctatggtcaatgtgaaaggatgggttcgcacccgcagaggtagcaaacaagtaaactttatcgcactgaatgacggttctacaataaataatttgcaggtcgtagtagacttggctaatttcgacgaagagatgttgaagcagatcaccaccggcgcttgtatcagcgtgaacggggaaatggtagaatcagtaggttccggccagaaggtggaagtgcaggctcgtgaaatcgaagtgctgggtacttgcgacaatacatatccattgcagaagaaaggtcattccatggaattcttgcgtgagatagctcatttgcgtccgcgtaccaatacatttggtgctgtgttccgcatccgccacaatatggcgatcgctatccataagttcttccatgaaaaaggattcttctatttccatacaccgatcattacggcttccgactgcgaaggtgccggacagatgttccaggtgaccaccatgaacttgtatgacttgaagaaaaacgaagaaggctctatcatttatgatgacgatttctttggcaaacaggcaagtctgacagtctccggtcagttggaaggtgagttggctgctacggctttgggatctatttacacattcggtcctacgttccgtgccgaaaactccaatactccccgtcacttggcagagttctggatgattgaaccggaagttgctttcaacgacattacagataatatggacttggctgaagagttcatcaaatactgtgtgagatgggcgttggataactgtgcggatgatgtgaagttcctgaacgatatgttcgacaagggcttgattgagcgtctgcaaggtgtattgaaagatgattttgttcgtctgccctatacagacggtatcaagattctggaagatgccgtagcgaaaggtcataagttcgagttccccgtttactggggggtggacttggcttccgagcacgaacgctacttggtggaagagcacttcaaacgtccggtcatcctgactgactatccgaaggaaatcaaagccttctatatgaagcagaacgaggatggcaagacggtacgtgcgatggatgttcttttcccgaagatcggtgaaattatcggtggttctgaacgtgaatcggactacaacaagttgatgacccgtatcgaagaacttcacattccgatgaaggatatgtggtggtatctggatacgcgtaagttcggtacctgtcctcattccggtttcggactgggttttgaacgcctgttgctctttgtaacgggtatgtccaacatccgtgacgtgataccgttcccgcgtacaccgcgaaatgctgaattctaatatttcggtatatttatgtaaaactcgcataatcttctggttatgcgagttttttatgagctttctgtttcttttctcaaaataaatctttatatttggacatacgcattcgagagtgttaactaaaataatactatcatgaaaaagctctatttctttaccatgctttcaataatgttgttggcggtaacaggtgcgatggcccagaagaaaacaaaattccagttggccgatctgaaaggtatttggcagctttgccactatgtgtccgaatctcctgatgttccgggatctttaaagcctagtaatacgttcaaggttctgagtgatgacggacgaattgtgaacttcacgattattcccggttccgatgctatcatcacgggatatggaacatggaagcaactgacggatgattcttataaagagagtatcgagaagaatatccatcttccgatgttggacaatcaggataatattctgcaattcgaaatcaaggataaagattacttgcatctgaaatactttatcaagaacgatttgaatggaaacgaactcaatgcctggtattatgaaacttggaagagactgggaatgccgaccaagttcccggaagacatcgtgagatagtctagtctgtttagctatgaaaagaacatatatccaactaattaaaatataattgaattaaggaacactagaaaatgaaagaaaatggttatgtagtacaggaatataaagttccggtgaaaaggtactgccagacaatggatttgaaagacaaccccgaattgatagcggaatatgtaaagcgtcatagtgaagcagaggcgtggccggaaatccgggctggaatccgtgaagtgggtattctggaaatggagatttatatattggggacccgtctgttcatgatagtcgagacaccgcttgattttgattgggagactgcgatggcgcgtctcgccaccctgcctcgtcaggctgaatgggaagcctatatgtctatattccagcaggcggatgcaacagcgacttcagcggagaaatggcaactgatggaccgtatgttctatttatataaataaaatacattccggtaaagtgaactgcgtacattatccgtgaaaggatatatgtacgcaatttttatatataggtggaaaatataaatcccgttgcccc

SEQ ID NO: 11738 - DNA, 1846 bp, Unknown
  gut microbiota DNA sequence
attggcattgataaaagaatatcgtatttttgcatctgaaacttataaacttgaatgatccttatatgtataattccatagaaatatgtgcaggtgcaggcggtcaagcattaggacttgagatggcgggattctctcatgttgcattggtcgaatatgaaaaagactattgcgaatgtctgaaacgcaatcgtcaggaatggaatattttctgtaaggatgtgcatcattttgatggtaagccttactacgggcagatagatttgctagcaggaggtgtaccttgccctccgtttagtgttgcaggcaaacaactgggagctgatgatgagcgtgatctttttcctcagatgctccgacttgtgcaggaaattaatccgcgtatcgttatgatagaaaatgtccgtggaattttaagctctaagtttaatgcttatcgggaacaggtacttcaaacgttgaaaaaattaggctacagtacacatcttcaattattaaatgcttctgattatggtgttcctcagctacggccacgagtaattattattggaatacggagagatctggcagatgtcttcatgtttcccgaaaagataccagagaaaacactgtctgtaggtgagactttatatgacttgatgtcagctaatggttggaaagctgtcgaagaatggaggcggacagccaataaaatagctcccactctagtaggcggaagtaaaaaacacggaggtccagacttgggcccgacaagagcacgtaaggcgtgggcagagcttggtgtagacggtcggggggtagctaatgacgttcctgacgcagacttcgtgggaatgccacgattgactccggaaatgcttgcaagacttcagggattccccgatagttgggatttcggcaagcgtaagacgattgcctgtcggatgatcggcaatgctttccctcctcctgttgctatgaaaatagggttgcaaatcaaaaaggtattggattatgaacgcacttattgcagaggcgagaaaaaaatatcacaaagagctgctatctagcggtgtaatgactattgatagcaaaggaattccaagtaatgctgacagttcctccaaactatcaataaatattgcccacggcattgctgaccaattaatggctgaagtccacgaaaaagcagtaggacagacttcgggtgctaaatttgagcaaatgaatatgaatttcttgatgaatacatttccctacctgcagaatttacgtccgggaaaatggcatatctccaaactgggtaaccgtaactccgtcaaaacaagtagttttgctcaatacgaacatttggaatacctcagcctgctgaccaaaagcgatgctcgacttgccgctagcatgggtaacgattatatggtagcaccggatgtggttatttatcgagagacagagacggatgatatgataaatgagaaaactgatattattgatgattccgtgtgtaatcttgccgatatacgaaaaagtaatggcgggttacccattcttcatgcttctatttcagccaaatggacgatgcgtagcgatcgtgcacaaaacagccggacagaagctctcggattgataaggaacagaaaagggcacttaccgcacattgttgtggtaacaggagaaccaatgcccgcacgattggcatcattagctttaggcacaggagatattgactgtatttatcattttgctttgtatgagctcatcaaagcggttcatgatacccatgcagaggattctattgaattattgaacatcttgattcagggaaaacggttgaaagatatcagtgacttgcctttggatttagctg

SEQ ID NO: 11739 - DNA, 5995 bp, Unknown
  gut microbiota DNA sequence
cttggatgatagctggtggcgttgaggcttcttttacagtaaaagtaaatttggcagatggtgatttggttagggtaaatgctccggcagcttggaatgcgaaagtttcagagtattcagccggtactacggaagttaccgtaaccgtaactcctccttccactccgagtgaatgtacaattagggtagaagtcactcatggagtaaatacagctactgatcaaataaaggctaaaacgatttcggacagttactgggcggagtatcaggctggatttgatatcaagattggggatgtggtgattaataagtttgattatccggatgcgaaactacttcaagatggtgaaactgttcctgctacaggtgtttattttattgcagatggtgctactgtgaaaaaaagtggtcctgttactgatttagttttgattgcagaaaggaaagataataaatattcttctaaaatatctaccacaggtaatatctctttaggaaatttagcagaaggcataggcttcttatgtaaaggtgtttctttgtcatcagaaggaactagtagtgtctattggtttaatctatctgggaatataattgagagattgtattttgatcattgtagaatcgagtttatggtagacaaaaatttctcaaatttcaataacgctaaatctggtataaagaatttattgatagaatcttgccatatagcgataccggcacagcaagctaaagaagatcggacagccttgtttttaagatatgatcaaggacaatatggcaatatgacgatacgtaataatgtattttactgtacaacagaaaataaagcagtttcattagctccattaatgacaacagctaaagccactgtgctggatggaatagatgtttgtattgagaataataccttgataaatacattattgaatcatgataactctacttctggtcttatgaagataccttataggaaaggatggaagatgaagaataatttagtttggtatgatgtagctcttatagcaaataaaaatgcaacggctagcttcttatcagaattaggaagtatggagacttttgatattgaagatatctccaataacaaagtattcacaactattgaagacaatccgttgatatggggtatttttagagataataaggtttttgaggataatgtcataatcccagagttaacaactccgtttgttgatggcacacttgttgataccgaaggtaaatacactcttaagcctgaatatcaaggcataggtgcaacaatcgaatagttgttgcaacagattagaataaataaaggagagtctgttggcatgaatagaagctggcagattcttcttttcttattgtaccacttaaattcgaaaaacatgaaatatcgtttacactatttggctacttgtttatttattgctatgtcatttatatcttgttcagatgatgaagtaataagtaatcaacctattccagagcaacctgaacagttaacggaacttattgctcaatacaacactaatatttccgcctatcaggccatgatggataataaagcggagattgttgattatatcactgatagtaaaggcttctataaattgcaacttagcaatcaacagattgtagacgctaatgctcaggctactgaagataaagatattcctcttctgagtattgacgaagatggttattggaattatctgttaggcgggacttcagctgtccttactgacctgcaaggaaatcctgctcctgctttaagcaagacggggaaaggtatatttactcctcaaattgcattaggtaaagacggttattggcaggtttcttacaatggaattcaatggaaacgtttaggtgataatattgctccatcgttggctgagaaaacggctgctaacttttctctttatcgttccgttattttagatgaagtaaccaatactattactttagaatctcgtgcgggtaacggtatacttaaactgaatacggttaataatggtacggcacaggcatggaagaaatttttaatgaatagtgatgataatgtgttgctggattattcgtatgccggatatgatcacggtgaaactgctcctaaggatggttttgcttgggggtataaggtttgtaatgtgaaacaacgcatggaacaggagaatattactgctttagaagcttttattcgtatattggatgaaaataaacttattcgtaaaacgacttcgaatgctactaatgcgaatgccaagattgtgatttactttcctgcaggtgagtatgttctgcatgaagaagctggaaagaacttcccttatgatattttaggaggaaacttcattatcaagggggatggtcctcaattgacttggctggtgatgaaaacgccgaatggagatacggaggctactaatgttcctatgttaagtatcaaacatactaatagcccgaataatgcaggacattctccgttattggcgaatgttgtagaaaatgcgaagaaaggtgagtctaatcttgtggtttcttcaactaccggattgaagccgggtaaatgggtacagttacgtttgcggagtggtaataaagatttattggcaaaagaacttggtcctattaccccgaccggttcgtggtcaatagaacaacagcctgttcctattacggcagagaaatctaatgataattacggaattaaagttacggaatttcatcaaataaaatcagtcggtggtaatcgcgttgttttctatgaaccgattatgcatgatattgacacccagtatgacgattgtttgggttgggaaattcgcgaatataagtattacgaaaatgtgggaatagaggatttaactttcgtaggccaggcaatcactccctattatcatcacggtgatggtgcaccgagtaacgtagatgcatggcgatatgatcaagaatatagaccgatcgctatggtacgattagttaattcctgggtacgtaatgtagattttgagagtgtaagtgaggcgttgactatttccgaatcagccaattgctctgcctataatattgaaatcagaggtaatcgtggacatggagcagtacgttctgccggttcgacacgtatattcattggtaagataaatgatcaaagtaaagatggaactgctaataaatacggagttatcggtcaaggacagtggcatggatgtggtgtttccaaaccaagtattggtaatgtgatttggaattcgaactggggtagtaatgcttgtttcgaatctcatgccacacaacctcgtgctactctatttgataattgtagtggtgggttggttcgttatcatgcaggtggcgcagaagatgaggcgccgaatcatttgagtgatttgactatatggaatctgaatgtgaccggaacaattgatgaacagaagcgagacttttctactaatttcacttggtggaataatacagataagtggtggaagatttatccgcctatcgtagtcggtactcatggccaggccgtgacattctcacaagaggaaaaccagcttgcttatgaagaaagtactggaacgagggttactcccgagtctctttatgaggcacagttggaaaaacgtctgggagcagtaccagcttggttaagggctttgaaataataatacttgaataaatgaataatttcgtaaagaaattccggcaaatggcacctgtgataagtatgattatatcacaggtgttgttgcttggatgtaaggatgaagactcaaaagaatatatcgaagggcagattccggagacggaggttgctgcgtatattgcacaaatgaatcaggatattgctgatatgcagcagttggcagatggaaagttgagggtactcacttatttccaggaacaggacaatgtttgggtaatggagttggagaacggtcatcttctaaggatctatccagaggtagggaaaaacgaaaaaaaggaaattcccatattggggattaatgaagaaggatattggatatacgagttctataatacggaggacatactgactgacgtgaacggtgagccggtagctgcccttgccaaaacgggaaaggggacatttgtaccacggttgaggctaaatgaaaagaactattgggaagtgtcattcaacgggatgcaatggaagcaactgactagtaggccgacagatgtgatatctactacatcggctgcttattctttaatgaatggacttgtcgctgatgaaaaaaataagactgtcggtttgtctttgtgttgtggagagttgataataacttctgttgtgctgggaaaaggtactactgaagcttggaataaatttgtgttaggaacttcggataatgttctgctcgatttttcgtatgccggatatcatcatggggaagtagctcctccagatggcttctctttgggatatgaggtgatgaatgtgaaagaacggatgaatgcgaaaaatctgacagctcgggctgcattgattgatattttgcaagagaagaatctgacccgcaagaatgatacaaatggcaataatccgaatgcccgtgttgtgatctatttccctgaaggagagtatgtgttgcataatgaggacgataatggtatgagagagccggaagcgggaaagacgtatgcaacagatagtaaagggaataatacaagttatagtattcctattactggcggacatttggttattaaaggtgacggtccggataagactaagttgattatggcgactcctaatttgcccggaagtacagaggtgatgtattcatctccatgtatgtttgaactgaaacataattcggatacccgcaagatgtgcactgtaacctctgacgcaaaaaaaggtacctatgtggtagaagtagatgatgcaaccggtttgaacaagggtgattgggtgtgtctgtatttaaaggataatactcctgaactggtagataaagaattgtctccatataaggcggaggcaacgatgactaatataatagagaatggtgtacagatacaggatttccatcagattatagctaaaagtggtaatcgtattacttttaaagagccgattatgcatgaagtggaagcacgttggaaatgggagattcatcggtatccgcattatgaagaagtgggagtggaggatttgtcttttgtgggacaggcaaaagatgatttcaaacatcatggcacttgggaggacgatggtgcatacaagccgttgaatatggttcgattgactaattcatggatgcggcgtgtgaagttcacaagtgtgagtgaagctacttccattatcaatagtgccaatgtgtcggcttatgatatcacgatagatggtaatcgcggacattccgctatccgttccgcaggttcttcgcgtgtgtttatcggtaaggtgacagaccgtacgaatggattgttgattgatgatagaaatacacgtgaggaaggtgccggacaatatcacgcttgcggtgtttccaaaccgagtatgggggcggttatctggcgtgtgcattgggggaaagacgcttgcttcgagtctcatgccacacaacctcgtgccacattgatagatgcttgtaagggtgggttcatgcaattccgtcagggaggtgattatgatcagttgcctaatcatttggatgatcttactatttggaatatgtattcggaaagatcccgggttgcaagtggtaattccgctccttccggagtattcgattggtggcgtatcggctttaaagggtggaaattcttgccaccgacgattgtcggttttcatggcgatccgttgaattttgtacaagagcaggtaaagcttgacgaaagtcatggtactccggtagagccggagtcattgtatgaggcacaattggaacgtcgtttgggttttgtgcctgattggctgaaagcgttgaaataggtataaagaaagctacta

SEQ ID NO: 11740 - DNA, 5466 bp, Unknown
  gut microbiota DNA sequence
agttcatcagtaaggtattcgtcagcgtccaaacgcatggtccattccgttttaacaggacaattttccattgcccaaataaattgctgtgcctgattcacatacttgttttgtaacactaccgcaccatgctcacgcgcaatgtcacaagttttatcagttgagtaactatctactacatatacctgttttgctatacgtttaacattatcaatacttcgtgcaatgtgtctttcctcattatatgtgaggattattacagaaaggtctaacatttttatttgaagttattttaacttaatgtctactttatcaaatcaaaaaaaacaccccagtcactttctcgttcttgtggcaaaggtttatatcgtttatgatttatactaaacgctactatattctttgcccaagcttcataatcatacacatcagtataaactactccatcataaccattcaacacttcataagcataatctacatcagccgccaaaaccggaagtccaaaggctgccgcttcaagtaatggcaaaccgactgtctcaatcgaactcggaaaaactaaagctgcagcagatttatagtaactcaataaattatcatgctttataataccttcaaatacgaaatttttgtctacaccattcttaactacttcattgtacattataggagctttttctgcagaacttgttacatgaatttttatatcctccgccaatgccggattttgtttacttaatattcccatggcttttgccaaagtgcaaccattacgatatttagaatcatcaccaacaaatatgaaatgtttcttattatcttcccaattataggttttacactgtgtaacatccaccttctcaacatccggaaaacatacacgaacattttccgtaggaacattaaagtatgatacaaagcgtttcttcacaataggtgtttgtacaacaaactgtgtatttttaacccatgtacgctttactatgcgaggaaaaatatgcttataattaaacagcattctttctgtacatttgagaggattgtaagctcccggatataacggcaacgactgatgaaaataaacaatctgcttacctcccccgatcttcttatatccattattctgaagtgaaaccacaacatcgggctttactcccaattttacaatttcattttgtagcaatttaccttcaaacaaaatccgttttaacttggattgtagaggaaaagatatatatgttactccctctatcgccactttcggcagcacaggattaataaatatccaatacttattttgtcctatatactttggcagatgcgataagaactgcttatatattgttatacctcccccagcttgtaaggttgtggcaattacgaaaatattcataaatattatcctctccagtgcattttaacatatctattatgtatcatatcattaccaccatgcagtataagttttgcgtcattggcatcagcaaactgcaacaggttacgagtccgcaaaccatccgcatacagttggtcaaaataattacctggtatactagaatacatagtgttgtaaccataacgtttacactcatcaagtactaattgtgaaaaataacctattgggaaacatatctcatccactgttttacccagcaattccgtgagctcctttttcgattcacaaagttcgcgtaccaactcctctttagtgaatttagttaaatcactgtggctccaagcatgacactgaaatataaaacctgctttttgaagttcaagaatttcgtctttattaagataccccggttttcctattaagcttattgcaagaaatactgttggacacaaaccattatctataaaaaactgtctggtatcataaatgccacggaatccatcgtcaaagcatatcatcacctctttatcaggattctgtattttcgcttttatgataaatccctcatcatgtatcaccttaatatgttgtgcaaacgtactaagcgaagtacccatatctgtatattttttatcgccgtacacatcgtgataatacactattttactcttcttattatggtgcaatatgctcgaaaagcataacagagttttttttattatttttctcatcgtgtagttttgtttataaaatcttccaaacatttacggtagagcgaataattccagtgattgtgcataaagttatacgcattatcagaatacttcttgtatgtatctatatttgatatttgcctcatggcatccacaagtgactgctcactatatgcatcaaaaacaaagcctgtatcgttaccatctacaagatcgtaatgtgctcccacctcgttactcactaacactggcatacccgctgccatagcctcgttaacaaccaatccccaaggttcgtaagtagaaggtaatatcaacacatgattttgacgataaacattcaatagatcgtcaccatactttggtccatcgaaaaaaacagatccatatgactcatatttctttttaagtacctcaccaaaagccccttttcccacgatatgcagttcactattttcatatttttggtgataagccagaaatgaacgaatcataaagtctatattcttacactctatcaatcgccccacatatacaaaacacattatatctgttggcttctgtttgtacttcttattatcaaaatgtacattatccaccaccatcggcattaacagaattctctcctgggccataccaaacttacgaaacaggtctttatgtgtataattaccaccagcaagaccataggtatgtttgtttccaaacactatgcttaaatatatgcgctttccccatcgtttaaacagtcctaccggttcccgatactgagtatcagagtctattccaatggatttactataccacaaattcaaaacaaacaacatcaaaaacgacaagccagtgtatccgttaaatataatagtatcatacttcttaagtatacgcctcatataacaccattgttgccatttcgataggtctgcaaacacatcctttttaccctcaccccccgtgttttttgcctcgctatcgcccaataaataacagtaatctattcccattggcacatagactttaagatttcggtctactgtataactggctggttcagcaagaaaagcaaaaaccttcatcagcctttatatttttttaaagttttacgcatatgtgaagcagcaatcttaaacagcacataccaattcccccacttggttttagatgccataaagcgatagagattttctacttggggacggaaattttgcatcttataatcatagccaccgcgaccaaaatcaacaacagagctacctatttgagatttttcaacaatatacctcacattattccacaaattgaattgtcctgatttatacaatatcacccatctcatactataagttctctgctcattcacaaatacaaaacctaaagatatcggctcaccattgtcatataggacaggtaattctaccaacccattctcataaagtttacgcataaataacctcattgtatcgtttaaatacgatgacgaacgtaaaccagaatcaatcatcaattgtataattcgatttatcacatgttccggataaggttcattggcaatattaaagattttcatattacattgaaccgatttcttgtcaagcgtaaccaaacgttttcgttctttggcatttaagtgtcgaaactcactaaaaatgctctcagacttaggacagtttaaccatgagtgttctgtttgcgaaaaaacgaaagcattaccttgaaacactttccaatacgccaaaataggagaattggaaactacattatcaagtaacagaaaccttatcaacttatcttcctctacaaatttccagacatcgttcattaaattatatatagctacaacttcttttgatataataatattacaaaagtcggtatgtctatcattaataaactttaggaatccctttccatttatgtaaaaagggaatatagcctgtaattctttatcattagtacggtatattataatataaagtttatcatttggggttgcaaacgtctcccaagcaatccaattatacttaaatgtttggaaaaatgttacatcattagcattatgaaataatgaattccattcaatctctaaagtcttgaacttatcaatagtatctattatttctatcatatttactcttgtgttattttatatttattatccacgattacattagccaaagctattaatatccacacatgcaaaaaagaaaaatcacctgcagccataatatatccctccgcaaaaagatggatacttcgccataccaataaagttatcactaacagcaattgtaatggatacctttttgcattgaacatatactttattattggttttagtgctaatatggcaaagaataatgttcctaatagtccaacagatgacaacataaacaaccaactggtaccaggttcaataccaccattggcacgcacactatcagacgacttcttaaggtcgacactagaaaatcctattcccaaaactgggttcgattcaaactctgcttttctagcattccacatatcatccctactcgaaaactgccctcccattgcattacgcgcctctgttttttcacgcactttttcagtataaggataccacacgggagatgagataaccacaagaaataaagccacaattaaatatttcatgaatttacccacattgcccaaataaaaccataaataaaagaatagtgctacaaacgtagctcccaatgcagcacgagatgcacctaaaaaacaaacaagaacagatgcaacagatgcacccaagaagccccattttttccggaaagttgtatcagggttatttgtctcatcaagaaataacttaaagcaaagtaaagatgatataccaccaatactactcattgtcatactatgattagtaaatccattaaatccggaccatccatgaaataatggaatatgcaccaagtatccaccaaacgaaattaatgtaccgactataatgaccttgtttattaaaccatacaaattccatttaaatttattcaatgaatttccttcatttaatggtccaattgccaaaatcatcaaacaaaaagaaatcaacctatattcagcctgaaatatggatggaatatcattggcaagaatagacaaaacacatgctattataaataataccattgtaacattaatccttacaccattgataatacctattaaaccaataaaagcaaaccatccgtaataagcagcctgaggtataggaagcccaatacatagtgaatttgagaatgcaatgattacagataaaattaaaataatattgctattcatttttgtgttaagtaattcataaatggctgtataagcttattt

SEQ ID NO: 11741 - DNA, 68462 bp, Unknown
  gut microbiota DNA sequence
ccctagccgatcaaggcaaacccgcccgcatcatcctaaaaatgaacgcccttcaagaccccgccatgatagaccgcctctacgaagcctccgaacacggtgtgcagacagaccttatcattcgcggaatctgctgcctcatccccgaccagccgtacagccgcaacatccgcatcacccgcatcgtagacagcttcctggaacacgcccgcatctggtacttcggcaacggcggcaatcccaaagtcttcatgggctcacccgactggatgcgccgcaacctctaccgccgcatcgaggccatcacccccgtcctcgaccccgacctgcgcaacagcctgatcgaaatgcttaccatccaactcgccgacaaccaaaaagcctgccgagtagacgcaaagctacaaaacatattcaaaaaaagaacgcccggaacccccgccatccgagcgcaatacacactatataaccggctttgttcaaataacacccagcaacccaaagaccaaccagccatgccccaataaccgccacccccaaagaccaaccagtcatctcccccaataaccgctcccatccgcatggtttcccccggcctacttttttctccgtcaagcgagctcccgtaacggagcgtaaagaagggcagactgtttgagcgaagcgagtttctgcccttcagcggagtgcaggaagcgagtaggagaaaaaagtaagccttgaatttttctttgcttctttcttttgttgcaagacaaaagaaagaagattgtaacacaaatgtaacatctatgacatttccctgcaacgtcaaattccgtcctttgccgccgaaattacatacatacatttatggagacaatttacttatgcattatcatttttctgttcgtcctcgccgtgttcgacctcatcgtcggcgtgagcaatgacgcggtcaacttcctgaactccgcggtaggcgccaaagccgcatcgttcaagaccatcctgttcatagccggtgtcggcattttcatcggcgcctccctgtccaacgggatgatggacatagcccgtcacggcatctaccagcccgagcacttctactttgccgaaatcatgtgcatcctgcttgccgtcatgctgaccgacgtagtgcttctcgacgtattcaactcaatgggcatgcccacctccaccaccgtttcactagtcttcgagctacttggaggaaccttcgccctcgcgctcatcaaagtgcacaacagcgacaccctcgcgctgggcgacctcatcaacaccgacaaagccctttccgtcatcatggcaatcttcgtatccgtagccatcgccttcttcttcggaatgcttgtgcagtggattgcccgtgtgatattcaccttcaattacactaaaaagatgaagtacagcatagccctcttcggaggcatcgccgccacctccatcatctacttcatgctcatcaaagggctgaaagacagctccttcatgacacccgaaaacaaacactggatacaggacaacaccctgctgctcatcaccgtgttcttcgtattcttcaccctgctgatgcaagtcctccactggctgaaagtcaacgtcttcaaagtagtcgtgctgatgggaaccttcgccctcgccctcgctttcgccggcaacgacctcgtcaacttcatcggtgttcccctcgccggtttctcctccttcatagactacaccgccaacggatcgggcaacccggacaacttcctgatgacctccctgctaggacccgccaaaactccgtggtacttcctgatcggagccggagcaatcatggtctacgcactctgcacctccaaaaaggcgcacgccgttatcaagacctccgtcgacctctcccgccaagacgaaggcgaagaaaccttcggaagcaccccgatagcccgtacaatcgtccgtttcagcatggcgctcgccaacggaatctcacgaatcactccgaacagcaccaagaaatggctcgacacccgcttccgcaaagacgaagccatcatagccgacggcgcagcgttcgaccttgtccgcgcctccgtcaacctcgtgctggcaggcctgctcatcgctttgggaacatcactgaaacttcccctttccaccacctacgtcaccttcatggtagctatgggaacctcactggccgaccgtgcctggggacgtgactccgccgtttaccgcatcacaggcgtactgagcgtcatcggcggctggttcatcaccgccggagccgccttcaccttctgcttcttcgtcgccctcgtacttcactacggaggaaacatttccatcatcgtcctcatcggcatcgccgtgttcatcctgatacgcagccaagtgatgtacaagaaacgcaaagcgaaagagcaaggcaacgagaccctgaaacaactgatgcagaccaccgacagcgaagaagctctgcaactgatgcgcaagcacacccgcgaagagctcggcaaggtgttggaatacgcggaaacgaatttcgagctcaccgtcacctccttcctccacgagaacctgcggggattgcgtcgcgcgatgggctccaccaaattcgagaagcagctcgtcaagcagatgaagcgtaccggaaccgtcgctatgtgccgtctcgacaacaacaccgtgctcgaaaaagggctttactactaccagggcaacgacttcgccagcgaactggtgtacagcatttcacgtctctgcgaaccgtgcctggagcacatcgacaacaacttcaacccattggacgctatccaaaaaggcgaattcagcgacgcggccgaagacatcacttacctgatccagcaatgtcgcagaaaactggaaaacaacgattacaataacatggaagaagaaatccgccgtgccaacgaccttaacggacaactctcgctgctgaaacgcaaggaactgcagcgcatccaaagccagtcgggaagtatccgcgtcagcatggtatacctgacgatggttcaggaagcccaaaacgtggtgacttacaccatcaatctaatgaaagtaagccgtaagttccagatcgagaccgactgatctgatttccccacaaaaaaatccccccttaccattccttaatatcacaacggactaaggtaatagtaagggggatttttcatctcttcacttacaaataataagcgagccagcttcatttttccacaatttccacaaacagcaatctactctttacggcgtctgcggaaacgcaatattgcctcaagaatgtcaagcaatttttccaacaacaatttcataagcttctgtttttaaatttttttttcaatccggtctcttaaaatcctctcttaaaatccagtcttaaaatccagtctcttaaagtccgtttcctcattattcagacggatccggagcttctccgctaccgtttccgccatccggtttctttccgtcgtccggatcttcacctgaatcatcggcagcgacaaacgagcccgccacatccttgacgtgtacaaattccactccggaagtcagcgcacgggtagcgcttccgttcgcctcacgtgtatactccggtgtaaactgacaacgcaacgaagtaatctgcgcgctgctgactttactttcaagctccacccctttcccgttcgccttagcgatcatggtaaacgttcccaagccttcgaggcgtaccgtgcggctattaagcaactgttcccgcatcacggacatcagattacgaatcacattatggacatcacccgccgtcagcgaggctttttccgcaatcaattccgccattttctgcgtattgactgccttcccgaatttcaccagacggggataatacaatttctgtccttccttgttggcaagcgttgcctgataaggtttgtaaattaatggcatactgtttccttttttttaatgattgataaattaaattcctctctgtaaccgattacgaaagcaaaggtaaccggaaggaaaaaaaacgtgaaccataacgtaccgacctgtcacaagagacagcaacccggcacgagtccgcacaaaccatgcccacaaccgcttctgcacaacacatcaccaatcagcctaaaaagccttacctttacaaacatagaatctgataaaaccccttaaaagacaaccgacaatgaaagcagaaacatccccttccatccgcatccggacttatagcaaaagccagttagcgtccttctacctgcccgatatacaaaccgcctcagcacgccgcaccctgcgggggtggatagccaaaaatacagaattgcaggctgcactcgcccaaacgggatacagcgagaaatccatcctgcttactccggcacaagtagggttgtttttccgttttttaggagaaccttgattcactttttcttatttgtttttttcctatctgttttattcttatctgttttattcttttccgcctcttccttcttcatctcctcccaatcttcaacagatataattttatcctcaaagagttcgatatccattaccagatggtgccggtttataacccggcacttcactttcgccgaatctttcagtaaaaggcatacaaccgcacacagtaatccgggaagggctacaacgattttagcctttttgaggacacacgcgctaatattaaataacgtcgtaaaatcgggtattgaagtactgccatcccagacgcaactgaacacacgtctcaccgaagaagtcgaactatttgaattatttacaatataacattccggtatatcattctgcttatctattttcaccaaatagtccacaatctctttttttgtgctatcatcgcaatgccgaagtccggttaccttacagattgcatcactattacttgtcacttccgaccctctttttaccaatttctttgccattttcctattgtattaattaaaaatttccacaaagaacggctatttctcttaacattcatgttcacgcttgacacattcttctttaattcctcatttatgtgtcaagctcggacaatctttcccctttccattccctacttttgccccataatcaaaataaaccgaagaacaatgaccaagattaaagaagagcattcttttcaacgggtgcggctcatgaaacaggcagccgccatccggcaaaacaatggtatgaaccggcacgacgcactcgtcaccgcccaccggataggcgccctcatccggcagatgcatcacggaaatgtccgcttccactacaccagacaagacggcagcgtccgccacgccatcggcacactcaccggatacgaacacagtttccaccaaccttatattccacgaccggaaaacacgttcgtcgtctactacgacatcgaggcaaaaggatggcgcacgttccatgcggaaaactttctggacatcgacgccgaggacgaacccgaaaagacgagaacagaatgaaccggcaggaacgagaagaatgggaaatcctttgcaggcagtacaatgtagactccctgcaagaagccattcaaggctgccgggaagaactggagtttcttatccattgcgccgaaaggctcgaaccccgcacggaggaggaagaaacgccgtttaacatatccagtccacgccgtttctatacaccgggaaacgccgttcttggaatgcaggaaacgccgtttctccacgcggagacaaaagaacagaccgttttttaacagaatataattttattaacgtttaccaatatcaagtatggaaaattggagatttatcgaagaaaatcccgactacatggtctcggaccatggacgggtgttgagttttaaaggcaagtcgaaactgattctctgcaccacgatcgcaggagaaggctacgagcagacagagctcatgcaaaaaggaatctacaccaaatactacacgcatcgtctggtagctaaggcgttcattcccaacccgaaacatctgccgcaagtaaaccacctcgacggaaacacgctgaacaaccacgtgtcgaacctcgaatggtgtgacgcacatgacaacataatgcacgccatccgaatgggattgcggcctcccggaaaaacgggttcaaagtattcgggtgttccctgcgccgtaacggacgcaagtggaaatacactccgcgcctacccgtccatgcaggcgatgagcaaaggagaacacatgaatcccgcattcataaactggctcagactacagttgcgctatccggaacgactactcctccacaacttacgcgtccgccagcacagaggagacgcttttatcatgaaagaacccttaccgttgtctcccgctcaggctgttccgcagtcgtcccatcatcggcctgtcccgcctgtacaatccccctgcatcccggtccagcatccggtgaaccggcaatattaccgccaactgtcggaagacgaagccatcgctttcggattcgccatctacacaagccgcaaccaacaagaaaggaggacgctgtaatgagagacacgattatcatccactgttccgccacccgtgcgggacaggatttcacagccgccgacatcgaccgctggcaccgtgcgcgcggtttccgttccatcggctatcatttcgtaatccggctcgacggaaccatcgaaccgggaagggatgtctccctcgacggagcgcattgcacgggctggaaccgccgaagcataggtatctgctacgtgggcgggctggacaaggaaggccgtcccgccgacacccggacggaagcccaacgcaaagcgctcatccgcctggtggaagacctgcggctcgtttaccccgacatcagacaagtgataggccaccgggacaccagccccgaccgcaacggtgacggcattatctcgcccaacgagtttatcaagatgtgcccctgcttcgacgtacgcaacgagttccgataaaccgcacaatgtatcactttttaaaacttaatttatcatggcacgcatttccaaacccggattagattatttccccctagatgtcaatttcctgcaagaccggaaagtgcgccgcatctcctgccgccatcacgcggcaggaattgccgcgctcacttccctgctttgtcttatctacaaagaaaaaggctattatgtcctttggaacaaggacacaatgttcgacatcgctcaggaagcctgttgcgaggaggaggaaatgcaggccatcatcgacgattgtctgtcggtgggattgttcgacacctatatatataaggagtacggggtgctgacctcgcaagccatccaagagcagtatcacaaaatcatcatcgacagccggaggaaatacaaattgcctttggaaaacttctggatgatcaaggaggagaaagaagcgaatgataacgaggaggaaacagaggagagaaaagagacaaaggagacaaagggggaaaacggaggacagacgaatgaatccgcagtaagttcgaacaaattcgcagcaagttcgggcaaacttgcagcagatccgggcaaatttgcagcaacaatgccacaaacaaaacaagaaacggatacagatattaaaagtaaacaggaaatggagagggaaaatgaaagcaaatcggaaacccgaaaagacaaagagacagagagggaagggaaaatgagaaaggagagcgagaagccgcccgttccgccaaacggcgtttctcaggcttcgcctgttgctgtaaggggtttgtctttaggggattcgtccggaggggacttcgaagctatactacgactaaatatggaagctatcggcatccggaacgaacagaccgccaaagccattttcgcccttgcccgacgaaaagaactgggaggaatcaacggcacgctatggaaaatcctcagtcccggataccgccctaccctgctcaaaaagaacgaaccgggagattacatcctttgggcactcaatcacccggccgaatttgaaagcacttacaacggaatgctacaaaaaatggtgaggggaagaagctgaaataataaaaagtcacccatttagcggaatcaatgatattttattatcaaaacaaacacttacaacactttccttatgacacaccaaataatctaaaagcaagcaaacaacccatatgacatttcaaaatcccatatcaataccggaatccactttcaatatgacagtatttagttaaaaacgcattacttttcttagtttattataatttatattatctttgcagcctgttagagagaaatgatgtgtttttaggttaaaattaagagagaatttatgaaaagaaaattgatgttcttcatgaccttcctatttataggcataggtctggcgacagcgcagacatccaaagtgaccggattggtaacatccgaagaagatggacagcctgtcgtaggtgcttcagtattagtcaatggcaccactcttggtacaatcaccgatattgacggtaaatttacaatcagcaacgtaccaagctcctccaaaaccttacgtgtttcttatgtgggaatgctcccccaggaagtgacaatcaaggaagggattttaaaaatcgtgctgcgttcggacgcgaaggcgctggacgaggtggtcgttaccgccttaggtatcaaaagaagcgagaaaatactaggttatgccgcttctacagtgaaaaatgacgatttggtcgcagccaagtcaggttccgtgatgtccggactttccggaaaaatagccggtgtaaacatttccagctccggaacggccggtagctcacagaaagtaatcgtgcgcggttattcctctttctccagcaaccagccgctatacgtcatcgacggcgtgccgatgtccaacaacaccagcctctccaacgaccagggcaacggtgtcattgccgccagcgacgctatcgacttcggtaacggggcaaacgacatcaaccccgacgacgtggaatccgtcaccgtgctgaaaggcgcctcagccaccgccctctacggctcgcgcgccgccaacggtgtagtgatgatcaccaccaaacgcgccaaacaagagaaactgaccgtttcgtacgacggctctttcatggcttccaacgtgctccgcgtgccgcaggaacaggacaagttcggacaaggatggggaacgtggaacagaggcgagaacggatcgtggggaccggcattggacggccggctcaacgaatggggctccagcaaactgactaccccgatgaaaaagcactactcgttcgtgaaagacaatctccgcaacttctacaccaccggattcgagatgaacaacaacatcagcgtccgcaccggtaacgaaaagatgggcttgatgctttcttacggcaacacctcctctaacggcgtgctgcccaacaatgccgacaaatacgaacgtaacaccctgtcgttccgtggcaacatgaaattcggcaagttcgccgccgacgccagcatcacgtatatccgcaaagacatgacgaaagccgccgccggacaaggaaacgcgggagccaccatgcagcaggaactgatacagcacccggtggacatcgactattctgtcatgaaggatttcaacgacgaacggttcaacggagacaactattacacgtggtacgcgcagaacccttactgggtactcgccaacaataagaacaactatcaggacgaccgcatctacggtaaactggaattgtcttacgaggtcattcccggtctgaaggccgtaggacgtctcggaggtgacttcaccaacgcccgccagaagctgcgcacggcgaaactgacgtacgccgacaattcatacagcagcatcggaggcaaatccgaagaaaagggtacttataccgaacgtaccgataattacgaccagatcgacgcaaccctcttcctgagcgccaactacaatatcggcacagacatcactctcggaggtacggcaggatggaacctcaaccaacggaaatcgtcttatctgaagtcgtttctcgaagggctgttcatggaaggatggtacaatctgcagaacgggaccgacaagcccgtcagcaccaattacagcgatttgcgcagaacaatcggagccttcgcacaggtggaattcgggtataagaatttctggtttgtcaacctttccggacgcaacgactggtcgtctacactgcccatccaccacaacagtttcttctacggaggaatcaacacgtccgtcatcctgaccgatatgttcccctcgctgaaaaacaacgtgatagacttcctgaaagtgcgcgccgcatggggacagacgggtaacgacgccgacgtgtacagaacgctggcatactacatccccgatcatatttcatccggctacggctatctggacactccgttgaacggggcgctgggactgaccgaatacaaccgccagcccaacaacaacctgaaaccggagaagacttccgaatgggaattgggcttgaccgccaacttcctcagcaaccgcatcggcattgacttcgcctactacgacaagctgaccaaaaaccagatcatcgcggcagacgtcgccccggaaacacgctacaccagtgccgtgcgcaacgttggcgaaatttccaacaaaggtatcgaaatcgccctcaacctgactccgatccgcaccaaagaggtggaatgggacttgggagtcaccttcagcaagaactggagcaaggtgaacaagttgtggaacgagggggacaagcctgtgaccgaatacgtattgaaaacggcttacagcgccaacttcgttgccaaagtcggcgaaccgctcggaatcttccaagtgcccgccctcgctaccgtacaggacgagaacagcccttactacggcaaagtgattgtcgacgccaacggtatcccgactaccagcaacagcgaaatgaagacgatcggttcgtccgctcccgacttcaatatgggtttcaacacccgcgtgagctacaaaggattcaccctttctgctgtggccgactggcgtaaaggcggttatatgtactcctacaccgcacaactgatgcacttcgtcggcaacactacccgctcgctgttcaacaaccgcgaaccgttcgtcgtgcccaactccgtaatcgccctcaaggacggaggctacgccgaaaacaaccgtcccgtgaccagcgacaacatgagcagttattacagcgactcttactcagacagccagttcgagaacttcatcatcccgaaaggttatgtgaaactgagggaactggtcttgtcttactcattcccgaaagcatggatttccaaactgggtatccagcagctagacctgagcctgatcggacgcaacctctttatgtggactccgaaagctaacaattacgtagacccggaaaccacaactttcggtaacgatatcgcttccgaactgggagaatttgccgccttgccttctacgcgcaatataggtggaggtattaaagttgtattctaaaaaaaaacgatcgaagatgaaaaaattcaagtatttatatataggtgtattaagcgccatcctgtccggcacgttcacctcttgcgaggactatctggacgtcaacaaaaatccgaattatccggacgaatcacaagtgacggtaacgacgttactgccgtccgcattcaccggctcggctgccgcaatggggtatttgtaccaactctacggttctatgtggtcacagcactacacgcagaatccgtcatccagccaatatatcacgctggtcaactatgcgatgacttcttccagcgacctccgtctgtggagaattccgtacgcggacgttttgcctgatctcgatctcgtcatcaagaaatcggaagaggaaggtgcgtggaactattgggtggtcggaaaaatcatgaccgcgtttacttatcacgtgctcaccgacgcttatggagatattcctttcaccgaagctctgaaaggtcagaactgcaaatacgacgatagtaaaacggtggtttatcccggcattatcaaaatgctggacgacgcaatcgacaaggaagcggaagcctctgccaaaggtctgaaaaccatgaacgtggaagattatatctatgacggggatatcgcgaaatggatcagatttgccaaaactttaaagttgaagttgctcatgagagactttgacacgaacaaggcggagatacaaacaatgctcgctgccggtgattttctgaaagacgacgcaacggtacactgtttcgaggatgtcgtaaataagtccaatccgttctatgaaaatgaccgccgacagttgaatacgacaaataatgtacgcgcctgtacgacgttgtataactatctagccgaatatgaagatccgcgcatcggagacttttacgagaagactgccgcatctgacagaaccgaatacagagcgattccttatggaaacagaacttccagcgcatatagcatttcaacaacttcgcgtgccgtaatcggtgctaccgatcctgtttattatatgtcagcggccgaagccgaatacctgttggcggaatgctacgcacgactgggagacaaaggcagcgccaagactcattatgacaaagccgttgaattttctttcgccagatggaaccatggcgacaaagctgctgaatttattgcagttggaaaaccttacgaattccaagacaccgacgaagaaagtatgctgaaatgtatccttacccagaaatggattgccagcacccgttgccaggcttgggatgcatggttcgatatcaaccgcaccggtattccggaagtcagcgagtatacaacagacggtgatccggatgattacgttttgggtacgctggcatataaccccaacagttcgttagctaagggtcagtttgctcaccgcttcatctactcaaaagagtcgttggactataatacgaatgcgcctacgaaagttccggcaattaccgaacctctgtggtggcataaaaaataataaggatattgaacaatagaaagaaaggatatatacatgaaacctattaattatttattagtcctgatgttcgcaatggtcactttcgtgtcatgcgacacttatggagactatgagcaggagtttgcccctatatacccgctaagcggacaatattacgtcaaagtgctggacgagaacaatgaggaactggttataagcacaacaaaggacgatgacgaatcatacaacgtctacggaacttatctgtatctgtacaatacagcagataatgataaggacaagttgtggatcaagttgccgaatacaagccttttcaaacaaggtattctaggcaaaatcagttgtaatgtggaagaactcacctttaacggaacagcaggcaatatggttgccgatggaacgactcccgtaggggaatttacagtcacttccggaaaagtcactttagaaagcgttacgactccgacaaacgggaaagcggacggcatcgaagtgaaatatacgctggaaggcaaaacgtacaccatcaaaggcttccgccgcaccggatgggatgacgatgaaacgtgggttgagcctattactactcccgacgatacatccggctctcagccataagaactaatttctcccctcctctttctcccctcctcaaaaaagggggggggatatatcaaaacgcagattaacgcaagttagcatagattattcaaacaggctccaagtcttgactaattcatttcaattgatatattaatcaacgacttatagaatcttttctatgataatttgcgttaatctgcgttttattattcatttaccactgcaagtcgggcagatatttacttagtgtaccacgaagaacccctagcgtaatcggcttcaccagcacttccgtagctcccgccttcatcgcattttccttatccgaactgaaagcgtaggcagtctgcatgataatgggaatcgtagtgttggactcacgaataattttcgtcgcttccaacccattcatcaacggcattttaatgtccatcaacatcgctttggcattttcgccgtgtgtttgaaataaatttaccatttcttctccgttccgcgcccacaggatatcacattttttacctatgatcgctttaatcagtttaaagttgctgtcgtcgtcttcagccacaagtataagcggtctgaattcagatgtttgcgtactttccatattatttagtatattattttccatctacatccttctatatacttaagttaatatcctgtctcaacaagttaatatcttatttcaacaagttaatatcttatttcaacaagttaatatcctatttcagcccgcaagatataaaaaatattcatatatttcgctatctttgcgcctcaatttaaaagaataatatgatttctgtagacggactggccgtagaatttggcggcacgactttatttagtgatatctctttcgttattaatgaaaaagaccgcatcgccctgatggggaaaaacggggcgggaaaaagtacactgctcaagattctggcaggcgtgaggcaacctacacgcggcaaggtctctgcaccgaaagagtgcgtggtggcctatctgccccaacacttgatgacggaggacggacgcacggtgttcgacgaaacggcacaggctttcgcgcatctgcacgagatggaagcgcaaatcgagaaactgaacaaggagttggagacacggacggactacgaaagcgacagttatatggctctgatcgaggaagtatcctccctgagcgagaagtattattcaatcgacgccacgaactacgaggaggatgtagagaaagcgttgctcggactcggtttccgccgggaagacttcggacgtcagacgagtgatttcagtggcggatggcggatgcgcatcgagttggcgaagttactgttgcagaaaccggacgtgctgctgcttgacgagccgacgaaccatctcgacatcgagtctatccaatggctggaagatttcctgatcaataacggcaaggcggtgattgtcatcagccacgaccgcaagtttgtcgacaacatcacgacccgcaccatcgaagtgacgatggggcgcatctacgactacaaagtaaactactcacaatacctccaactgcgcaaggaacgccgcgaacagcaacagaaggcgtacgatgagcagcagaagttcatcgccgagacgaaggagttcatcgaacgtttcaaggggacgtactcgaagaccttgcaggtacagagccgtgtgaaaatgctggagaaactggaactgctggaggtggacgaagaggacacttccgctttgcgtctgaaatttccgccttccccccgttcgggcagttatccggtcatcatggagaatgttgggaaaacgtatggagagaaggtggtgttcaagggcgccaatctgacgattgagcgcggagacaaggtggcgttcgtcggcaagaacggcgagggtaagtctacgcttgtcaaatgtatcatgcgggaaatagagcacgatggcacgctgacgctgggacataatgtacaaatcgggtattttgcacagaatcaggcttcactgatggacgagaatctaactgtgttccagacgattgacgacgtagcgaaaggggaaatccggaacaagatccgcgacttgctgggtgctttcatgtttggcggtccggaggagtcgatgaagaaagtgaaagtgctttcgggtggagaacgtacccgcctggcaatgatcaagctattgctggagccggtcaaccttctcatcctggacgagccgacgaatcacctcgacatgaaaacaaaggacatcctgaaacaggcgttgctcgattttgacggcacgctgattgtcgtttcgcacgaccgtgatttcctcgacggactggtatcaaaggtttatgagtttggcaatcagaaggtgacggaacacctatgcggtatctatgaattcctcgaaaagaaaaagatggattcgttgcaagagctggaaaagaaataataaataataaaaagaagggggcggattccgggagaagataaagaatttgtatctttgcgcaggatgaaagggaaaaaaagaatcatagtaactctgctgttttttatcaacattatcatgttggtggcagccgttattccccatcatcaccaccctaacggaatgatttgcatgaagcaggacttgcccgtagagcaacaatgccccaagcaccatcatcatccggagagcgacgcctgttgcaacagcgagtgtctgacacgctttcagtcgtccatcccatccatacacagctatagcagtccggattatgtatttatcgctacgctgttcaccgatgtcattatcgaacatttactacgcccgcaggagaaacgggtaaagaactattacgtcttccgagactctctgcatagcacggatttctaccgtgccacctcgcttcgcgcacctccctactctgttttcgcttaaaaacgctcttgcaagtcagttgcaaaggcgttgtagctaatctttgcaagccagttgcaagaaccttgccgtatttttgcagtatgaatctgcaacaacaaaaagaaaacaaaaaacttaagtaggaaatatcatttatgaagaaacttatttttttcggagtgctgggtttatttatccttgcctcttgtaatagtaccgtcacacatacacacaacgagcatgatcatgaggcggaaggacataatcatgccacagaagatcacgaccacagcgcccacggggatgaatccggtgaagggcacagtcacgaaacagcaggcagccacctcgaaacgaccgaagcacatagtgacgagatcatccttccgaaagtgaaagccgaagcagccggagtaaaggctagtatcatcgagcccgctcctttccaacaggtcattaaaaccagtggacaagtacttgctgctcagggggacgaatcggttgccgtagctaccgtagctggcgttgtttcttttcgtggaaaagtgacggaaggaatgagcgtcggcagcggcacaccgttggtcaccatttcttcaaacaatatagccgacggtgacccggtgcaacgtgcccgcatcgcctacgaggtgtcgaaaaaagagtacgaacggatgaaagcccttgtcaaaaacaaaatcgtatccgacaaggagtttgcacaggcggagcagaattacgagaacgcccgcatcagctacgaggccctttcgaagaaccattcggctatcggacaaaatatcacagctcccatcgcaggctatgtgaaaagtatactggtgaaagagggggactacgtgaccatcggacaaccactggttagcgtgacgcagaaccgccgtctgttcctccgcgccgaagtgtcggaaaagtactacccgtacctccgcacaatcagctccgccaatttccagactccttataataataaggtatacgaactgcaagcgctcaacggcaaactcctctctttcgggaaaactgccggagacaattctttctacgtgcctgtcaccttcgagttcgataacaaaggtgaagtgattcccggctcattcgtagaggttttcctgctctcgtcgccaatggaaaacgtaatttcccttccacgcaccgcattgacggaggaacaaggaagctactttgtatatctgcaactggatgaggaagggtacaagaaacaggaagtgaccgtaggagccgacaacggaaaaaatgtccagatcctgtccggcgtgaaagcgggcgaccgcgttgtgaccgaaggagcgtaccaggtaagactggccagtgcaagcaatgccatccccgcacacagccatgaacactgattaaatgaagaatgaatcttcatccttaattcctcattcataattcttaatttaaaaagatgcttaataaaatcatacattattccctgcacaaccggttgctggtgctctgcgcttccattcttctgctcattgcggggagctatactgccatgcacacggaagtagacgtgtttcccgacctcaacgcgcctacggttgtcatcatgaccgaagccaatggtatggccgccgaagaggttgaacaactcgtgactttccctgtggaaactgccgtaaacggagctaccggcgtacgccgtgtccgttcttcttccaccaatggtttttctgttgtctgggtggaattcgactggggaacagatatttatcttgcccggcagattgtgagtgaaaagctcgctgtagtcagtgaatcgcttccggtcaacgttggaaaaccgacactcggcccgcaatcttctattctgggcgaaatgctcattgtcgggctgacggccgactctacctccatgctcgacctccgtacgattgccgactggactatccgtccgcgtctgctgtctaccggaggagtggcgcaagtagcggtgctcggaggagacatcaaagagtaccagattcagcttgatcccgagcggatgcgtcactacggcgtttcgatgggtgaggtgatggcggtgacgcaagacatgaacctgaacgccaacggcggagtgctttacgaattcggaaatgaatatatagtgcgaggcgtgctttccaccactcagacggaacagctcggcaaggcggtggtaaagacggtgaacaactttcctgtcactctggaagatatagcagacgtggcaataggccccaaagcacccaaattgggtacggcttcggaacggggaaaacctgccgtcctgctgactgtgaccaagcagcccgccaccagtacactggaactgacggacaagctggaggcttcgctaaaagaccttcagaagaacctgccaccggatgtaaaggtttctacggacattttccgccaaagccgcttcatcgaaagttctatcggcaacgtgaagaaatcgctctttgagggaggtatctttgtcgttatcgttctgttcttgtttctggcaaatgtgcgcactacgcttatttcgctggtaacactgcctctctcactgctcgtttcggtcctgacactgcattatatgggactgactatcaacactatgagtctcggaggtatggcaatcgccatcggttcgctggtggacgatgccatcgttgatgtggagaacgtatacaagcgcttgcgtgaaaaccggctgaaagcggaagcggaaagattgagcacgctcgaagtggtgttcaacgcctcgaaggaggttcgtatgccgattttgaactcaactttaattattgtagtcagtttcgttcccttatttttcctgagtggcatggaaggtcgaatgctggtcccactgggtattgctttcatcgtggcgttattcgcctcgacggtggtagcattgacactgactccggtgctctgctcttatctgttgggaagcaacaagacgaacaaggaactgaaagagtctttcgtagcccgttggatgaaagggatttatgaaaaggcactgtcttgggtgctggcgcacaaacgggtgacactgggtggaactatcgctctcttcatcgtggcgctcggtgtgttcttcacgctgggacgtagcttcctcccttctttcaacgaaggttcgttcacaatcaatatcagttctctgccgggtatctcgctggaagagagcaacaaaatgggacagcgcgcggaagagttgctgctgaccattccggagatacaaaccgttgcccgcaaaacgggacgtgccgaactggatgagcacgcattgggtgtgaacgtgtccgaaattgaggctccgtttgaactgggcgaccgctcgcgcagcgaactggtggcggatgtacgtgaaaagctgggcacaattacaggagcaaacattgaaatcggacagccgatcagccaccggattgacgccatgttgtccggtacgaaagcaaatattgccatcaagctattcggcgacgacctgaacaagatgttttccatcggcaatcagatcaaagaggcgatcggcgcaattcccggcatcgccgacctgaatgtggaacagcagatcgaacgtccgcagttaaaaatacagcccaaacgcgaaatgctggccaagttcggaatcacactgccggagttttccgagtacgtgaatgtcgctctggcgggaaaagtgatctcgcaggtgtacgaacaaggcaagagtttcgacctgattgtgaaggtgaagaacgacgcccgtgacgagatggagaaaatccgcaacttgatggtggacacgaacgacggacgcaaagtccccctaagctatgtggcggaagtgacatcggctatgggacctaacaccatcaaccgtgagaacgtgaaacggaaaatcgtgatttccgccaacgttgccgaccgcgacttgcgcagtgtggtaaacgacatccggaagcagatcgacgcatccgtgcaattgcccgaaggctaccacatcgaatacggcgggcagtttgagagcgagcaggcggcgagcaggacattagcgctgacttcatttatcagtatcgttgtgatttttctattgctttatcatgagttccgcagcgtcaaggagtcgggagttatcctgctgaacctgccgctcgcgttgatcggtggcgttttcgcattggtacttacaacgggggaagttagtatacccgctatcatcggattcatctctctgttcggaattgctacccgtaacggtatgctgctcatcagccattacaatcatctccaacaagtggaggggctgaacgtgtacgacagcgtgatgcaaggctcgctcgaccgtctgaacccgatcctgatgacggctttgtcttctgctctggcattgattcctctggctctgggaggtgatcttccgggcaacgagattcagagtccgatggcaaaagtgattctgggaggcttgttaacttctactttcctgaacggattcatcgtcccgattgtttatctgatgatgcaccgcaagaaggcttcagcaagtctgtaattgcaatttacaaccaataaagaagatgaaaatgaaacaaatcataactatcggcgcggcacttctgctcctgaacgcaggcagtgcacaagcccagaacagcattgagcaggttttgagaaatatcgaaacgaacaacaaggagctgcaggctaacaagcagctgattcagtcgcaaaagctggaggctagaacggacaacaatctgcccgatcctacgctttcctatgcacacctctggggctcgaaagataaaagtgaaacaatcggtgagctggtggtttcgcagagcttcgacttccccagcttatacgccacgcgcaacaagctgaaccgtctgaaaatcggagcttacgacagccaggcggatgtcttccggcaggagaagttattgcaggcaaaggaactttgcctggacatcattatgcttcgccagcagaagcagattttagaagaacgcctgcgcaatgcggaagaacttgctaaaatgtacgccaaacgcctgcagacaggagatgccaatgcgctcgaaacgaacaagatcaatctggagttgctgaatgtcaagacggaagtgtctctgaacgaaacggcgctgcgcaataaattgcaggaattgagtacgttgaacggaaatcttccagttgttttcgaggagagccaatacccggccgtgcctttcccgactgattatcagatactgaaatcggaggtgttatcgacggaccgcacgttgatggcgcttggcaacgagagcctcgtcgcccgcaaacaaattgctgtcaacaagtcgcaatggttgccgaaactggaactgggctaccgccggaacacggaatcgggtactcctttcaacggcctagtggtgggattctctttccctctttttgaaaaccggaacaaggtgaagattgccaaagcacaggctctgaacatcgatctgcaaagggataatgccgccttgcaggtagaatccgaactggcacagctttaccgggaagccaaaacgcttcatgcttctatggaggagtacacgaggactttccggtcgcaacaagatcttgccttgctcaaacaggccttgaccggaggacaaatcagcatgattgagtactttgtggaggtgtccgtgctctatcagagccaccagaattatctgcaactggaaaatcaataccagaaggcaatggcgcggatctacaagagcaaattataaatataaaaggtatttatctacttatgaaagtaaacaggataagatttatcgagctgatcttatcctgttttttttaattgtgccgagaaatttacagtatccgaagttcctccggcagatagccgctacgaatgcgccattcctgcggataaagattgttagcccggttgccgatatttttcacgaagcccaacgggacgcctctataagtaagcaacacgaacccgcgagccaccgcagcaggaagtacaatagcttctttgcgcaaataagctatcgcctgctcatagctaatgtcctcaacggcaaaagcgccgtcacgcaacagcacagggcacagtgccagcgcatgagcgggaaccaaatctcgccctttcacttcacccaccgacacaccggactggatcactttcaaattctgtcgaagtgcttccaactcttccagacgagcattgggaaaggcgtaaacggtttccgcatcggtcagaagagaatagttgccgatgtccctcacccaactccgggctacgtccatcaattctttagcgacaggcgggactcctttcccagcgtgtttcccttttttctttgcagctcgcgctatcgtagattttgagattgcagacttctgtgaattgatggtttcccatgccttcttcgtttcgttgtcatctgtttctatgcacggtttccgaagaacagccagaaagaatccctctcctttcgttttatgggggaagaagtgatagacgggaatgccctccaaatgaacggtcccggtcgattcatctttcaacagatttcctgttatattccattcttcccgaacttccaacggcagcagttccgccccgaactcttgctgaatccagcgtacgttttcttcatcttcttttgtattaaaggtacaggtactatatataagaatgcctccgggcttcagacaaggccaaatatcagcaataatcctccgctgtctctgccagcaaatctctacattctccggggtccattcttctatcgccacagggtctttgcggaacattccttcaccggaacaaggaacgtcggtgagaattacatcaaaaaaagacggtaaagccgagaaatccgccggatcattattagtaaccaccacatccggatgtccccacttcgcaagattttccgccaaaacctgtgaacggtttcgtatgacttcattagccaccagcaggcttccttcgggcagcacgctacgggcatgggtagactttccaccgggagcggcgcaaagatccaacattattgccggttctttgatgtattggcgtaatgcctgctctacaaacatcgaggaggcctcctgaacatagaaacaaccggcatgaaacaacggatcgaatgtaaaagtcaggcgttcgtccagataaaccccttcggacgaccaaggaactcggtcgaaaggagaatggacagcagataacccttcatcctgcactttccatttttcattgttaaagcggatactgacaggtggttcttgctgcagggcaacggccagtttttcatattcttcttcacctaataaagagcgggtatagtctacaaaagaagcgggtaattccatttttcatttattaatttccgcaaatatcaaaaatatttcgtctctttgcaactttctaagtcattaactacgtctaacaaacaaagaaacaaattaaaaaacgatctatatgaaaaattttctacttgctttgatggttgtattgaccacttgcacactggctgtcgctcaaaatcagaatcctgttgcccacgactccatcagtcaggcggaaccgactctggtagttgacacagacacaaccgactctatcgccaaagagaatgttactgctacggacacaagtaatcatagcgttctgtacagcctatccaatgcgatggaggatgttctgattcctatcatcgcaatcattgcagtcttcggttttccggtgtttatcctattcatcattttcttcttccgctacaagaaccggaaagcccgctatcgccttgtcgaacaggctcttgctgccggacaaccgcttccggaagatttcctcaaggaggacaagccgaatgatccgcgtacgcaaggcatcaaaaacatctttacgggaatcggacttttcatcttcctctgggctattaccggtgaattttcaatcggcactatcggtctgctaatcactttcatgggaatcggaaagtggatcatcggtagaaagaaagatgaaaatcaagagaatgacagtcaaagatgaatcaactcaatgatatatcgctagtcgcgcaggtcgtggtgttcagaaacactaaggccttcgaccagttggtgaagaagtaccaatcaccggtccggcggttcttcctgaatctgacttgcggagacagcgaattgagtgacgacctggcacaagacacgtttatcaaagcgtatacaaatattgcttctttcagaaatttgtccagcttctccacgtggctgtatcgaattgcttacaatatattttatgattatattcgcagccgcaaagaaacagcagaccttgacgccagagaaatagacgccgccaacagtgccgaacaggaaaacatcggtcaaaagatggatatctaccgatcgctcaagacgcttaaagaaatagaaagaacctgcatcacacttttttatatggaagatttaagtatcgaaaagattgcgggaattacaggaataccgacaggaacggtgaaaagccatctgtcgcgtggaaaagaaaagttagcaacgtatttaaaacaaaacggttatgacaaaaattgaaaatgacgagaagcttttgaaggatttcttcacggctaacaaacaggaaatagctgataatggcttcagccgccgtgtcatgcatcgcttgcccgatcgtagcaattggttggcacgcatctggaacgctgccgtggtggttgcgggcgctgtgcttttcatttggatgggcggcttggaagctgcttggggaacaatcagagaagtgttcataagcatgattaatcaaggcactgcggagctggatccgaaatcgattattatcgcctctgtcgtcctggtatttatggcaacacgaaaagttgcatcgatggcataaaagttatcaatagcataagagttataaaagcacttcgtctgttaaacaataataaatataccctttctctcaaacaagcccaaacatagatgtcgtatctttgttgaactgtaaaactaaaatagagagaaaagttttgaaattacgtatatttattttattcctgttcctgtctttattacacgctcaggcagacatcatagacagtctaaaaacacaacccagagactcgatcggacttgcaagtgactcacttgtattacgttttctggaagagtccggcatacccatttccgacaacaataaagtaaagttactgaaaagcggacgggaaaagtttatcgatttattcgaagctatccgagaagccaaacatcatattcatctggaatactttaacttccgcaacgattccatcgccaatgccctattcgacttgctggctcagaaagtgaaagagggggttgaggtacgtgctatgttcgatgcttttggcaactggtctaacaacaaacctctgaaaaagaaacatctcaagaaaatacgtgagcagggcattgaaattgtaaagttcgatccgttcacattcccttatatcaaccacgctgcccaccgcgaccatcggaaaatagctgtcattgatgggaaaatagcttatacgggaggcatgaatatagcagattactatatcaacggtctgcctaaaatagggacctggcgtgatatgcatatgcgcatagagggagacgcggtcaatgacttacaggaaatcttcctgacaatctggaacaaagagaccaaacaaaatgtaggaggagctgcctactttccactccacgagagcaagacggatagtaccgacatcattgtcgcaatcgttgaccgtactccgaaaaagaacagccgaatgctgagccacgcgtatgcgatgagtatttattcggcacaaaaaaacgttcacatcgtaaatccttacttcgtgccgacctcttcaatcaaaaaggcgctttaccgaaccattgatcggggggtggatgtgacaatcatggtttcctccgcttccgatattccatttaccccagacgctgcactctacaaacttcacaaactgatgaaaagaggggcaacggtctatatgtataacggcgggttccatcactctaaaatcatgatggtcgatgatctgttttgcacagtggggactgccaatctgaatagccgcagcctgcggtatgactacgaaaccaatgcttttatttttgataaacggataacgggcgaactgaacacgatgtttcacgaagacatccgggattgcacccaactgactcccgaattctggaaaaagcgttcgccctggaagaagttcgtaggatggtttgctaatttattcactccatttttgtaattttgcataagcgtatatagtcttgagcgaacgtatatatcattttgcgcaagcgtacgtatagtatttgaaatttattcattatgaaacaatatttggatttattaaatcgtgtattaaccgaaggcacagagaaaagtgaccgtaccggaaccggaaccatcagcgtcttcggtcatcaaatgcgttttaaccttgaggacggtttcccttgcctgacgaccaagaaattgcatttaaaatcaattatatatgaattactctggttcttgcaaggagataccaatgtgaagtatctgcaagagcatggagtacgcatctggaacgaatgggcggatgcaaacggtgatttagggcatatttatgggtatcagtggcgttcgtggcctgactacaacgggggattcatcgaccaaatcagtgaaacggtggaaacgatcaaacacaatccggactcacgccgtatcattgttagcgcctggaatgtagcggacttagacaacatgaacttgccgccttgccatgcctttttccaattttatgtggcgaatggccgattgagcctgcaactttatcaacgcagcgccgatatttttctaggtgttcctttcaatatcgcgtcgtatgcattattgttgcagatgatggcgcaagtgacgggactgaaagcaggagatttcatccatactttaggggacgctcatatatacctgaatcatctggaacaagtgaaactacaacttacacgcgagcctcgtccgttaccgcaaatgaacatcaatccggatgtaaaaagcattttcgatttcaaattcgaggactttgagttagtaaattatgacccgcatcctcacatagcgggtgcagtagctgtatgacaatatgagtaaaatatcaataattgccgccctagaccgccgtagagcaataggtttccaaaataaactcttgttctggctgcccaacgacttgaaacgttttaaggcattgactaccggaaataccatagttatgggacggaaaacctttgagtcacttccgaaaggtgcattaccgaatcgcagaaatgtagttatctcttccaatccggcattgcaatgtcccggtgcggaagtgttcccttcgctcaccgccgctttgcagagttgcaaagaagatgaacacgtatatatcataggaggagcaagtatctatcaacaagcgttgccattcgccgacgaactttgtctgacggaaatagacagtacagctcccgaagcggatgtgtactttccggaggtctctccggctgtgtggcaagaaaaaagcagagagactcaccctgcggacgagaaacatctctgctcgtatgcttttgtcgattacacaaggaaataactgacttccgcttagcgcaatcttatcatctcatctgtcactatcggttgatgagatgatttgactaatcttcatcatcatcaaagtctatatctatcggcatctgtcgcttgatggcttcatggaaagatattaatgtttcagtacgagccagaccaagcggctgtaatttatcatgaataatgctcaacaggtgatgattgtttttagcgtaaatcttgataaacatatcatattttccggtagtgaaatgacactcgactacttcgggtatagcttccaaagccttcgtcaccgaatcaaaagattcaggatctttcagatatataccgatgtaggcacaagtctcataccctactttctcaggatcaataatatattctgaacctttcaggattccaagatttgtcaacttctgaatacgttgatgaatggcagcaccggaaacactacacgctcttgctacttcaagaaaaggaatacgcgcatttcctgcaatcagtttcaggatttgctcatccaaaatatctatttgatgatgtcccattttcaaatcaaattgtttaaaacgatgaatcttttgtgcaaagttagcgatttttcggcaacaaatactataaactattacttttatttataggaggcggataagtcgccaatagtttgtacctttgtaaaaacataaatatactatttatatgaaacaaatttgctgtaccatcctactattcttcgcttttgcaggaagccatgcgcaagattttgcggattactttcagaacaaaactttacgagtagattatatctttaccggaaatgcggaaagacaaaatatttacctggatgaattatcgcaactaccgtcttgggcaggacggcaacaccacctttcggaacttccattggagggcaacggacaaatcatcgttaaagatctcgctactcaacaaactatttataagacttctttctcttcactgttccatgaatggctgagcacagacgaagcaaaagagactgctaagggcttcgaaaatacatttctcctgccatttcccaaacagcctgctgaagtggagatttctttgtattctccccgcaaagaggttatggcacgctacaaacaccttgtccgtccggatgatatactgattcatcaacgaggcgtgtcccacgtcactccgcaccggtatctgctccggaacggaaacgagaaagactgcattgacgttgccatacttgctgaaggctatacggataaagagatggatctgttttaccaagatgcggaaaatgcctgcgaaagcctgttttcgcatgagccgttccgctcaatgaaggacaaattcaatattgttgccgtagccagcccgtccaccgatagcggtgttagtgttcctcgcgagaatcaatggaaacagacggctgtccactcacacttcgacactttctattcagaccgctatctgactaccagccgaataaagtctatccataacgctttggcgggtatcccctacgagcacattattatccttgccaacacggacgtctacggcggaggaggaatctataactcctacacactgaccaccgcccatcatcccatgtttaaaccagtggtagtccatgagttcggccacagttttgccgggttggctgatgaatatttttacgaaaacgataccatgacggatacttatccattggatgtcgaaccgtgggagcaaaatatatcaacacgggtggatttttcctccaaatgggaagatttgcttccggcagacactccgatacctactcctgccaacaaatgggagaagttccctatcggggtatacgaaggtggaggttactctgccaaaggtatttatcgccctgcccataattgccgcatgaaaacaaacgaatacaaggaattttgtccggtttgccaacgtgccatccggcgtataatcgaattctacgttccttgatgtaaggataagaatgaaattgtaaaacagaaatattatctaattttaaaaccccgaacctcatgatcagacttcaaccaatcagtacatctgacctgcaacattacaaatttatggaagaactgctggtagattcttttccaccggaagagtaccggcaattagaacagttacgtgaattcaccgaccggacaggcaatttccataataacattatttttgatgacgacttgccgataggcttcatcacctattgggacttcggtaacttctattacgtagagcactttgcaaccaatcctgctttgcgcaacggagggtacggcaaacgtacgctggaatatctatgcgactacttaaaactccccattgtactcgaagtggagcgtccggtagaagaaatggcaaagagacgtatcggcttctaccaacgtcaaggatttgtcttatggaagaaagactaccgccagcctccttacaagcccggtgatcacttcctcccaatgtatctaatggtacacggcaaccttgatccggaaaaagactacgaagatataaaacataaactgcacacggtcgtctacggagcaaaagagtgaagtagaaataaaacagaacaaagaaaaggcttccaaaatgatttggaagccttttctttatataatagaattaactaattatttctcaccacgtttagtagcagaatagttaatcttcaaagcataagattttctgagagcattttttacgtcagtaacaatacccatctttgtcttttggtctactttcagagacacagtcatcttagcggcgtccccttcactcatactagcgcgttcctggaaaatgaagtcctgcacctcgcccacttcagcatagctgtcgttgagctgaatacgactttcagtacccattttcgcacggtattcttgtgtaggttcacctacataaatgaatgtcaccaatgatttcttctccagtttttcgagctcagtaccttgcggaagcgtaaactgcacctttaatgttacctcacgcattgttgttacaatcataaagaagaacaacaaggtaaagataaggtcaggcaacgaagaagtattcaatgccggcatttcacgtttaccagtcttattaaattttcccattacttacctctttttttctccgtattttttaggttctgcctcagaaatacgttgcggataaatctcacggactgctttctgttgtagatcgttcagttccgaataagtaaccccaaatttttctttagccaactcatctctcaattcattgtatgcagcaaccaattcattctgcacactgatatatgcctgataagaagatccacggtcattctgcaaagaaattacgtgcttgtcgttaaccatgcatgtgccgaagaactctacattcttctgtgttttttcaggcatattttctgcgttagcaacgttagcgataaattctttggccttttgtctcaactgatcaacaccgatataatcatttccgcacatcaaagcatcatccttattcagatacacctgcaagatgttacgttctttgattttatccgtattctcgttcttttcatcttcgggaggtggaggcaaaagtcttgccaaaccacggtccgtatccattgatgttgtaatcaagaagaagatcagcaacaagaaagcgatatccgccgtagaacttgagttaatatcaggaacttttctttttccttttgccattgtaattactttttaattgagtactctcaattgattatgataattttttctttataccacttgcaatgattgcaacaattgttacaaacaacaggatgtaaatagaataaaggaacatatcagtcagcttcaaccagaaaggaacgttgtcagtaccatcataacccggaatctgcataggtgtaccgtcacccatagcccaagctacaactaaaacaacaaccaaaagaaccagaccaagcaaagacttaatagcggctgccgggctgtctttcaaagctgcaccaaattggaatactgcggcaactaaagtagcggcaatagcaataccaaacaaagcatacatcaaatagagtaaggcatctgtctgggccggttgccacatttcgggatctactcccgggatcactgccgctccagtagcgtctcctccgaagaagaagagccccatcacgatcaggataatagcaaacatcgcatacaatgcgtaatacgatattctatatgttaacttactcatttcgaattattttttatatttcaggttatatttgatcaccatgtcaagcaaagagatagaagaatcttccatttcacttgtaagagcttcaatcttagaaagtacgtagttgtagaatacctgaaggatcaatgctacgatcaaaccgaagattgttgtaatcaaggccactttcataccacctgcaacaactgtcggagagatatcacctacctgctggattttatcaaatgcctgcaccataccgattacagtacccaagaatccgagtgacggagccattgcgataaacagtgtgatccaagaacatcctttttcaaggtaaccagcctgtacaccaccgtaagatacaactgacttctcaactacgtcaataccttgatcgattctcatcaaaccttggtagtagatagaagcaacaggacctctagtgttacgagcaatgtcttttgcagcttcaacgtcacctttttccaaagcagcttcgatagatgccatgaatttttttgtgttgatttcagccaagctcaaatagatgatacgttcgatacagaaagccaaaccaatcaccaaagcgatagctaccaaactcatgaaagatgcagtaccttcaatgaatttaactttgatttccttgtgaataccaccttcttctgcagcaggagcagcagcagttgtagcttcagcagcaggagcaacagcttgttgttcagtttgttctgctgcaggagcgtcttgagcctgagcaagttgagttgagccaaatgtcaaggccccaatcacagcaacaattgcgaataactttttcattgtgtgtctaatttttaagattaattaattgattattattattgttttcacttctcgtttcacattcaatttctgcggagagacggggattcgaaccccggatacacttttggcgtatacacgctttccaggcgtgcctcttcaaccactcgagcacctctccctatgggttttctgtattttcagctacaaatgtatccttttttttcttttcttgaagcattatcccttttttatctcgaataaatactgtaaattaatataatttaaaacctttcgtgccttatttgcggaatccgaacacttttagcgcattttcagaagtgacctgagccacgtattcaaggctcttctgataaatttccgctactttggcaagggtatctttcacgttggcgctttcatttctcttcccgcgattcggaacgggggtcaaataaggagagtcggtttcgagcacaatacgctccaaaggaacggtcaacagggtttccggcaacgtcgactttttgaaagtgaccactccgttaatgcccagcatgaaaccatcgaactccagcagtctagccgcttcttccggcgttccggtaaagctatggaaaatccctcttaatgcggttttcttatagggttccattaccttatatatataatcaaatgcttctctcgtatgaataacaaccggcaattcatattcaagcgcccattcgatctgtctttcaaagaccaaaagctgttctttcagaaaagtccggtcccaatagagatccagaccgatctcaccgatagccacaaaataattgggagccgacaaacgttcacgtacaattgccaattcctgctcatatgtttcattcaccgaagtagggtgcaatccaatcatcggataacaaagatccggatatttcgcacaaacggataataaagcgtcaatcgtcgtactgtcaatattgggcataaaaatagacgagacaccggcattgcgcgcacgctccataacttgcggcaagtcttcggcaaattcttctaagaaaaggtgtgaatgggtgtctatcaacatgataactaattttcttcttttactttctcgctggaacggtaataatatatcagtccataatcacggcacttatccaaacgatcctcgtttggagtaacgtcttgatatttcgcttctacctgattccagatatccagaatcagttcatcggcacgctcacgcatagaggacagctcatcaagactacggttggtcaatgcctgataattcttttgccgttcataactgtccagaaaaatatcgtaatgcacttttacacgtgcaatggtcgggttataaataggtataccgccctgtcctgtccggcgttgctcgccttcgatgattttcttcccccactccaccaacgaagcctcactcaacagatcgggcacgacattggcatcgggcaaatcgtacagttttttgtgtaccgcttttatctcgtcacgaagcacagccaaattgagcacttggataaaatgagaaatatacaaccgggcggttttcacatttgcctggtgcttgcgactagcccgagactgattttcgtaacattgcgtatagtaaatttgcgcagcctcgaacctctgcaggaagttacgtgcctcgaacagcgtctttaatgaaatagccaaatcgcgtacattatatacatcccctttttcgaccgccgctttcagcgcccgaactctcgcttgatctgtatttggtaatcgtctataaggcatgcttcaagaacttagctacatttcacggtacattaacaacttcaccaggttcttcagttctttttttctttcctcagccactcccactgcggcaaggctttccatggcaagcgtgtaatagccgcgcattttgttttcgcagacactgcgaatgtccagttggttatacagttcagtcaccgcttttattttctcggccggctgacaagtttccgcatccagccaacggttcagttcctccctctgtttcgcatccgcacgatccaatgccttgatgagcatatatgtttttttgttgcacaggatgtctccgcctattttctttccgaacacttccggatctccataaacgtccaacaggtcatcttgcaactggaatgcaacgcctatctgcattccgaatttatatagattttccgcatcttcggcagtcgcccccgccaagatagcgccaatcttaagactgcccgcaagcagcactgctgttttcaggcggatcatttcaatatactcatcttccgtcacatcaccgcgggattcaaattccatgtccagctgctgtccctcgcaaatctcaagcatagtcaggctgaacaggtccatcacctctttcaagtgttccgccgggcaagccgtcatatagcggaatgccagaatcagcatagcgtctcccgacagcacagccgtgttatcattccagactttgtgcacggtcggttttcccctacgcatatccgaacggtccatcaaatcatcatgcaacaacgtgtggttgtggtacacttcgatagcagcagccggttcatagatagaagcaacatcctcccgatacaaattgtacgccatcaacattaatacggggcgtatccgcttcccacccagagaaagagtatattcgaccggttcataaagtcctttcggtgtccgggtaaattggatatctgcaatatatttatttattttatcaagtagttgagaagctgtatacatgaggatggagaaaatatttaatgaatgaaaagaggctgccgaaagcagcctccccaattattgtgttacaaattactgcaatctgaacattacaggaactgtaaatttaacacgtaccggttttccgcgctgcatacctggtttccacttcggcatggtgttaatcacacggagggcttccttgtccaagtacgggtcaacgctacgtactacttttgcgtctacaatactaccgtccttgttgacaacgaactgtacgataacacgtccttgagttccgttttcctgagcgatagtcggatatttgatgtttttagccaaatattgcatcaaagctgcctgaccgccggggaaatccggcatgttttctacaacttcaaagatagtctgttcttccggctcttcttcaacaacttgcaccggtacgtattttacttctaccggagccacattatcttcgttgataatggtagttgattcatcaatttcggctttatcgtcaacaatttccaacaattcagccactttcggagcttctggtggcggtggagtcgcttgttcaggggtttcagtgataggaatgatttcctcttcaaacacaacgtcagctactgcctggcttgtatcaattttcacgtcacgctgggtccattcgaacgccacgaacatgaaagccaacactaccacgtaaccaacgagcagccatgtagacttcttgccttccaagtctgctttgggtgattttttaacttccataaaataattaatataatgattaataaaaaaagtgtcttcctatgtgtctccgggcaaatatagtacattttcagataaccgtccacctcttcctgtctttttatccggctttttaacttttttaatcctttctgacttatccggctccttttaacggcaaatgcatggttgattttcaaaataaatgtatctttggcggacaaatcagaagaactgaatatgaaaaagataacaatagcaatcgacggtttctcttcttgcggaaaaagtacaatggccaaagaccttgcccgcgaagtaggatacatttacattgacagcggagctatgtatcgcgcggtcaccttatatagtatagaaaacggcattttcgacgggaacgacatcgacacggaaaagctgagaaaagaaatcagaaacatccgtatttcattccgcctgaatccggcgaccggacggccggacacgtacctcaacgatgtaaatgtggagaacagaatccggacgatggaggtgtcgtctaaagtcagtcccatcagcgcactcgatttcgtacgcacagaaatggtagcgcagcaacaggcaatgggaaaggaaaaaggcattgtgatggacggacgtgacatcggaacgaccgttttcccggaagccgagttgaaaattttcgtaaccgccacacccgagatccgtgcccaacgccgttacgacgagttgaaggcgaaaggccaggaagccagcttcgacgagattctggagaacgtgaaacaacgggattatatcgaccagcatcgggaggtcagcccattgcggaaagcagaggacgctctgctgctggataatacgaacctgacaatcgagcagcagaaagaatggctgtttgaacagttcaacaaagtaagtggcattcaataaccgcagacaacgaccgcaaattatgattaaggtagagattgacgaaggttccggcttctgcttcggtgtggtgacggccatcaacaaggcagaggaggaattggcaaaaggagaaacactttattgtctcggagacatcgttcacaacagccgagaggtggaaagacttaaaacgatgggattaatcaccatcaatagggaggaattcaagcagttgcggaatgcaaaagtactgctccgcgcgcacggagaaccgcctgaaacttatatgatcgcccgcgagaataatatagaaatcatcgacgcgacttgcccggtggtgttacgcttgcaaaaacgtatcaaacaggagtttctgcaagacgccgccaacgatgaaaaacagattgtgatttatggcaaaaacggtcatgcggaggtgctgggactagtgggacagaccgacgggaaagcgattgtcatcgagaaggcagaggaagtaaagaagctggacttgaataaaagtgtccgtctcttctcgcagaccaccaagtcgctggatgagtttcaggaaattgtagcgtatatcaaacagaatatttcaccggaagcgacattcgaatactacgatacgatttgtcgccaagtggcaaaccgtatgcccaagttaagggagtttgcggctacacacgatctgatatttttcgtcagcgggaagaaaagttcaaacggaaagatgttgtttgaagagtgtctgaaagtgaacgccaattcacatttaattgacaatgagaaggaaatagacccttccctactccagaatgtacagtcaatcggggtttgcggagctacctccactcccaaatggctgatggaaaaaatatatagccacattcagtcgcttatagaagaaagcaaatagctgcaatttgaacatttttaatgttttcttcatacgaaaagaaacttcataaccattgctttcaactttttattgtacatttgccacgtcaaactaattaatgaaaagattgtgttatgggaacagttaagtgtatcggaatcttgacttccggaggtgacgcccccggaatgaacgcagctatacgtgcggtgacacgtgcggctatctacaacggattgcaagttaaaggtatatacagagggtacaagggccttgtgacaggcgaaatcaaagagttcaaaagtcagaacgtaagtaatatcatccaactgggcggtactatcctgaaaacagcgcgctgcaaggagtttaccactccggaaggacgtcaactagcctacgataacatgaaaaaagaaggtattgacgctttggtagtcatcggtggagacggctcgttgacgggggcccgcatttttgcacaggagtttgatattccttgtatcggacttccgggaacaatcgacaacgacctttatggcacggataccactatcggatatgacacggcattgaatacgattctggacgctgtggataaaattcgcgacacggcaacctcgcacgaacgtttgttcttcgtcgaagtaatgggacgagacgcaggtttccttgcgctgaacggagcaatcgcttcgggagccgaagccgccatcattccggagttcagtacggaagtcgaccaattggaagagtttatcaagaacggattccgcaaatcgaagaatagtagtatcgtactagtggcggaaagcgaactgaccggaggagcgatgcactatgccgaacgtgtaaagaacgaatacccgcaatacgacgtacgtgtaacgattttgggacacttgcaacgcggaggtagcccgactgcccacgaccgtattttggcaagccgacttggggctgccgctatcgacgctatcatggaagaccaacgtaacgtaatgatcggtatcgaacatgacgaaatagtttacgtaccgttcagcaaagcgattaaaaatgacaagccgataaaaaaagatcttgtgaatgtattgaaagagctttctatctaaggctcggaataataaataaaacgcggattaacgcggataacgcaaatagaatttgatctttctttgcgcaaatccgcgttaatccgcgtttccttttttccttttaggaagaaatccatcgtgccaacgaacgttccgtgacttcccacagtagctccctctgcacgtgatgaacgtatttatccgataattctttccgacgattactagcatacagttgccccgtcactccggcttctttttcatccaacaacaaaccgatagcggtggaagccccttgtgcgggcttgcgaataaaaggccggaaaaaaatgtccgtcagcgggtcaaaccacttatgcatagtaataatattagtagagacaatgcccggatcggcagcattgacggtaattcctttatcacggagtagcttggacagttcaatggtaaacaacaataaagccagtttcgtattgctgtaaacgggaattctccaaaattctccgaccttgcctctgtgaaagaaatcgggaagttcaatacgcccgatcgcataagtgcaagacaccatgtttacaattcgcgcaccgcgcaccatcgcaggaatcagtttccgggtaagcagataaggtcctacataattcacgctaaccgttcgctcaaacccatctacggtaatatgaagtcccgtttccatcgttcccgcattattcatcagcagagaaacaggaaggttacgttctaatatccggtcggcaaaagaagctacggattgcatggaagccaaatcaagagccataacttccagattcgggtttccggtttcttcaatcaaacaagcgcggacagtctccgccttttgggggttgtaacaagccattattacctgataaccagctttggcaacggcacgtgtgatttccgttcccatccctccgtccgcaccggtaatgatagcccattttatatcattcatttcttttccaatttttcaatctccttttgcagacaaggaggtaacgtttcttttaaatgttgatggcaggccatttctatcgaatacatacggcctatgcagtaattactgtgtccacagttgcaacgggcctgctcctcctgcttcatccggttcacaaatccaggttcgttgagtaaggcacgtcccatctgtacagcttcaaagcccgcatcgagcacttcatctatcttctgacgggcaacgagtccgccaacataaatcaagggagcttccggaagagcttcccggaactttaaggcgtctttcaggaaataagcctcctcaaaaggcacggacggaatcatccattttccgaacatccggacaccgtatttcagccaccaacagtccatatagtgcgccatcgagcgaatcggcatcgctccccgcatcacatacatcggggctttgctgacaaagcctccactcagcaccagtccgtgagcacccagctccagaagccgtttcgccacctgaatggattcgtctatttccattccgcctttgaaaccgtcgcgcatattcattttgacaatcaccgccatgtcattgcccgccgctttcatcacctcttccatcaccagatccataaaacgcatccggttctccagcgagcctccgaactcgtctttgcgatggttggtgtaaggtgaaaggaattggctgattaaataaccgtgtccagcgtgcacttccaccgcatcaaatcccgcttcccgtgccaagttgacagcgtttccgtaagcctgtgccatttccggaagttcttcccgttccattccacgcacaaacgtaggcgaatagaggttaaaacctgaagaagcggatatgggcgtgacaccgcaaatctttttgtgggacatatttccgcaatgccctatctggatacctaccgcagcaccctcgtcgtgcacggcttttgtcaattcattcaaacgggaaattatggacggacgcatccatagctgacgatcgaaagagagcccgctttgcgtcacggcggcataagctacagtcgtcatccccactcctcccgcagcaaccgagcggtggtaatccaatagcatctgcgagggagtattgcccggacacatactttcaaacgctgccgaacgtatcgtcctgttccgcaacgtcaaagggccgaaagtgaccggagtgaaaagtttagatttcatagtagtttatatttattcaagtcttaattctagtcttaattcaattcgtgataaaaaaatctcctagtagagaaaaggaaacacccgcttccgtgtgcctaccgcgtcgccgaattcctcgcgataacgtttccagatggcgtcggctcgcggaacgaggtttgcaatcgtccaccaaaggaaaacaagtccggaaagcgaacaggtaagaattgcccagcctgcccattctacgatttcaccgaaataattggcggaagtcacatagcggtacatacctttctgtggcagataatgccgtgtgtctcccggtttacgcaaatggcggatgatataatcggacgaccagttcaccagcatacccgtaaaaaacagcaaagtacctattataaagtacggggaggtgaaccaatcggactggtacatcgttgcgggggcaaggtagaaaatccattctccttgcatatatccattcaacagattgaaaaggattcccattgacatgatggccaacggcattttactttttcctttcaataacaaagggaaaatgaaagcccgttgaaaataatgcagttggaagaataaaaagaaggtcaatatcaccggctcaaagcggcgttccgaatacatccacatcacgcacatcacgaggaagaccggagcttccatcagtatccaagccagcttgtttgaaatagccgctccccacgaagacgtgcggaagattccgtatcctgctttcacgaagtagagagcgacaaaaacaatcagggcaatcaagctcattacacccaaaaacagattaaaagctgctaaattcatattgaagttcttttgtaatgcacaaaaatagcaaaaatgaaagtaatagccacacaaaatgtcttttaaatataaaacttacccaaataacaactacactttggattcaagaatttaccatagaaggactcgcgggcaacgattgcacataattcactgatttacaccagcatacaaagggaaagtcatcaaatagagaaaaggcgttttaacacgatgttaaaacgcctttcttggtaggcagaaaccgcctttccttgacaccaagaacgctcttttctccataagaggagacgagggagctattcgaaatgttaattatgttattatttccagttctataagactttccccgaacagaatcgagactcaatatctattcggggaacattttacattatatagaaaaaggattgatgcggatcagcgtttcttgatcggaacataggccagttcctcaagaacgttcttataagcaggacgaataatacgttttccgtcaaaggtcagctcctcattacggtgtgcacaccagccgacaatacgagccattgcgaacaaaggagtgaaaatttcctgcggcagtccgatcatttcgtacacaaaaccggaatagaaatcaatattgctggatactgtctttccattgttcttcacacgtccgaaagtagcgatagcacgttcttccagcagttcgaggaaagcaaactcactctctctgcccttctcacgggcaaggtcacgggcaagttccttcagcaaaagtgcacgtggatcggaaatggtgtagacagcatgaccgataccatagataagtccggttttattgtacacttccttgttcaacatacgagtgaaataagtatctatttcatccacattcgtccagtctttgatattttctttcaagtgatggaacatatccgccacctggatattcgctcctccatgaagcggacctttcaacgaaccgataccggcagcgatggccgagtaggtatccgttccggtagaggaagtgacacggaccgtaaaggtagagttgttacctccaccgtgctctgcctgaagaatcaataacaagtcgagtgtgcgagcatccaattcggtatagtccttcttcagcatatataagaaattttcggcaatagaaagcttttcctgcggatggcggatatgcagagaacgcccgaaagtagcatgacgaagcatattataagcgtatgcaatgatagtgggaaacttcgaaatcagctcaatactttggcgcatcaggttgtctctggaggtatcgtccgcattcgcatcaaaacgatacatctcgagcacgctgcgcgacaaaatattcataatattgcttccctccaactcaataatattcattttcgtcttctgctccaacggcatgttgtcgttaatcagttcacggaaagaaagcagttcttccttgtccggcaagcgtcccgaaagcagcaagtaggccacttcctcaaagccgaaacgtttctccttgataatggcatgagaaatatcttccacgtcataaccgcgatagaacaattttcccggtataggcttcaatccgcctcccggaacacgttcgtaaccaaccacgttaccgattttagtcaggcctaccagcactcctgtgccgtcttcgttacgcagtccgcgcttcacgtcaaatttggggaacaattcattgtcaatccgggtagcttccttcatctcttcggaaagcttgtaaatcaagtactctttcttcattttctttgtctttattcgttacttctatttttctattctttccacgatttcacgggtgaaagcggaagtggagagggaggttccattcggcatgaaacgagcgaggtcatgggtggcacgcgcatccaagaaactctgttccaaagctttctcgataagagttgccgcttctttccaacccaaatactcaagcatcatgactgccgaaagtatgatagagcaaggattcaccacatctttgcccgcaatggtaggcgctgttccatgcgtggcttcaaagatggcatgccccgttttataattgatgttggctccgggagcaatcccgataccacccaccattgccgccaattggtcggaaacgtagtctccattaaggttcagagtggctatgaccgagtaatcttcagggctcagaagcgtattttgcaggaaagcgtcggcaatgcaatccttaatcaccaatcgtccgtctgccaacgcgtcggcaaattcacgctgcgccaattcgtagccccatttcttgaagccgccttctgtgaacttcattatatttcccttgtgaaccaacgtgacggagggcagatgatggtctaacgcgtattggcaagcagcacgcacgagacgctccgtaccttcccgcgaaaccggtttcacaccgaaagaggagctctccgggaaacgtacctttgtcacacccatctcgtctttcaggaatttatagaacttttccgcttccggagtgcctgcttcccattcaatacctgcataaatgtcttctgtattttcacggaacacgcacatatttactttttcgggtgctttcaccggcgactgtactcccggataccaacggacgggacgaagacagacgtataaatcaagcgtctggcgcaacgccacattcaacgaacggataccgcctccgacaggcgtcgtcaacggacctttaataccaatcagatactcctgaaatgccttcatcgtctcctccggtagccaagaacctgtcgcattaaaggcacgttctcccgccaacacttctttccactcgatacggcgtttgccaccgtacgctttctgaacagccgcattgactacggcttgcatggagggagtaacttccgctcccactccatcaccggtaatataaggtacggtaggcacatcgggcactgacagcgtaccatctgcttgcataattattttgctcatgatttttatttttcttgtcttttttaaattatctggcattcaaggcagaaccggcacgaaaccaagctatctgctgttcattataagtgtgttgcacttcaaagctctctttcgtcccgtcttcgtgatggagaacgacagtcaggttgcgtcccggagcgaagtccaccaaaccaagcacggacagaaggtcgtgttcacgaattttatcataatcggctttgtctacaaaagtgagggcaagcatgccctgtttcttcagattcgtttcatgaatacgggcaaaactcttggcgagaatgacacgtacattcagaaaacgcggttccatagccgcatgttcacgactggagccttcaccgtaattttcttcggccacgacaatagacggcactccttcggacttatacatttttgccgtaccggaaacagttccgtaagtgttggtagaacggttccaaaccttgttcgtctcaccgttgaaggcattgacagctcccattaacatgttatccgaaatattttccagatgtccccggaaacggagccacggacctgccatcgaaatatgatcagtagtacatttgccttgcgctttgatcaataaaggcatattcaataaatcttgaccatcccaggctgggaaaggagccaacagttgcaagcgttgtgaatccggcttcaccctgatttccgtctctcctccatgaggagcaacgtaaccctcgtttccttgcgcaaagccgttcaaaggaagttcatctcccaccggttcggacagcttcactttctcgccctcatgattcaccagtctgtctttcaaaggattgaaacagaggtcacccgcaattgtcagtgccatcgtcagttccggagaagcaacaaaagcgtatgtattcggattgccgtcggcacgtttggcaaagttacggttgaaggaagtgacaattgaatttttccgcgtcggatcatccgtctcacgtttccactgcccaatacaaggaccacaggcgtttgccataattgtagctcctatctgttcaaaagcttctatcattccatgcctctcggcagtggcacgaatctgctcggaacccggattcacaatcaacggagcggctacactcaggttcttttcggcaacctgcttcgccagagaagcggcacggctcaaatcctgataggacgaattggtacacgaaccgatcaatcccacttccatcttacgcgggtaaccgttcaacaacaccttctccgcaaacttggaaataggagtggcagcgtccggtgtaaaaggaccgtttatataaggctcgagttcagacaggtctatttcaatgacgcggtcataatacttagtcggttcctcagccacttcatcgtcagcacgaaggtcggcgccaacggtctctgccagttcaaccacccgctctcttccggtagctttcaaataggtggccatacgctcgtcaaacgggaacaatgaggtggtagcccccacttcggcccccatgttacaaatggtcgccttcccggtagccgagagcgattcggttcctggaccaaagtattcgataatggcgttcgttcccccttttacggtaagaattccggcaagtttcaaaatcacatctttcggagaagcccagccgttcagttttccggtcaggcggacaccgatgattttcggcattttgagttcccactccatgccggtcatgacatccaccgcatccgcaccgccaaccccgatagcaaccatacccagtccacccgcatttggcgtgtgcgagtcggttcctaccatcattccgccaggaaaagcatagttctcaagaacaacctgatggataattccggctcccggtttccagaaaccgattccgtagcgggaagatacgtcacgaaggaaatcgtacacttcttcattggtcagccttgcagtggcaatatcttcttttgcacctttatacgcttgtatcaaatggtcacaatgcaccgtagaaggcacagcaacttgatctttgcccgcattcataaattgaagcagagccatctgggctgtcgcatcctgcatcgcaacacggtcgggacgaaaatttacataatcttcccctctttggtaatctttcacatcagccacatcatacaaatgggcatacagaatcttctcggccaacgtcaaaggacgtttcaatatagcccgtacgtgttctacctttcctttataagcagggtagaaagcttctaacatagttgcatcgtataccatatcactttttgtttttttagtctatctattaaaataacgaatgacgttcgagtaatgtttaacaaaatgaaataaattttcgtctcgggaagaagaattgttacctttgcgcctattatgaataataatccgaaaaatccgatagccgaccttcagcaacaacaactcctcttacggatggagtacgaatatgagaaagaggaattcaaacggcagactgaaacgatgggtattgcccgaaaagtgaaacgcggtctttgctggtatcctgcctctctcggccgaagttactataactctctgaatcaatttgttgtagatattacaagaagcgaaaataaagagatagaacactcttttgaattcggccgtcccgtttcctttttccaccagtcattcgacggaaaagtgaaatatttgaatttcaccgcaaccgtcagttatgcagacgaagaacgaatggtagtcgtgctccccggagcaggggcattgatggaactgcaaactgacggtgtgctgggcgtacagctttactttgatgagacttcttatcgcgctatgtttgaagcgctggaggacgtgatccgtgccaaaggcaatcgccttgccgaactgcgcgacacgttgctgggaacgctaaagcccggatttcgcgaattataccccgtacgttttccttggttgaacagtacgcaggagacggctgtcaataaagtgctttgcgcacgtgatgtctctattgtgcacggtcctccgggaacgggaaagacaacaacacttgtcgaagcgatttatgagacactgcaccgcgaaccacaagtgatggtgtgcgctcaaagtaatactgccgtcgactggatttgcgagaaacttgtagatcggggtgttccggtgctccgcattggaaatcctacccgtgtaaatgacaaaatgttatcctttacctacgaacgccggtttgagagccatccggcgtatccggaactttggggaatccgcaagtccatccgcgaaatgggaggacgaatgcggcggggaagttacgaggaacgggaagggatgcgcagtcgtatgagccgtctacgcgaccgtgctaccgaacttgagattcaaattaacgccgacctcttcgacagtgcccgcgtgattgcctcaaccttagtcagtagcaaccatcgcctgctcaatggccgccgtttcccgactttatttatcgacgaagctgcgcaagcactcgaagcagcctgctggatagctatccgaaaagcagaccgggtggttctcgccggagatcattgccagcttccgcctaccataaaatgtatagaagctgctcgtggaggattggaatatacattaatggagaaggtggttcggcaaaaaccatcctctgtctcgttgctgaaagtgcaatatagaatgaacgaagctatcatgcagttcccttccgactggttttatcagggagaactggaggctgctccggaggtacgttatcggggaatccttgatttcgacagccccatgagttggattgacacttctgaaatggaatttcacgaggaatttgtaggcgaaagtttcggacgcatcaacaagcaggaggctaatctgctcctggaggagttggaagcctatatcaaccggatcggaaaggaacgaattttagaggaaaggattgatttcgggctgatttcaccctacaaagcacaagtgcaatatttgagaagcaaaattaaaggaagcagtttcttgcgccctctccgaagcctcatcacagttaatacagtggacggttttcaaggacaggaacgggatgtcgtttttatcagtctcgtccgcgccaacgaggaagggcaaatcggatttctgaatgatttaagacgaatgaatgtagcgatcacacgagcacgcatgaaactggtgattctgggagaagccgccacacttaccaaacatcctttttacaaaagacttatggcattcataaaaaaggaggattaaaataatcctccttttatggagtcccctttctcacgaaaccgaactccgtttttttaacacaaacaaaacaaacaatatttttattactactttcaccaagtagtaaactgtgtaccttaagaccggaacgccagcttcagaagaataaatatatatttcatcctttccattgataatttttagaagatctgattaaaactgccccttagcactaatttaggaaagacttttcagcaaaataaaaggggaaagctaacctctccccttttttatcaaacttgtataatcctatcaaatcaattgttctccggacgaagtttgcgtacagtaacagcagtttgccacatttcgctttcacgcaactggcggagttcttcattcagtttctcacgataattcggctgtgagttactgtcaatagaaatttgcgcttcgttaccggtcttcacactgtgatacagtttttcaactaccggtttgatagcgtcgtggaacgggcccatccagtcaagagcaccgcgttgagcagtagtagaacagtttgcatacatccagtccataccgttctttgcaaacaacggcattaacgactgagtcagttcctctactgtttcattgaaagcttcggaaggtgaatgaccgttttcacgcaacacctcatactgtgccaacaacagaccttgaatagcacccatcaacgaaccgcgttcacctgtcaggtcggaagttgcttcacgttggaaagttgtttcaaacagataccctgaaccgataccgatacccaaagcaattgttctatcgtaagctttacccgtagcgtcctgatagatagcgtaagaagagttcaaaccacgaccttcgaggaacatggtacgcaatgaagtacccgaacccttaggagcaaccatgataacatcaatatcagcaggaggaaccaccccagtacgatcatgccaagtgatagcaaaaccatgagagaaataaagagcctttccggcagtcaggtaaggtttcattgtcggccatacagacataacagccgcatcagacaacagacacatgataattgtgcctttttcgcaagcttcttcgattccgaacaaagtttcacccggaacccatccgtcagctactgctttatcgtatgtctttccctgacgctgaccaacgattacattaaaaccattatcacgcaaattcaatgcttgtccgggaccctgaacgccgtaaccgattacagcgattgtttcatttttcaatacttcacgagctttctccaatggaaattcatcacggatcactacattttcaatagtaccgccaaaattcaactgtgccatttttctttttgtttttagttttgatggcttacgccatccgttattaattgattttatattctattttattcaaatatcactttcgaccggcaaaccacttcgctgccgttcttcttcacctctacgtgaaactcattttcattggcttcatcgcagaagaaagtcagttcgtctccaaaataactttcagccacatacgccatctcaaaacgacgaatacgcttggttttatacaaatcgatcggaaacaagtcgagtatgtgctcgatgtaacggatactattcacatgaccgttaatatcaatatcactgtatttcgcagtcagcgtggccaacggctgtgtattagtcactttgatacgcgaaggcttctctatcggacaaggctcatcgcatacatagtctataatgcttcccccgtgcaatgccaacaggtcagccggtttacgagtattcaaactgatcatcgcccacacggaacgagcgtaaccgattttcttgccttctttattcataatggcaaaattacgatcggtgaacaggcgataaacattttccacccaagtctgaaccgaaaagtcctcatactgataaggcatttcatccaattcgattgccaggcgggaaagtacccacgtataattgtcctcattcagagatgcaatgccaaaaccacgatcgctggcatgaaaccctgcgcaattcagcaaatgattgcccaatacccccattgtcaggcggccgttgaaatcaacatgaaacggttctgcaacaaacttataagttcctattttatttgattcgctcattcttcctgctggtttttattttggttataacgggcttcccgtccgtcaagaaactcattcacccgttcaaaacaactggtggtaatcgctacccgccccgaacgtacaaattgcaaaacacaattcaaagccttcagttcaccgtaaagcgaggtaatttcttcactcattccattcttctcaacaatagaaaataccggatttacttccactatgcgggcgttatatttacgtatcaccttagaggcctccggtgtctcttgaaattcgggggtagacaccttatataaagcaatctcatggaagtagatctcatcttccgtaaagtagtgcgcctgaattacatcaatcttcttttctatttgcttcaccactttttcaatcgtatctttatcagtccaagcagtaatggtatacttatgtacccccttgatggaagaagcagatacattcagactctcgatatttatctgccgacgggtaaaaacagccgtaacctgattcagcaatccggctatattttccgaatgaacaatgatagtatataatgttttttcactcataatccttaatttaactttcaactctcaactctcaactctcaacttctcctagcactccagcaacatctgattgacagagcctcccggaggagtcatcggtagtacattaccttcttctactacacaggcttcgagcaggaacgggccatctgttgccaacatttcacggatagcgtccgccagctcttcacgagagaagacacgtttggaaggaatctcgtacgccgaagcaattttcatgtaatccggattcaacatcggagtgaatgaataacggcgattgaagaacatagcctgccattggcgcacgttgcccaaaaagttattgttcaggcagataatcttcaccggagccttttgctccataaccgtacccagttcctgaagattcatctgcaatccaccgtctcccataaatacacatacggtacgttccggtgctccgaaagtcgctccgatagcggcgggaaggccgaagcccattgttccgagtccgccggaagtaatgatactgcgttctttcgtatatttaaagtaacgtgcggacatcatttgattttgtcctacatctgtcaccagaactgcttcgtggcgggtagcgtcacttaccgcacgtaccacctcacccatactcaacgagtcggtggcaggataaagctcgggacgaatcaccttttcttcctccaccttctcatactccgtgaaactgccgacccactcagcgtgttcattctttttcaagagtcgggtaacagccttcaatgtctccttgcaatctcccaaaactgcaacgtcaacttttacatttttattcacctccgccggatcaatatcaaagtgaatcacttttgcctgtttggcataagtagccagattaccggtcacacggtcgtcgaagcgcattcctacagcgatcaggacatcacatttattggtatttatattcggtcccaaattaccgtgcatccccaacattcctttattcaaaggatgttccgtaggtaaagccgaaagtccgagtaacgtacatcccgcaggcatatccgccttttcaataaattcacgcaactcactctgcgcattccctaactcaacgccttgccccaccagtacaagcggacgttccgcattattaatcagttcggcggcagcctttacggagtcttcatcagtatcgggcacaggtacatagctgcggatgaaatcaaccttagtcggctcatatttcgtcttctctacctgtgcattcttggcaaaatccagcacaaccggaccgggacgaccgctacgggcaatgtagaatgcacgtgctactgcccacgctacatcttccgcacggcggatctgataactccacttggagataggctgggtgatacctacgagatcgacttcctgaaatgcatccgttccgagaaaaccggttcctacctgtccggcaataacaacaataggagtactatcgatcatcgcatctgcaataccggtaatcgtgttcgtagcaccgggaccgcttgtcaccaggcaaacaccgactttacctgacacacgggcataaccttgtgccgcatgggcagctccctgttcgtgacgaaccaaaatgtggttcaagttatttcgatggtcgtacaaggcgtcgaataccggcatgattgaaccgccgggataaccgaaaatcgtatttactccctgatgttccaatgagcgcatcaacgcctccgcacctgttattaagtctttactcatctatttatttgcaattttaagatttacaatttacgattgaactcaacgtcaaaacatcatttgtcaatcgattaatcttactgctcctttatcggcagagcttaccatgctggcatacgctttcaggctcttcggcacataacggtcacgagtgacaggtgtcatcggacgggcagccagttcttcatccgtcagtcgcacgttaatcgtccgggcgggaatgtcgatttcaatgatatctccgtcgactatttttccgatattacctcctgctgccgcttcgggagagatatgccctatactcaatccggaagttccgccactgaaacgtccgtctgtgatcaaagcacactctttgccgagatgacgggattttatataagaggtaggataaagcatttcctgcataccgggaccacccttcggaccttcgtgcgtgatgacgacaacgtcgccactgacgactcgacctcccagaataccttcgcaggctgcttcttgcgaatcaaacactttagcaggtccggtaaacttccagatactttcgtctacccctgccgtttttaccacacaaccgtcttgagcaatgttacctttcaatacggccaggccgccgtctttgctgtaagcgtgttccaaatcacggatacatccggttgcacggtctttatccagttccttataatacataccttgcgagccgagtacgaggttaaatctatttccggctgcgctcgaatattttttgatagcctcttcacttacgttcggacttgtaatggaatacttatcaatagcctctgccaacgtcattccgtctacccggcgaacagacgtgtccaccagaccagctttggacagttcgtccatgattgcaataattccaccggcacggttcacatcctgaatgtggtacttctgtgtgttcggagctactttgcaaaggcacggagccttgcgggaaagcatatcaatgtcgtccatcttgaagtcgactcccgcttcatgggcaacagccaacaggtgaagaaccgtattggtagaaccacccatcgcaatatccaaagtcatggcattcagaaaagcttggcgggtggcaatgctacgcggaagcacgctctcgtccccctcttcataatatttcatcgcattatccacaatcaacttagcagcacctttgaaaagctgcgtacggttttcatgcgtggctacaatggtcccgtttccgggaagagccaagccgatggcttcgttcaagcaattcatagaatttgctgtaaacataccggaacaacatccgcaggtaggacaagcgttctgctcgatattggcaacttcctcgtcactcacactttggtcggccgacttaatcatcgcgtcgatcaaatccaaatgctgaccgttccattcacccgcctccataggaccacccgacacaaatacagcaggtatattcagacgcatcgccgccatcaacattcccggagtgatcttgtcacaattactgatacataccatcgcgtctgccttatgagcattcaccatatattccacactgtctgcgatgatatcacgggaaggaagcgagtaaagcattccatcatgccccatagctataccgtcgtcgatagcgattgtattgaattccgcagcgaagcaccccagcttttcgatctccgctttcaccaactggccgatctcatgcaagtgcacgtgtcccggcacaaactgtgtgaatgaattgactatagcgatgataggcttacccatctgattcttcttcatgccgttggctacccacaacgcacgggctcccgccatccgacggccttgtgtactaaacgaactgcgtaattgctttttcatttcaatctatcttttaattaaaaagcctctctcacaccagtgagaaaggctctaaattttatctttatggtacgaatacatacagcacaaaacctttctcacgctcttgatgggaccaccacgacgcgaataatatgcaagactgctaggttaatagatgtgtgtaagttattcatatcttcttttctttatttttgtgctgcaaaggtaagggcttttttattatatccaaacaaatcgaagaaaaaaatcacataaaaacgaataattgtaagaaaagagaggcgttatttctctattttatcacttagaggttaagtttacaactattatataagtggaatcctattgtccctttctaacaaaagcatttaatattttgaaatataccttccctatatcacggcagaaataaataattcgtatctttgtcagcccgcatttgcgggatttattaatttagaaataaaaagaattagatggaaacagtagaaaacaagtacattaccgttgcatacaaattatatacaatggaagatggtgaaaaggaattgttcgaagaagcaaaagcagaacatccctttcagttcatttcaggattaggaacaacactcgaggacttcgagaaccagataacttctctttctaaaggtgacaaatttgacttcaccattccggcagacaaggcatacggtcaatatgacgagcaacacgtgattgatctcccgaaaaatatctttgaggttgacggcaagttcgacagcgaccatatcaaagagggtaatatcgtacctttgatgaccggtgacggtcaacgcgtaaatgccagcgtagtagaaatcaaaccggatgtagtagtcgttgacctcaaccatccgttggcaggcgccgatctcatctttgaaggcgaagtgattgaaagccgtcctgctactaacgaagaaattcaggaactggtgaaaatgatgagtggcgaaggctgcggttgcggatgcgacagttgcggtgatggtggctgcaatgaccacgaatgcagtggcggctgttgccactaagttaatgaagagttaaaaatgaggaatgaagaattgctatcaaccattgcgcagctaattcttcattcctcatttttcattcctcattcttcattttctaactcctcattttctagcatcctttgtgcgtcatgatatcgagtaccattttatccgtttcgttcatagcttgtgagccgattcttgtcagattacggatactttgatctacatcttcatcaataataccttccacagaagttacacaacggtcttccattgccatcatagcagacagtacagctgttgagactccggtagtcacttttagggcacaactcggttttgcaccgtcacaaatcatgcccgtcaggttggcaatcatgttttgaacggcaaaggcaacctggtcatagtttcctcccatcagccaagtgattccgcaactagaacctgtggcagctaccacacaaccgcagagagcggaaagacgtcccaaactttgtttgatataaataaccgtaagatgactcaacatcaaggcacggatcagttcttcttcattcttattattctcttcggcaaagaccaccacaggaagcgtggccgatattccttgattaccactgccggaattactcatgaccggaatcatagctcctgccattcgagcgtcacaagcggcagaagtataagagaggatgtgagagaatacgctgtcacccatcactttgtgttcataacttccccgaagcattcttcccaaagagtgtccgtaactgcctttaaaggcttgttcggcagcagccttgttcaaacgtgccgtatcaagaataaaacgaatttcatccaaaggagctgtcaaggcaaaatcataaaccttacgcaggttcagttcgggagcggtcgcttcctcttcttcatcggttgtatgctgcctgtccagtaatacgttacctccatcggctatatatataaaggtggtatgaccaccggcaattacagctttcgccgttctatctccggacctgcaaatcacttcgatatagagcttttccgtgatattatctttcaaggaaatacaaatccgtctttccgcaataaactgctttccgcactctacagcttccggtgtacagtctttcaatacttccagttggtactctgatttgcctatcaatgctcctaaagcaacggcaatgggaagtcctaccattcctgtgcccggtattcctacccccatcgcattttttaaaatgttggcactgagcagtacttctatcttctccggacgcatccccaatgtttcggcagctttcgctacacaaagcgccacagcaataggttctgtacatccgatagccggaattacctctctcttaatcagttctataatttgccttctttctgactcagtcataaactcataagttttaagtacacacaaaagtaagaaaatcttttttatcatacatctcttactgaacaaataaaatttcattttgttataaacgcttctgagaactaaactttaacagtaagaaaaaagagaaaaatgaaagcaaaacacgtgattttatatttcctggtaagtattatcatctcttcttgcatccgtgacgaagctcttaacgcagaagcagatatacttagttgcacactgccgaaagcagtaatgactacaagtcctatcattaataataattcggtaactctttttgtgggaccggaaacagacgtttcggcccttgcaccggaattcaccctgactccgggagctaccatcagccctttgagcggaacggtacacgattttaatctaccgcaaaaatacactgtcacagcagccgacggagtatggaaaaaaacatatacagtttcggttattgatacggaacttgcaactaactacaacttcgaggacactctcggtgggaaaaaatactatatattcgtagaacggcaagaagacaaagtgattatggaatgggccagcggaaatgcgggttatgccatgaccggtgttcctaaaacagccgatgactaccccactttccaaatagcggatggtaaagaaggaaaatgtctttcattagtaacgcgaagtaccggtttcttcgggcagttaatgggtatgcccattgccgcaggaaacttatttatcggctcttttgatgtgaacaatgccatgagctatccgctgcaagctaccaaattcggtctgcctttccgttatgtgccgacctatctggccggttattataaatacaaggcgggagacaagttcaccgaagaaggaaaacccgttgacggaaaacgtgacatttgcgatatatacgccatcatgtacgaaacgagcgagtctgttcctactcttgacggaagtaatgcgttcaccagtccgaatctggtttcaatagcacgcatcgacaatgccaaagaaacagatgaatggacttatttcaaacttccgtttattacccgccccggcaagttcatcgacaaagaaaagctaagggatggaaaatacaacgtagcaatcgtctttacctccagtctggaaggcgcttatttcaatggagccatcggaagtaccttgctgattgatgaagtcgaactggtctatcatacagaaaactaaaacctaaatgattttataataattacagcgatgaaaaaatacctttatacattcggtctgcttatttgtttaagtgttgccctgcccggttatgcacaagtggatagaaatgaaacgcttatccgttccgcccttcgcggattggaatacgaagtgaaagcaggaatcagtatcggcggcacagctccgcttcccttaccggcggaaatccggtctattgacggttacaacccgactctcgccattacaatcgggggtgaagtgaccaaatgggtagcggttcagaacaaactgggtgtcatcgtagggctacggcttgaaaacaaggctatgaccaccgaagctaccgtaaagaattacagtatggaaattctgggacaaggaggtgaaaggatcagcggagtatggacaggaggggtaaagaccaaagtacataccgccggattaaccatcccattgatggctacttataagttgagtagccgttggaatgtgaaagcaggcccttatttttcctatatactttcaagggaattttcaggacacgtatacgaaggatatctgcgtgaggacgatccaacaggacctaaagtagaatttaccgatgataaaattgcaacttatgacttctccgacgatctgagacgttttcagtggggacttcaggcaggagccggatggagagcgttcaaacatctcaacatatacgccgaccttacctggggactcaacaatatcttcaagaatgacttccatacgatcactttctcgatgtaccctatatatctgaatatcggcttcgggtatgcattctaaaatataactcaccacagttacatcgcaagctcccaaggcagccgcctctccagcaaatgtaagttgctgttgtcctgtaaaggtcgaaatcccctctcccttctttacggtacacttgtctattacaatatccccgaacgtcattatcttcccgttcatggattctttttcatacagtcattggtttagttattattaatcatcatttatcaactgaaaagaagaaaaaaggttcaatatgccaccttttttgaagatattttgagttcacaacaatcttatcgaaaactttgttatatttgcatacagtaattttaaaaagccacgactatgtttaattcatttggcaacatctttcggctcacaagttttggtgagtctcatggaaaaggaattggaggagtaattgacggatttcccgccggaatcactattgacgaagaattcgtacaacaggaactgaaccggcgccgtccgggacaatccatccttaccaccgcacgcaaagaagctgataaagtagagtttctttccggtatttttgaaggtaagtcaaccggttgccccatcggttttatcgtttggaacgaaaaccaacattctaatgactacaacaatctgaaaaatgtatatcgcccttcacacgccgactatacttacacagtgaagtatggtatccgcgatcatcgtggcggcggacgttcgtctgcacgcgaaacggtatcacgcgtcgtagccggtgctttggccaagctggcactccgccagttaggtatcagtatcactgcttacacctcacaggtaggagctatcaaactggaaggcacttactcggactacgatctcgacttgatcgagacaaatgatgtacgctgcccggacccggaaaaggcaaaagaaatggcagaccttatatataaggtaaaaggagaaggcgatactatcggcggtacgctgacttgtgtcatcaaaggctgccccatcggtttgggacaacccgttttcggtaagctccatgcggctttgggaaatgcgatgttaagtatcaacgccgccaaagcatttgagtacggtgaaggattcaagggactgaagatgaaggggtcggaacagaatgacgttttctataacaacaacggacggattgaaacgcataccaaccattcaggaggtattcagggaggattgagtaacggacaggacatttatttccgtgtggtattcaaaccgatcgctacgctgttgatggagcaggagactgttaatatcgacggagtggacaccacgctgaaagctcgcggccgtcatgacgcctgtgtactgccacgcgccgttcccattgtagaggcaatggctgcgatgactatacttgactattacctgctggataaaaccacgcagctttaatgtttaattcaatttatgaacgaaattcagaaatatatagcagagaacgagtcccgaatgatggaggatttgttcagtctcatccgcattccaagtatcagtgcactgcccgaacaccatgatgatatgctggcgtgcgccgaacgctgggcacagctattattggaagccggagcggacgaagcattggtaatgccctccaaaggcaatccgattgtctttgcccaaaagatagtagacccgagcgcaaaaactattttagtctacgcccattatgacgtgatgcctgccgagccattagagctttggaaaagccaaccgttcgagccggaaatacgtgacggtcacatttgggcacgtggtgcggatgatgacaaaggacaatcatttattcaggtgaaagccctccaatatctcctcaagaacggactgctgaaaaataacgtaaagtttatctttgaaggagaagaggaaatcggttctcccagtttggaggctttttgcgaagagcacaaagagttgttgaaatccgatgtgattcttgtttcggacactagcatgctaggagcggaactcccttcgttaaccacaggtctgcgtggcctggcttattgggaaatagaagttacgggaccaaaccgtgatttacattccggacatttcggaggtgcggtagccaatccgattaatgtgttatgcaagattatcagtaaaataaccgatgcggatggaagaatcaccattcccggattctatgacgatgtagaagaagttccacaagccgaacgggagatgattgcccgtattccttttgatgaaaagaaatacaaagaagcgatcggtgtgaaggaagtattcggagaaaaaggatacagtacattggagcgtaacagttgccggccgtcttttgacgtatgcggtatatggggcgggtatacaggagaaggttccaaaaccgtgcttccctcaaaagcttacgccaaagtctcctgccggttggttccacatcaggaccaccataagatttctcaaatgtttgcggattatattcttagtattgctcctgacacggtacaggtgaaagtcactccgatgcatggaggacagggttatgtctgccccatctcccttcccgcctatcaagcggcggagaaaggttttgagattgctttcgggaaaaagccgttggctgtacgccgcggcggcagtattcctatcatatccactttcgaacaagtattaggagtcaagaccgtattaatgggattcggactcgaatcggacgccatccattcgccgaatgaaaatttctcactggattttttccgtaagggaatagaagcggtgattgagtttcataatgccttccggtaagtacatccgtttttccactccgaacatccgtaggctgtcttgccttttatgattgttcctttgccgcaaagcggacaaggttgtccgacaagagaatcagcattaacagtagccgcaggcgtagccttcggcttcttttctttcggagcacccggtttccgttcgcgcttcttcggttctttcttcactttttctccggcttgggcggctgccgcatcctgaatggtaatacggcggttagtattatccgacaacacactcattacgatttccgaaaccatctgcttcagttcttcaagaaactggcgtgcatcatacgttttcttctctatttcgcggagtttcttttcccagatacccgtcagttcggcagattttaaaagctcttcatgaataagctgcaccagttccactcctgtcggggtagcaatcaggttcttcctttccttacggatgtaattccgtttgaacaacgtttcgatgatagcggcacgggtagacgggcggccgataccgttttcttttaaggcgtcgcggagttcgtcgttatcaaccaactttccggcagtttccattgcacgaagcagagttgcttccgtgtaaggtctgggcggctgtgtccacttctcattcaaatcgggaacatgaggaccactttcccctttcacaaaagcaggaagtacattttcgtcttcttcctctttttcttcggccgtttcttttacatcttttgcaaagacaacacgccatccgggttcgagaatctgtttcccacttactttgaattctattttatccacctctcccatcacagtagtagtagaaatcttacaatccggatagaacacggcaataaaacgacgggcaatcagatcgtagacacgacgctccatatccgtcaggttttgagcgtacactccggtagggataatggcatggtgatctgttacctttgaattatcaaatactttcttcgatttcggcaatgtggaaccgttcaacggagctgtcagtacttcataatcacggagtcctttcagaataccagggcacttcggataaatatcgtcactcaggaaagttgtatcgacacgcggataggtagctactttcttttcgtaaagggactggataagttttaatgtctcatcagcagaataagcgaatttcttgttacattccacctgaagcgaagtcaggtcgaacagacgcggagcaaactcccgtccgtctttcttactaacactggtgactacgaacggaaggtctttgatacgttctaccaacgcctcgccctcttccctgttagcgataggatcaataccgggattctctattattttctttttcccaccgtttttctcttcttccgcagcgatttcttcatcacttttgcggattaaagccgaaaaggttgtatcccggtagttcgttttcaattcccaatattgcttaggctggaagttggctatctccaactgtcggttaacaatcaacgctaaggtaggtgtttgcacccgaccgatagaaagtacctgtttattctgaccgtattttattgtataaagacgagtggcattcataccaagcaaccagtctccgatagcccgcgaaagtcccgcttcatacagtgactgaaaatctgcctgatcctttagctttgcaaatccgtcacgaatagcttcttccgtcaaagacgaaatccacaaacgcttcaccggacaacgggcgcctgctttctgcatcacccaacgctgaatcaattctccttcctgtccggcatcaccgcagttgataatctcatctgcattttgcatcaattgctctatgatatgaaattgtttctcaatgcccggatcatgcccaatcagtttgataccgaaacgcggagggatcatcggtaagctacctaagctccacgacttccaattaggagtatattcatgcggctccttcagggtgcaaagatgtccgaacgtccaggtcacctggtatccgtttccttctatatatccttcttttctggtatgagcgccgagtacttcggctatatcacgtgcaacagatggcttttcagctatgcaaactatcattcttttccttcttgtttttatactatcagcctacaaagttacacgaatatttctcacagaaggcatgaagccgggaaaaagtgattatacctcccaacacttccatcctttattggcacagatatataccacatacgaacggacattgtaattgggaaacttctttttcgtatcttcggcatagcccttcacttgttctacgtgttctgccaacggttcggtgagcgcaagcatgcggtcggcatctttggaacgatagtatttgaattctaccacgcggtcgtccgtgtaataatccgtgccggggatgccggtcatttcaaaatccgaacgaccgacggagttattctgttcgatggcaaaagtgtaacaatggctcaaatagcgggagacaagctcgtagaaagaacaacggataaagttctcgttgatcttatcgaaaacctgtgcggggaattgtcccagatattgctcgaaatagttctgcacaaggggttcaaaactacggttggaatcataaagttcataaaccgggacgtagcgactggcgttaccttcgatcttgttcagttggttgtaataatccatgtagatgctgcgcatggtcatgttggggagcaccatgcggtatgcactcttcagggtagtcatacctaagtagaacaggctgacgggatagaattctttctcgaagaacttcttcttgttgaacttactggataaatcgctgacgttgtaggacagttcgtcgtctatcaccagggcatcgagcatctctttggcattagtaagcgaaagagttaagcggcgaatccagttgatgtccgtacgcaggttctcatcgatcagttcgggcggaatgcttccggcattagcggcaaatttcttaaggaaataagttaggatagtggagttaaaaagacgttcgccgacggggctgaaacgataaccgtcatagttgctcacaatcagctgccagatttcctcgaaacgttcttcgcttgcaccgggagtatatttatcaagtacataacgcaggtatgtcttcgtttcttcataggtgaaaccgagcatattgaggaaagacggttccaaggtaagaatttccgcaatgttgtagccgctagtcaaatcgtccatggtgacaggcaatacacctgtgcagaaacaggtacggatagtaccttcgcctatgccttttttaatcactttaaaaaaggtacgaaggaaactgtcgctggtggttaccttttcataaagcggatcgttataggaagtaagcagttggttggtgaagttatcgtattcgtcaatcaatatatatactttaggcaatccacgtgaactggcataacccaaaagttcctccaacatctgcgcagcatttcccctagttgtaaactgaaaatccccaaacaggtcacggttgtgttctaacgttacctctactggtatacagttgagtttattaaagttctgtgccagtccttccatatcattcgccatcaccatagccgagaagtcataacgaatcaccatatattgattatgctctttcgtaggatgttcgccaatccaggtgccaccgaagagttcttcaaaacgattcgcctttgtacggtcgtagtagtgagccagcatggagataagcagacttttcccgaaacggcggggacggagaaaaacaggagctttatagtcttcaagccccggaatgtaatttgtcttatcgacataataaaagccacgttcacgcatttctgcgaagtcggccactgcgtatggaatcgttattcttgccataatcgttaatcttttctttcggtagagacaaaagtactaataaattagtactataaaaaagattatgcgaaaaagatcaaagttatgcacttatcatgtatagccctatacacgaaggctgcacaactctatacatgatgcgtgcgtagagctgtgcagcctctctgcataagccggggcaaagtttcacccccggctaagaacattttattccgaaggatcgggagcctctcctcctccaccgccttcaccaccggagccgcctcctgtttcgggtttcgtaccgacgtagaaagtagcgatagcagtgcgtggcgttttcaggagcgtgctgcctgcatattgcgtcgtgatggtgagggtgtattcgccatccgccagcccggcaggaacgatgaatgtgagttgtgacggattgttgacagccagcatattgagatcgacaggcgtggtttgttctttgctgtcggtgatggtgatgccgacagaagaatccgtacctgcgattttcagcatacggccgttgaccgtgaacggacgaccggcgatggcggtggcaggcgagaatccggcaacgtacatcacgctttggcgttcgcccagaatgctgacagaggtttgggcgatagcttcacgcagttctttatcttgggtgaaagagacgtagacggagttcttttcgggattccattttccgccatcgataacaccgcggagttgcgctacggcgtggtaaagaccggtgttgacactatatccgctaaggataagatcgcctaccacacggttgtagagcttcacgacgtgttcgatggtttcgggacggagcccggtatcttccttgtgcatctcatcgagtatatcctgcaacgagagattaccggacgattcgagctgaccgatcttatcgtctttgttgtcgacggttacagtgttgtcgactaaccagattttcaatacattcttcattatttttctt

SEQ ID NO: 11742 - DNA, 21376 bp, Unknown
  gut microbiota DNA sequence
atcatataagtacttcctttaagcgtaagggcagagctgccaaagatgagccgcttcggagaatcttacggtcggaactcagccgtgaaagagctacccgcctggaaggaagttttggaacgcagaaacaacattactcactggccaggataaaagctagaaacaggaaaacggaagtactttggattttctttgggatacatacagccaatgcggtatgtatgatagaaaaggtcgaaaagaaaaaaagaaaggcagcataatctgactaaaataacaggaaaaacaggagaggttttaacttcccctaaaaaagacatgtacataatgcatgggtgggaaggaaaaaacaagaatatgtaaacaatattctacaaaaaagatagaagactgggagagttgaacgaaaaaatcaagagaaaagctttgctttacgtgagcttttctcttgattttttagaaagaggaacatttactgaatatccctaccgtgtacggaagttgattgaacttccgtacatatacagttagtttgtagtctgacagtttagaactctatttcaggaactaatatgaactttgtctccgggaagtgtttctccaaccatgtccggacgaagttcatcgtgtcgttctgaatcgtcttgtcttctaccgtaggatacatattatagagaacggtatccagcacaatcccccttttttgtatggcttcaaggctaagcaaggtgtgattgatactccccagtttgccggaagtgacaaagataagcggatatttctcttgggcaatgtagtctattgtcagcagtccggtggttagcgggaccatgaggccgcctgctccttcaagtaaaacatagtcgtatcgttcgctcagtttcttcgttgcccgtttgattttattgaagtcgatagggcggttatccaactgcgaggcgaggtggggggaagcgggataagagaaaatttccggcatagtcagtccttcttcatcttctttggtgaaggagattcccataatgcgacgatgcaggtcgatgtcttcggaatgacctacatttcccgtttgaataaatttctgggtgatggtacgttgtccgttcttgttccattcacgggctagaaagccggtggcataactctttccggcatcggtgtcgataccggaaacgaaaaatacattctgtttcatgcttctttcttttttgcgatgatataaatagggtgataggtcagagacacggaagtgccccgtgtgaattcttgggtataacgctcgctgaatcgctgtaaatcacgacgggtccgcagttgtccggaagatattccggttactcccgtttgcttcaagtgataaagaacttttatgggattgtcgaacgaaagaggaatgagttcttcttccgaatggaggatgtcaaagtctgccgacaaggcggttacgagttcttctcgtgagcggtagggaagagcgttgcctgttagtcggcgtatctctttcatattctttttgccaaaggtgctgaaagcgaaatagccttgtttgttgagcaacgcgttacatctcttgaaaaagttttcgggagattcgaaccattgcaaggcggaacaggaagtaatcagggtactttcggcaggaaagggcgctgtttccgcatctcccggcaggaaagacacttgctctttctttagcaaatcttcgcagcaatatttcatctccgggcagaggtcgttcaataagagcatttccggatgaagagtctgaaacaacatacgggaatagattcccgtgccgcaaccgaactcaatcactttcgggcagggagaaggtagatgttccgtaagcaggtgaatcattttgtccgctatttgtctttgtacgtttgcttcttgcggataagtggcgatggctttggtgaaacgttctgcgattagttgtttgttcataataggtatttattgggtttgtaggattatgctctcaaagagttcctgttggtaatgggcagcttctgagtattcaagaatatctaccttgtttttccatgcaagccgttgattgtcaggtaggaatatacggtcattctttcctatgatggctttttgccatacgaagtctgaaggcggtaatgacaagtattgttgttgtatggcggctagttcttccttgagctcatcggccggacgttgcggagctactgtttgaaatactttgtattcggctgccgaaccgcacatccttctttgaaacttttgcagtgtttgttcggtcaatccttgcagtgttccttcaaatatagctggttcaatccctttcgtttcgtgtatgggatagggagttccattgatagcgatactatgcgagatgggcagagacgggtattgtttcatgagttgagaagctacccatacccccatagaccatgcgatgagacggatttcggaatactcttgtaataagtcggtatcgaactccaaagaacgatagtcataacaaaccatccaatccgtatctgtagggcggatttgcaggaaaggagtttcatccattccccagcctgcgaagaaaagcaagaggcgcttggaattattctttatgataaaatgttgtttcatccgttaatcaaagctataagttggtcgatttcatgttctgtgatgtccgctgtcaatgagaagcggatacgggaagttccttcaggtacggtaggtggacggacaggcaatgcgtagaatcctttacgttggagttcttccgcttgcagtatggcatcttcgctcgctcctataatcatggggacaatgtggcttactgaagggcaatggtatcctttgccggtaagtgctgtctttagtttctcactgatgcgcaggaggtgggttcgcttatattgaagagcggagagatgttgcaatacccatgctgtccattgaatattgacaggtggaagggcagtggtgaatataaaggtacgcatcttgttaatcaggtattcccgaataacctggcggcagacaatgtaagctcctgctgaggcgattgcctttccgaacgtgcctaccaggaaatctatatcgttgatacagtcttgttcttcggcacatcctagtcctttttctccccgtacaccgaaggcatgagcttcgtctacataaagaagaacattggaatagctctttttcaatcggacgagagcgcaaagatcggctttatctccatccatactgaaaatactttcggtaacaatgatgatttgtgcataaagattgtgattctcggaaaccaaacgttgcagttgggaggcgtcattgtggcgataacggatacatttggcggacgacaatctgattccgtctatcaggctggcgtgcaccagcttatcggcaagaatcagtgtttgcgcattgctgacggcagggagaatccctgtattggcatgataaccactgttgaatatgagtgcgctttctgctccgaacatagttgccaactgttgttccaatgcttgataatcggaaaagttacctgtcagcaatcgggaagaagaggaagtaggcagaaatgtttcgggagtcattgtctttaagaattcctctcttaatgatacatcattagccagtccgagataatcattggaggaaagattcaacatccgttgtccattcagaataacttcccgtccatcgtgaatcaatgtcgggagagaacggtagtttttcttttctttgagaacaagcagttcttggttgatagagtctaatatcattatttatgattttgggtaactactaattttgaataacgttgagtaatccggaggtcagtttacttagttgttcgggagtaatgatgaaaggtggcatcagataaaccaatttaccgaatggacgtacccaaataccctcttctacaaatcgctgttgcaggtatgccatattcaccggacgcttcatctcaattactccgatagcgcccaatacccgtacatcggctacttgcgggaactcccgtgcaggagccagctcttctttgagttggctttcgattcgttgcacattcttctgccagccggattcgagcagcaggcgaacggatgcgcaagccaccgcacaggcaagcggattgcccatgaaagtggggccgtgcatgaaagctcccggtgcatgattggaaatggtgtctgccacctgattgcttgccaagactgcggaaagtgtcatatatccgccggtcaacgctttaccgatacacataatatcgggctctactctggcgtgttcccaagcaaaaagtttcccggtccgtccgaatcctgtcgctatctcatcgaaaatcagaagaaggccatgcttccggcagagtttttccgcttcatgcaagtattgcggatggtagaaccacataccgcctgccccttgcacaattggttcaagaatcagtgccgccaactctctggaatgtttttcaatggtttcccgtaaagggatgatatcttccggattccattctccatcaaaacgggaagcgggggacgggacaaaataacgtacaggcaatgccgaaccaaaaagactgtgcatacccgtcaccggatcacatacagacatggcattccacgtatcaccgtgataaccggaacggatggtcacgaaattattcttttcgggctgtcctgccgcataccaatattgtacggccatttttaaggccacttctacggctaccgagccggaatctgcatagaatattttttgcatggaggaaggaactaaaggtaatagcaattttcccagttcgatggcggggttgtgtgtcagaccaccgaacattacatgggacatcttgtctaattgttcctttgccgcttggttcagcacgggatggttgtacccgtgtacggcgcaccaccatgaagacattccttcaatcaacacccgtccgtcttcgagagtgatggttgcgccgtccgcccgttttactttgtaaacagggagcggatcggttgtggaagtatatggatgccaaagatgttcacggtcaaattgggagctggcaaaatgataaccttcttcttgaatcatcttcttgtcctccgatactttagaaccgagtgtggtaagcaagtcgcctacgatagccgagttgataccgatatacagtgccttgtgcatagcttcgggagagagttgcgagcgtccgccggcaaaacggagaaaagccgtcggattgatgaaacggaacaggacgattgtccggagaatttcttcttcgttcaaaggcttttcgttttccaatggtgtaccgggaatcgggcttagcagatttatggggatggattgaacattcagttccttcagaataaaagcgaattcaatccgttgttccatcgtttctcccatgccgatgatacctccgcagcagatatccattcctacacggcgggcggcggcaagtgtggcaagtttctgcttttgtgtgtgggtggaacaaagttggggaaaataagaaggagcagtttccagattgcaatgataacgggtaattcccgcttcgtgcagggaacgcagttcttcttcattaagtagtcccaatgaggcgcaaagttggatagacgaatgtcgccgcatatggcggactgtgtcgcaaagttgggtaatctgtttgggagagggtttccgtccgctggtgacgagggagaaacggttgatgtcctgggcttcattatactgtgcctgtcggagacattcttcagcggggaggaggtcatagacttcggcttgcgtcttgtagtgggaggattgtgcgcaccatttacagttttcggggcatctgccggatttggcgttgatgatggagcacaggtcgaactcgtgcgaagcacgcgcgacggtaatctcatgtgcggcggcgtaaagcgcctcgctgtcggccatattggccagccaagcggcttgctcgggcgatatatcaatgcctgccagcacttggtctttaatttcttgaagtgtcataaatgtatgataagggatagtttgtgcagcattctgcttacgaagggcaacatcgactacattggtatgcagatgtccgatacatacttcgcgtcctaagctcgcaaaagcggcatagttctttcttccccaatagcggaaacgggaaagaagggcacgtgtgggctgtatgtgacgttgttgcttcactgattttctatttttgttcttttaaaacggggcaaatgtacaaagattctttggataagcaagcaagttgcctatttctaatactcccgctttgtttcctttttcctgtattctttgcgcaggtggaagttgaagccgacatatacctgaagagtgccgaacccattgtccaaggagaaattgttgcgatgatagttatagttctttccgacgaatgaagtgccgacaaaatattttccattgttatagacaacgcctgcccgaagcagaaaatccagattgaacttactataccatgctttcccttcctgcgtttctgcatccacatcggaggccttgtaagcaatggcgggagtgagcgacagacaagccagacagttgcgtgcgaatacccagttataagcatagccgaaactgatgttggcgttggtgtattttatcttgttgactttcatgccgggattcattctctcttgaatatatgccggaagttgctggtagtcaaagtcgagattatgttttgagatagagaacccggctatgaatgttcctgcattgcgccgttggttggtggactggctgaacgcggccggataagaaaacttccggttgttgaatatatagtataagttcagtcctttgatgtctaccttcaagccgctgaaatcttcggagtagtcggaaggtatttcatcatagaaacctctgatcttgtgaattttataattgtttcccgtgcggcggtagaagatgtccacgcctaatttggaactatacaggctcaaatcaaactctgtccctttgtttttccggtttgttttgcggtaaatatcatcaatgtcgacagaccatcctaagaagatccatctccaaccgaaatacaatcctatcttgttgtggggattgggagaaaagctaagcttctgcggttgaggaaattcgctggtgaccgagtaatactcaaagttgctgaaatgcgtagccatcaacgcgtagttatagcggttggggctgatgtagagcgtgtcgaagtcactgaaattcataaattttttaatcgctctcttgaaggcacttggcttgggggtggtgacagaatcttcctgtatgctgtcgtttacggttatacccgccttttcagactgtgcctgcaaggagaacgacactaacaaagagatatataaaacaagctgtcttaccatacggttccttataactgttgggaatgtcttttgtttcacgaatgtacgacctttcattgatttatgctagtaatcttctaaaaaatgttttgtttcctaaacaataaacttctatgtactgttagtatagctcgcaaatatatttaaagtcacagaaaattatgagaatctatttacgtttattagcagtgtttcttttgctttttgcaggaaacatattgtatgcggaagcgcaacaggaaaaacgcgtgacgggtacggtcatctctgagggggaacctctccccggtgtctctgtacaattgaaaggagcttcctccggaactattaccgatattgatggaaactattctattgaggctcccggctccggaactttggtgttccgttttgtaggaatgcgcacggtggaacaaccggtcaacaaccggagtgtgattaatattacgctggaagcggaaagtaaggagttggatgaggttatggtagtcgcttacgctactgcaaagaaatatagctttaccggagctgcttcgaccatgaaagcaggggaaattgagaagttgcagacttccagtgtatcccgtgtattggaaggtacggtgtccggtgtgcaggcaagtgcggcaagcggtcagccgggaacggatgcggaaatccgtattcgtggtatcggctctatcaatgcctccagtgctccgctttatgtggtggacggtgtgccatttgacggtagcgtcaatgctatcaacccagacgatatcgcttcgatgactgtgttgaaagatgcggcttcggctgctctgtatggttcacgtggtgctaatggagtgattatcatcactaccaagcaaggagaacagaactcgaaagcaacggtgaaagtgaaggcttcgttaggaggttccaatcgagccgttcgtgattatgatcgtgtcagtaccaatcaatattttgaattgtattgggaagcactccgtaaccggtatgccggaagtccggattatactccggcgaccgctgcagcgcaagcctccaaagatttggttaccaaattgatgggaggcggtcccaatccttatggtccgcaatatgcgcaaccggtgggcacggatggcaaattggtggagggtgcacgtccgttgtggaattccgattggagcgatgctatggagcaacaggcactccgtacggaactgaacctgagtgtttccggtggtggtaaagccaatcagtatttcttctctgccggttatctgaatgataaaggaattgcgcttgaatccggctatcagcgtttcaatatccgctccaacgttaccagtgaaatgacttcctggttgaaagggggtgtcaatctgagttttgcccattccatgcagaattatccggtttcttccgactctaaagtcagtaacgtgataactgccggacgtaccatgccgggtttttatccgatttatgagatgaataccgacggcagttataaattggatgagaacggagaccgtatctatgatttcggctcttaccgtccttccggttcgatggcaaactggaacttgcccgctacgttgcctttggataagtcggaacgtatgaaagatgaaatttccggccgtacctttctggaagctacgattatcgagggattgaagtttaagacaagtttcaatttcgatttgataaactataatactttggattatacgaatcccaagatcggtccggctaaggagaacgggggaagtgtcagtcggatgaatacccgtactttctcttggacgtggaataatattgctacgtatgacaagacgattggggaacatcatttcaatgttcttgccggtattgaggcgtattcgtatcgttacgatgaactgactgcgtcacgttcaaagatggcacaacctgatatgccggaactggtagtcggctctcagttgacaggaggatcgggatatcgcattgattatgcattggtggggtatctcacgcaattgttatatgattatcggaacaaatacttcttctcggcttcttaccgccgtgacggttcttcacgctttgcaccggaaacccgttggggtaatttctggtcgttgggtacttcctggcgtgtagaccgggaagagtttatggcaagtacttccgactggctttccgcactgactttgaaaatgagctacggtgcgcagggaaatgataacttgggtacgtattacgcaagtaagggactttattccatcgtttccaatttgggagagaatgcgttggtatccgaccgtatggcaactcctaatctgaaatgggaaacgaatctgaactttaatttgggaatggatttctcactgttcaataaccgtttctccggttcgttcgatttctttacacgccgttcaaaagatttgctttattcccgtccgattgctccctctctgggatatggttttattgacgagaatgtgggagctttgaagaatacgggtatcgaattggtgcttaacggaacggttatcaatcagaacggctgggtttggaagctgggtatgaacctgactcactataagaataaggtaacggaacttccattgaaagatatgccgcagagtggagtaaacaaacttcaggtaggtcgctcggtatatgatttctatatgaaagagtgggcgggcgtagatccggacaatggaaagccgttgtggtatgcagatgaactggacgctgatgataatccgacgggcaaacgtgtgacaacgagtgattatgcttcggccgattattattatgtcaataaatcctcgcttcctaaagtgtatggtgggttcaatacgtcgctttcctggaaagggttcgacttgtctgccatttttgcttatagtatcggagggtatatctacaatcgtgatataacgatgattctacataacggcagcctggaaggacgtgcctggtcgactgaaatcctaagacgttggacaccggacaaccgctacacagacgtgcctgctctaagtacgacttccaataactggaactcggcgtccactcggttcttgcagaataattcttatatgcggctgaaaaacctgacgctctcttacaacctgcccaaaccgtgggtcagtaagctggcattgagcagtgtgcaggtgtatgtgcaaggagataatttatttaccattcacaagaatcaaggattggaccccgaacagggaattaccggaattacctattatcgttatccggctatgcggactatttccggaggtattaacattgctttctaaatcagactaaattatgagaaaaataaaaatacaatctattctggcagccattgccggacttcttctggcaacgggttgcagtagcagtttcctggatacagatcccacagatgcggtgagttccgagaaagtacctgtgcccgaaaatgcggaggcgcttgtgaacggtgcctggtataatctgtttgactattcgagtacttatgccaatatcggttatcgtgcgcttcagtgtctggatgacatgatggcaagtgatgtcgtttcccgtccgaaatacggtttcaattcttcgtatcagttcgatgacattgctatatcttcaaacagcagaacggaatttgcctggtatctgatgtataaaacgatagataactgcaacacggctctttccattaaaggggattcggaagaactccggaaggctcaagggcaagcgttggtcctgcgtgccttttgctatctgcacttggtgcaacattatcagttcacgtatttgaaagataaagatgcgccttgcgtacctatttatactgagccgagcaataacactaccgttccgaaagggaaatcaacggtagctcaagtttaccaacgtattttcgaggatttggctttggcgcaggattatttgaagaattacgttcggagtggtgataaccagaagttcaaaccggatctggctgtggtaaacggacttttggcccgtgcctatttgctgaccgggcagtgggaggaagctgcaaaggctgccgcatctgctcgtaaggactattcattgatgacgactactgccgaatatgagggattcaataatatctccaatcaagagtggatatggggatttcctcaaatcccttctcaatcggatgcgagttataatttttactatttggatgcgacatacgtcggagcttacagcagtttcatggccgaccctcatttgaaagatacttttgttgaaggtgacatccgtttgcctttgtttcagtggatgcgcgaaggatatctgggatataaaaagttccatatgcgtgcggacgatacggctgatttggcgttgatgcgtgctgctgagatgtatctgatagaagccgaagcgaatgtccgcgacggtatggaattatctcaggctgtgattcctttgaatacgttgcgcaatgctcgcggagtagtggattatgatgtggcgggaaaatcacgggaagatgtgattaatgaaatcttgctggaacgtcgtcgagaactttggggagaaggctttgggattacggacatactccgcactcagaaagctgtagaacgtactgctttatcagaagaaatgcagaaaacagaagtagactgttggcaagaaggaggtggattcgccaaacggaatccattgggacattggttcctccgtttcccggacactacgccatttacagcaaatagtacttattacctgtatgccattccacaaaaagaaataaatgctaatcctaacttataaatagctctcttaattttttgactttaaccttaacttgtagaccggtatacgtcgcgatgatgcataccggtcatttttgtattattctgaaaaaaatgtcttatcgggatactatgtgcggaatatttgtacctttgtgaacagatatctcttaaaaataaaatatacatattaaataaactcagtacgcatgaaaacgaaacacgtaattacaatattgatggttatcatctccggttggggaatcgtatcttgtgatgatgataatgaacgtttcttcctttatcagatagatgaagtcgtttttcccgatcaagctattagtagtactgccataaacatagtaggtggcggtagtgtcggaatcacaggaggaaaagctccttatacagctgaaatagaagatgaacaaatagctacggtgaaggtcgatgaagatagggtaagaatatctcccgtaaaactgggaacgactagtcttatagtgaaagatgcggatgggttgaccgttaagattggagttaaagtggtggaatctgtacaaagatttatgagtaatgccgtatacgtgaagattgaagatgaaaatgttaatgaggcaaacaaagagacattagaagaattagaggctcaagtcattgccgatggttttttaaaagctaccggatatgtgaggtttgtgtataacactaaagatagcggtgaaatgacattgcttgcggaaaatacagctggtgctaaaataataactgctccttttgaaaaagtaattaagcagataggtgaagaatcatattctgcatttttagtaaactatgaagataggacacatgagttttacttaactgctcccgaaaggccggaaccggatacccgttcattgggacctatgccatgctggttggtggaagatgtgacggaaatatataaagcacagtattcggaactaggtttgacttctgtccgccgagtctgtattggtagcttaagccgttaaatatcggctataaagattcacatcttatagaataaagtgcccctcaaaagttcggattataacttctgaggggcattttatttggcttgttacaattttaaagaaacactatggttgccaatcaattttctttttcttcaaattgggtagaaagaaggttactaatcccaatagcggcatataagcacaaatattatatacgtattcaatgcttgttttatctgctaaattaccgagcacggcagaggctacaccggccactccgaaagcaaatccaaagaacagacctgatatcagtccgagcttggtcggaagcaattcctgtgcgtaaagtaatatagccggaaaagcggaagaaagcattaatcccacgcagaaactaagaataacagtccacatcagattggcgtgcggcatgagtaaactgaatggggcggctcccagaatagaagaccaaataacatacttacgaccgatacggtcaccgacgggacctccgattagcgttccgatggcagtagcaactaaaaaaatgaatagatacaattgtgattcctgtactgtaacattgaatttgtgaattagataaaacgtataataactggtcagacttgccatatagatgtatttcgagaagatcagtattaataagataccgatagaaatagcagttttatccataggtaggggaagaagaaccggttttcttacgctgacggtttgtgccttcatccggttcagataagatttataccatttgcagatcggatacatgaccacgatagctgcgatggccacaaatgcaaatatgaaaagatgttgtcgtccataaggtgcaaccagcaaagctaccaataacggccctaatgagcctccgaaattaccgcctacctggaacagtgattgggcgagtccgcgttttccgccggaagcaaggaaggtgatacgggaagcttccggatgaagtaccgaagagccgattccgattaagaacacagataatagtatccaatagagattgttggaaaatgctaagttcactaaacctaccattgtgaaactcattccgataggcaacgaccatgcaacgggatatttatcgaaaatgattccggtaattggctggaataccgaagctgaaagctgatagaccaatgtgataaaaccgatttgtgcaaaactcagtcctaaatcatctttaaatagcggataagctgctgaaacaacagattgtaaaaggtcattgagacaatgtgagaggcttaatgctattaaaatggagaacgtaattttccctacgggttgttcttgattttgtaccataatacctattatctattgaaatgttcctgaaaaattgaccgcaaaggtacataaacttttgcaaagtaaagagaaatatgagttttaagactaaggattgtaaattgtggttaattcatttttcattggctgaactattctttgcacttactgttgttaccttaaaaaggaggattatatgggctttatttggtatatcattattggtattgtggctggatttcttgctggtaaaataatgcgtggcggaggttttgggcttatcataaatctattgcttggtattcttggaggtgtgttaggcggttgggtgtttgcacttttcggccttgcggcttccggattgattggaagtctgattacttccacagtaggtgctgtcctggtgttatggattgcttcgttgttctcgaaatctcgatgagtagtagtattttatataatttattaatctaaaaaacgaacttaattatggaatgtagacatggtaatttctggattggactcggaatcgggtcgattctaggtgcggtagcttatcgcctctcacgtaccgcaaaagcaaaacaattggagaatgacatttatgatgcgattcatcgtataggtcgtgatgcggaagcggcagcagcttgtgctgaaaaaaaagcaatgaatttgggagttaaagctgtggaaaccggagctgacatcgccaataaagtagcggaggaagctgataaggtagctggtaaggtaaaggataaatgggaaaaataagaaaatcaggattggtaatcggcttcatttaagttgattaccagttttttatgatggttaactgctgtctgtataaattgaatattagttgtgtgtccgtgcacactttgcacgtttcatctttcttctcagtcttttctgagggtaaaactccctcttttttatacttctctttcctttggaatatactttttattaattattctgttgtatttcttatgtttaacaacatgaatgtatttctttgtttcttgttaaatatttgaatattagcggtatatcttctttgttctgtagtggtgtgtgcgcacacactattgcatgattcaataattcattttacttttgtcagcgaaaaacaagatacttcttattatatggataaagaattctcaaatattcgtattgtagacatcgctaaaatggctggtgtctctgtcggtacggtagaccgggttattcataatcgtggacgggtatctgaggaaaacagaaagaaagtacaggctattttagagatggttcactaccagcccaatcttatggcgcggtcattagcctctaaaaaacagtatcattttgttgccattattccgtcttttactcaaggagaatactgggaagctatttcggaaggtattgacaaagtagctgcggaaatggaaacatataatataactattaccaagctttttttcgaccaatataacaacaagacttttgatgatattacccgtaatttattggatgagaaggtggatggggtgttaatagccacattgtttacagattctgtgattcgtctttcgcaggagttggacagaaacgagattccttatgtttatgtcgattctaatattgaagggcaacatcaattggcttatttcggtacggaatcatacgatgcgggagtcattgcagcccgattgctgacggatcggctttcgcccacctcagatattttgatggcacggattgttcatagtggtaagaacgattccaatcagggtaagaaccgtagagatggattttgttattatctgaaggaggtcggattctccggaaagttgcatgaagtggaattgaaaatcagtgattcggtatataattttgccaagctcaatgaaatattcgagttaaatcctggtataaaaggggctattatattcaactctacctgctacattttgggaaattacttgaagacgagagggatgcaagcggtaaaactggtaggttacgacctcatcgagagaaatacccaattactttccgaaggtgttattactgcactgattgcgcagcgtcctgaaagacaggggtatgaaggaatcaagtcgctatgcaattatttgttattcaagcaaaaatcggaaaaggtgaacttaatgccgattgatattctcttgagagaaaatctgaagtattatctgaacaataaactataaacatataaatttttagaactatgaatgaattatttaacgtaaaaggcaaagtagttgtaattaccggtggagccggaatcttaggtaaaggtattgctgcatatcttgcaaaagaaggtgcaaaagtagtggtacttgacagaagtgaagaagctggaaaagcattggtagaaagtatcaaggcagaaggaaacgaagctaagttcctttatacggatgtaatggacaaagaagttctggaaggcaacaaagtggaaataatgaaagcgtatggacgcattgatgttttgttgaatgctgccggtggtaatatggcaggtgctacaatcgcaccggacaagacattctttgacttgcagattgacgcattcaagaaagttgtggatttgaatctgttcggtacagtattgcctacaatggtatttgctgaagtcatggttgaacagaaaaagggttctatcgtaaacttctgttctgaatcggctcttcgtccgttgacccgtgtcgtaggttacggtgcagcgaaagcagcgatcgctaactttaccaaatacatggctggtgaactggctttgaaattcggtaatggtctgcgtgtaaacgctatcgctcccggatttttcctgacagaacagaacagaacattgttgacgaatccggatggttcactgactgaccgttctaagactattcttgcgcatactccgttcaatcgtttcggtgaaccggaagacctttacggaaccattcattatctgattagtgatgcctctaacttcgtaacaggtacagtagctgttatcgatggtggatttgacgcattctcaatctaattttaacttttaattttttatttagcaatatgtatttatgtgaacaaacttggcgctggtacggtcctaatgatccggtgagcttatgggatattaagcaagcaggcgctaccggtatagtaaatgcccttcatcatattccgaatggcgaagtatggactgtagaagaaatcatgaagcgcaagcagatgattgaagaagtaggacttacatggtctgttgtagagagtgtacccgtacacgaacatatcaagacgcagaccggcgatttcatgaagtatattgagaattataaggaaagtatccgtaatctggcaaaatgtggagtaatggtagttacttacaactttatgcctgtattggactggacacgtacggaccttgcctatacaatgccggacggctctaaagcactccgttttgaaaaggcggctttcatagcttttgatcttttcatcttgaaacgtccgaatgcggaaaaagactacactccggaagaaatagctaaggctaaagcccgtttcgagcaaatgagcgaggatgataagaaactgctggttcgcaatatgattgccggactgcccggttcggaagaaagttttacagtggaacagttccaggaagctttggaccgttataatgatattgatgcagaaaaacttcgttccaacttgattttcttcttgaaagaaattgcccctgttgccgatgaagtgggagtgaagctggtgattcacccggatgatcctccttatacaattttaggattgccgcgtattctgagtacggaagaagatttcagaaaactgattgaagccgtacctaatgagtccaacggtctttgtttgtgtacaggctctttcggtgtgcgtgccgataatgaccttgcaggtatgatggaacgttttggcgaccgtgtgaactttgtgcatttgcgcagtacgcagcgtgatgaggaaggcaacttctacgaagccaaccacttggaaggaaatgtagatatgtacaacgtaatgaaggcttttattcttttgcaacagcgtcgtaaatgctctatcgccatgcgtcccgaccacggacatcagatgattgatgacttgaaaaagaaaacaaatcctggatattcatgcttaggtcgccttcgcggcttggcggaacttcgcggcttggaaatgggtatcgccaagtctatcctctaatcgaagtacatagttagcactttattatcaaacactacggctattattgattgaaataatagttgtagtgttttttatttgccttcttccgcttctatcgtatcatcataagttaatccgtgaatagccgttgtccattgtgtattgtaattgggagcaggatggattgttcgtgtaaaaatattcattattagagaaaagccttacctttgtaagggattgaacatttttatttaatggattgaacatttttgctcaagtgaataaacattttatagatgatgggatataaaagagaacaatattcagaagtgatggcacgcattaatgaacctcgcggaaaatgcaggttattgttgggccacgccaagtgggtaagtccacattgattggtcaagtccttgaagtctgcaatatgccttatgacagttattcggctgatgatgtcgtaggtgcatctgcagactggctggcaggtgtatggcagacagctcgtatgcgtatggacatacgtggggaagggaaacgcctattggtggtagacgaaatacaaaagataaataactggagcgagactgtaaaggctgaatgggacagagatacccgtgaaaaacgtgaacccatagtcgtattattggggtcatcacgcatgttaatcgaaaagggactcaccgaatcattggccggcagatatgagctaattcggctgacacattggactttccctgaaatgagagaatgcttcggttggaatctctaccaatatgtctattttggtgggtatccgggcgcagcatcttatatcaccgatgagcgtcgttggcgaaactacgtcaaagactctttggttgaaccatccatctcgaaggatgtgctgatggatacaaaaatcatgaagccacaactactccgccaactgtttgaactcggtagtagttatagtggcgagctactgtctcttaccaaagtggccgctcagcttcaagatgtaggcaatgtcaccacgctggctagttacctccatttttgggatgaatgtggtttgctgtgtggtttacagaaatatgccgaagacgatgctcgcaaatacaactcaattcctaaatttcaagtccataacaacgctttgcgcaacgtgtatgctgataaggacttcacggaaatggctgaagatcctaaagcttgggggcattatgtagaatcagcagttggtgcctatattgtaagtcaggcacagatttgtgattacaaggcttattattggcgtgatagccacgatgaagttgactttgtgcttcatagaagaggcaagacaatcgccatcgaggttaaaagcggaagacgaaccaccaacaatggcttgcctaaatttgaaaaagcttatcatccgtatagggcctttgtggtcggttccggaggcttatcctttgaagagttcctatcaatagatttgaatttactcttcaagtaggcgtataacaaaaatttgcccattcaaaaaaagaaagaggcttacctgtcatcgggtaggtctctcgttttcctcctactcgattttgtttttttcggttcgggaatgataagcaaagctatttgtgcgcaagcttcagcatctgccaatgcgtggtgatggttggtcaggtcatatccgcaccgggcggctactgtgtgtaattgatgattcgggagttcttttccaaacacttttcttgaggcgcggcaggtgcaatagaatttatatggaggataagtcattccatacagttcatgaaccgcacgaaggcaaccctcatcaaaagggctgttgtgagctaccagtggcaaaccgtctatcagcggtttgatttccgcccatacttctggaaaatcatccgcttctatcgtgtcatcgtacgtgagtccgtggacagctgtcgtccattgggtatagtagttgggggcaggacgaatcaaacgatagattttgtttataatctttccttcctttacaatgacaacaccaacactgcatatgctagtacgtttgccgttggctgtttcaaagtcgatagcagcaaaattcctcatttatttttttattttgagatacaaatgtatgaattagaatttattctctctatatttgtttgcaaaatatatccatgtatacagaatatcagccttctcatttacttgttccctatattgataactattgggagtttaaaggtaatccggattatggtatgcgcatccatattctgccggatggttgtaccgattttatatttacgctgggagaggtggctaatgctgttgaagaagggagtctgattatgcaaccctatcgttcctattttgtaggacctatgacaaaatattcggaactcgtcacttatacagaatcgattcacatgtttggcgttcgttttttaccttgtggtttgtcttgctttacaaacctgcctctacacgaatttgtgaatagcagagtcagtactaatgagatgaaggctgtttttgatgacacttttattgaaaaattaggtgagcagaagcatgtcacagatcgaatacgagtagtggaagaatatttgctggcatatttggcgcgtcattatcagcctgccgattctcatgtcgctat

SEQ ID NO: 11743 - DNA, 78802 bp, Unknown
  gut microbiota DNA sequence
aatgttgaaacggctgcaatagtccaatggaagaaaggtggtttgtagggtatctctcctccattatttctcggcaaaatccagttgtcgctttccaacatagaataggatacaatcgattcgcggggctcgcctttggtgtgatactccggcagcccgagaaaaggaaggatcgttactacgcaaatgactaatagtagccagaaagctttgttagaagtcaatgttttcatatttatttgttttgaattttatatcatatttattttcttccgaagtccgccgggatttctccccattctttcgtttcccatttgaggatacgggtagtgtaggtattcgtgctcagccacctttccgcccgttctatcaattgaaatagtgcttctgtttcctcatttcgggggagtttggtcttgcacttcttttgtcgtacccaactgatggcattgacactgtcgctataaatgggcatatcgaatcctttctgtttcaatagcgccagtccgtgcacgatagctaaaaattctccgatattattcgttcctttcatcggaccgaaatggaagatctcttgtcggctggctatgtgtacaccgcgatactccatagggccgggatttccactgcaagccgcgtctaccgccaggctattgtctatcacggaaggaggcaacaggtcggaggatatcttttcatttttcttttttgcgttttttcctatataagcgtatggtgaggctgagagtgcgcgttcggcttcttcgcgggtgtcgaaagatttatatttggcgccttcataccctttgatttggagctggcaatccgtccaggaggtataaactccgggagtgacgccttcccatactacgtagaatttctgtttagccataaaagataatggtttattcggctgcgaaggtacgaatatattctctaactgaacaagttagtagagttacttgttataaaaaaaagagagtttaagaaatatcatatataagaaaggatatattatggaaagatcttttagtgaagcattaaaacatcgtcggacttactattcaattactaatcaatcacctatatccgatcaggaaatcgagtgtatcgtgagtacggttgttcgtcacgtgccttcggcatttaattctcagtccacacgcgtggtgttactgctgggtgagtctcacaagaaattgtggaaaatcgtgaaagacgctttgaagaagattgtgccggcagacgcctttgtgaaaacagaggagaagatagaccactcatttgcctgtggatatggaactgtgttgttctttgaagatcagaaagtagtcaaagggcttcaggaagcttttccctcctatcaggaaaactttccgggatggtcgctgcaaacttccgccatgcaccaactggctatgtggacaatgctggaagatgtgggcttcggagcgtcattgcaacattataacccgttgattgacgaggaagtgcgtcggacatggaacttgccggagcattggcacttgattgccgaaatgccgttcgggcttcctgccgaaaaaccgggagaaaaagaattccaaccactcgaagaaagagtgaaaatctttaaataatgaaataaatgactaattttgcaggtaaaattagtcatttatgattcgtatcttccttaccggctatatgggcgccggaaaaacgacattgggcaaggcttttgcccgcaagatgaatataccgttcattgatctggattggtatatcgaagagcgtttccacaaaacggtgggagagttattcacagaacggggtgaggccggattcagggagctggagaggaatatgcttcatgaggtagccgagttcgagaatgtggtaatctctacgggtgggggagcgccttgtttttttgataatatggagtttatgaatcgggcaggtaagacggtttttctggatgtgcatcccgatgtgctgttcagacgcttgcgtgtggccaagcagcagcgtcccatccttcagggaaaagaagatgacgagttgaaaacttttatcatacaggcacttgaaaaacgcgcgcctttttatcatcaggcacattatatctttaatgcggacgaattggaagaccgatggcagattgaaacatcggtgcaacgtttgcaacaacttctcggattatagcataattgaacgaattaataagcaattaattggcaagatgtagataaatctgtatttttgccctccaattatttactaaaaatactgaattacagaaaaatgagaaagtggcgtattgaagattctgaggaactctacaacatcacaggttgggggacctcctactttggtattaatgacaaaggacatgtcgttgttacaccgcgtaaagacggagtgactgtcgatctgaaagaattggttgacgagttgcagttgcgggatgtggcagcccctatgctggtacgtttcccggatattctggacaaccgtattgaaaagatgtcgtcttgtttcaaacaggcggctgaggaatacgggtataaagcgcagaactttattatctatccgatcaaggtcaaccagatgcgccctgtagtggaggaaattatcagtcacggaaagaagttcaatcttggactggaagccggttccaagcctgagctccatgcggtgattgccgtcaatacggattccgactcattgattgtctgcaatggttataaagacgaaagttatatagaactggctttgcttgcccagaaaatgggtaaacgtatcttcctcgttgtggagaagatgaacgagctgaagctgatagcgaagatggcaaaacagctgaatgtggaacccaacatcggtatccgtatcaaactcgcttcttccggtagcggaaagtgggaagagtcgggaggagatgccagcaagttcggcttgacttccagtgagttgctcgaagcactcgattttctggaaagtaagggcatgaaggattgtctgaagttgattcatttccatatcggaagtcaggtgacgaagatccgccgcatcaagaccgccttgcgtgaggcttcacagttctatgtgcaacttcattcgatgggattcaaggtcgagttcgtcgatatcggtggcggattgggagtcgattatgacggaacacgttcatccagcagtgaggggagtgtcaattattcgatccaggaatatgtgaacgattcgatttccactttggtggacgtgagtgacaaaaacggtatcccgcatccgaacatcataacagagagtggccgtgccttgacggcgcatcattcggtacttatttttgaggtgctcgaaacggctaccttgcccgaatgggacgatgaagaggagattgctccggatgcacatgaactggtgcaggaattgtatgccatttgggatacactgaaccagaataagatgttggaggcttggcatgatgcgcagcagatcagggaagaggcgttggatttgtttagtcatggaatcgtggacttgaagacccgtgcgcagatcgagcgtctgtactggtcgatcactcgtgagatcaatcagattgccggtggtttgaaacatgcgcctgatgaattccggggattgtctaagctgttggcggataaatacttctgtaacttctcattgttccagtcactgccggactcttgggcgattgaccagatattcccgattatgcctatacagcggttggatgaaaagcccgaacgttcggctactttgcaggatataacctgtgactcggacggtaagattgccaactttatttctacgcgtaatgtagctcattatctgcctgtacatgctttgaagaaaacggagccttattatgtcgctgttttcctggtgggggcttatcaggagattttgggagatatgcataatttgttcggtgacacgaatgccgtacacgtttcggtgaatgagaagggatacagtatcgaacagattattgatggagaaacggtagcggaagtattggattatgtgcaatacagtccgaagaaactggtacgtacactcgaaacttgggtgacgaaatcggtgaaagagggtaagatctctttggaagagggaaaagaatttctttccaactaccgttcgggactttatggatatacgtatttggaataataatgagagaaaaactaacagtaattaaggtgggtggcaaaatcgtagaagaggaagccacccttcgtcagttgttaaatgactttgctgccattgaaggacacaaagtgctggttcacggcggcggtcggtcggctacaaagattgccgcacaactgggcattgaaagcaaaatggtgaatggtcgccgtattactgatgtggagacattgaaagtggtaactatggtgtatggcggtttggtcaataagagtattgttgccggactgcaggcgcgtggagtgaatgcactcggattgaccggggcggatatgaatgtgatccggtcggtgaaacgtccggtcaaggatgtggattacggatttgttggggatgtggaaaaggtggatgcaactttactgtcggatttgatacacaaaggagttgttccggtgatggctccgttgacacatgacggacagggaaatatgctgaataccaatgcggatacgattgccggagagacggctaaggctttgtcggcactgtttgatgtgacgttggtgtattgtttcgaaaagaaaggagtgctgcgtgacgagaacgatgacgatagtgtgattccgcagattacccgtgccgaattcgaacaatacgtagccgacggcgttattcaaggcggtatgattccgaagttggagaactcttttgaagcaataaatgcgggggtgtcggaagtgataatcaccttagcgtcagcgattaacgacaatggaggaacaaaaataaaaaaataattcaaaaaaaagtagtgggcgcctgtaacttttcgtatcctagcccgtcattattatagagatgcaagaaatcagcttccgaaacgatattttgccgttgaaagataaactctttcgattggctctcagaattactctggatagagctgaagccgaggatgtcgttcaggataccatgataagagtgtggaacaagcgtgatgagtggccgcaattcgaatcggtcgaagcctattgcctgattgtggcaaagaatctggcgatagaccggagtcagaagaaagaagctcagaatgtggaactcactccggaaatggaggaggagcctgatgccaatagtccgtatgaccggatggttcatgatgaaaaaatgaggatcattaacaggctggtcgacgaacttcccgaaaaacagcggcttatcatgcaactgagggacattgaaggtgaaagctataaaaaaattgcagcccttctgaatctgaccgaagaacaggtaaaagtaaatctgttcagagccagacaaaaggtgaaacaaaggtatttagaaattgacgaatatggattataaagatatagaacagctcctcgagcgatactggcaatgcgaaacttccgttgaggaggaagcaacattgcgcgacttcttcgcaaaggaagaagttccggctcatctgctccgttataagaacttgttcgtttatcaacaggttcagcaagaggtagggctgggcgaagactttgacgcgcgtattctggcagaggtagagccggtggtggtaaaagcaaaacgcttgacgctggtcggtcgcttcgttcctctcttcaaggcggctgccgtaattgcaatcatcctttctttggggaatgtggcacaacattctttctccggagatgacggaagtgtattggcggcagataccattggtaagcaggtaaccgcaccgtcggtcgcaatctcgaatgacgtgaaagcggatcaggcactcgttgacagtttggcgaggattgatcataaggcgcacgttatgaacgaatagacattttcatttgctttaaacatataatatagttagtgtgcttaattaaaacaacaacgaaggcgaaactgtgaagttttcaattctctcaattttttagattaaaactaactaaataaatgggctaccgcgtgatgcagtagcccttttatgcttttaaacggtctttatttaaactgtctttatttgatctgccgtatattttttcttggagcatccacttcttgaggatctcctttataggcaatatcaccgcttcctttgacgcgggcaaccagcttctgactggcatagcaactgatgttgccggagccgctaatgcttgcgtctgtgttttctgcctgcaaatcggcggcctgaatatttcctgatccggcaatagaatagctcgcttgaatggctttgccgttcagattgatattgcccgaaccggaaatacttgcttgacattcctgactctctatttgttgtagtcttacatctcccgagccattaattgaaacggccattttttggcaattgaatccttctccctgaatgttgcccgaaccgttgatgtggaattcaatatctttagaggtttgtatcccattgattaatcttatatttcctgaaccgttgaccgacagtttattcagctccggagcaaaaacttttatttccagttttcctttccagatagtgacattcttcttgaattttataatgaatgtactaccctccacatacgtttctataagtggtatgatgttgtcggaaccatgaatttcgacatggctgcatgtgtcttgccaataactgatgttggcacttcccactagtttgatttcattgaagtggtcggctttcacttctttggagatgtaattcttgctgcctacgatgtgttttccctgcaagcaagagccggcagtaagtactagaaacattcccgtgactaatacgagcaataaacttgttttcataattacgcttttttatgattgatataatggttagacggaagaatttgatctaaagttgcatcttccataaagtttttcgttagcgtcttcttttttattacttttgtggctgttgataggaggattataatggataagattatagaagatgatgagttagggcgtttggtgatacgcgtcaattcacgtgcgaaaagtcttgtgtttcgtaccaagagtgatgctgtttatgtttcagttcctcctggtaccaccctgaaagaagtgaaactggccatagagaacctgcgtggaaaacttctggcctcccggcaaaaaatcgctcgttcgtcgattggtttgaattataagattgatgcggagcattttaaactatctttggtgtcgggcgagaaagatcagtttctggctaattcccggttgggtgtcatggagatcgtttgtccgcctcatgctgattttacagatgaaaaactgcaaagctggttgcataaggttattgaagaatcattgaggcgaaatgccaaaagtattctgccttcacgtttgaccttcttgtccaagcaatgcggattgccctattcgagtgtgaaaataaactccagtcagggcagatgggggagttgttcggctcgaaaagctattaatttatcctattacctggttttgctgccttctcatttgatagactatgtgttgttgcacgaattatgccatacccgcgagatgaatcatagcgaacgattctgggcattgctgaatcaatttacagaaggaaaagcattggccttgcggggagaattgagaaagtaccgtacggaaatataaaatgctttacagccaagataatatttttgcattgtcacgaacttagtttattctatcttgggtaaagccttgtaagctcctatttctggctgtcttctaaatcttatacattcctgatgatggttcgttatgatacgtaatagggggatatgtctttattatttggctaattgtttaatcccgtccgattctttttcaaactgataagcccctccttgttcgctaagatcaaacgtagagactagttctgtgttattatctacgatcaataaagcgctttgttctgcaaaacgtcctacttctaccgtgtaaggttcttccgatatggttttattggagataagactgtcgttgacgaacaaagagatagaatctccggcaaaaccttttaccagactgattgtatagctttcgatgaaatgacgttcttcctgcttttcccgttgtagccgcatactcatgtatacgaaaataacaacgacaaagatgacggcaaaagccagaattccgttgcctaccatgaactgtttattggtgtttagacgatgtgccatagtgcttatttttttaattgcggtgtaaagatacaaagataaggctgttaattcatactttttttctttaatgttttgtagtcgaacagattatttatatctttgcaaccgaaaacggatgaaaggtggaggggcgattaagctcctttttttgttcttatatagttaataaatgatagaaaagaaaactgtttgtcagattgtagaagagtggctggaaggaaaagactactttctagtagaagtgaccgtaagcccggatgacaagatcgtggttgagatagaccatgcagaaggtgtttggattgaagattgtgtggagcttagccgctacatagagtcgaaactgaaccgtgaagaggaggattatgaactggaagtgggttcggccggtatcggacagccctttaaggtgctgcaacagtattacatccacatcggacaggaagtggaagtgatgactaagggtggacagaaactgaccggtgttctgaaacatgcagatgaagagaaatttacagtgtctgtgcagaagaaagtgaaaatggaaggtgctaagcgtccgaaactggtggaagaggacgaaaccttcacttacgagcaaataaaatatactaaatacttaattagctttaaatagttatggccaaaaaagaagaaacaatcagcttgattgatacattttcggaatttaaggaactgaaaaatatcgatagaacgacgatggttagcgtactggaagagtcgtttcgtagtgttatcgcgaaaatgtttggcaccgatgagaattacgacgtgatcgtgaacccggacaaaggggacttcgagatatggcgtaaccgtgaagttgtggccgatgaagacctgacgaacccgaatatgcagatctcattgagtgaagcgcagaaaatcgacgcttcctatgaggtgggtgaagaggtgactgacgaagtgatctttgccaaattcggtcgtcgtgctatcctgaatctccgccagacattggcttccaagattctggaattggaaaaagacagtatttataataaatatatagataaggtaggtacaatcatcaatgcagaagtttatcaaatctggaaaaaggaaatgttgcttctggacgatgaaggaaacgagttgctgttgccgaagacggagcaaattccaagcgatttctatcgtaaaggtgaaacggcccgtgcggtggttgcccgcgtggacaacaagaataataatcctaagattatcttgtcacgtacttctcccgttttcctgcaacgtctgttcgagatggaagtacccgaaattaatgatggtttgattaccatcaagaagattgcccgtatccctggcgaacgtgccaagatcgcggtagaatcttacgatgacagaatcgaccctgtaggagcctgtgtaggtgtaaagggaagtcgtattcatggcattgttcgtgaacttcgcaatgagaacatcgacgtaattaattacacatcgaacatctcattgtttatacagcgtgctttgagcccggctaagatttcttctatccgtctgaatgaggaagagaagaaagcggaggttttcctcaaaccggaagaagtttcgctggctatcggtaaaggcggtttgaatatcaaactggccagtatgttaactgagtacactatcgacgtgttccgtgagttggatgagagtgtagctgatgaggatatctatcttgacgagttcagagacgaaatcgacggatgggtgatcgacgctatcaaagctatcggcatcgatacggcgaaggctgtgttgaatgctcctcgtgagatgttgattgaaaagacggacttggaagaagagacggtggacgaggtaatacgcattttgaaatcggagtttgaagaaagtgagaattgaaaattgagagttgagagttgggagtgaaagaaatccatactcattccactctcaactttcaattctccactctcaacttcttaaagctccatttattcattaaatttaaaatatgacgataaggttaaacaaagttacaagagatttgaacgtaggaatcgcgacggtagttgagttcctgcaaaataaggggtataccgttgaggctaatcctaatacaaaaattagcgaggagcaatacgctatactcgtaaaagagtttagtacagataagaaccttagacttgagtcggagcgtttcattcaggaacgtcagaataaggatcgtaataaggcgtcggtttcgattgaaggctttgaaaagcaaccggaaaaaccgaagtcggaagatgtgatcaaaacagtcgtaccggaggatgcacgcccgaagtttaaacctgtcgggaaaattgacttggataaattgaacggtcgtagaactgagaaagttgagaaagaaccggaacagaagaaagaaactgttgaagaacgtccagtagctcaaccggaagtgaagaaggcacctgaggtgaaggtagaagaggtggtagcacctgttcaggcggaacctgtggctaaacaagttgaaccggtcaaacagacagaaccggtgaagcaaccggaggctgtaaaaccggaaccggtgaaagagtcggaacctatagtggaaaagcaaccggcagaagttgaaaaagtagtggaggaagtgattaaagaagagccgaaggtagaagttgcacctgtgaaggcggaagaacattgcagcatggaacaacctgtgaaaacagtatcggcggaagtagccccggagacaacggtagagaaagaaacttctaaagaagaagagatattcaaaatccgtcaaccggaattgggtgcgaaaatcaatgtaatcggtcagattgacttggctgcattgaaccagtctacccgtcctaagaagaaatcgaaggaagagaaacgccgtgaacgtgaagagaaagagaaaatccgtcaggatcagaagaagttgatgaaagaagctatcatcaaagagattcgcaaggatgactcgaaactgcagaagggtggagtgaaagataatgttgacgcagccggaaacaagaaaaaacggaaccgtatcaacaaagagaaggtggacgtgaacaacgtggctacttcgggctttgctgctccgagaccgaatgtgcaaggcaaaggcggtaacaatggtggcaacaaccagggtggcaataataaccgtaaaaataataataaggatcgcttcaagaaaccggttatcaaacaggaggtaagcgaggaagatgtagcaaagcaggtaaaagaaactcttgctcgtctgacaaccaaaggtaagaataagacttccaaatatcgtaaagagaaacgcgagatggcttccaaccgtatgcaggaattggaagatcaagaaatggcggacagcaaggtattgaagctgaccgaattcgttacggctaatgaactggcaacgatgatggatgtttctgtcaaccaggtaatcgccacttgtatgagtatcggtatcatggtttccatcaatcagcgtctggatgctgaaacaatcaatctggtggctgaagaattcggattcaagaccgaatatgtaagtgcggaagttgctcaggctattgtggaagaggaagacgctccggaagatctggaaccgcgcgctccgattgttacggtgatgggacatgttgaccacggtaagacttcattgcttgactatatccgtaaggcgaatgtgattgccggtgaggccggaggtatcacacagcatatcggtgcatataatgtgaagttggaggacggacgccgtatcacattcctcgatactccgggtcatgaggcgtttaccgctatgcgtgcccgtggtgcgaaagtaacggatatcgccattattattgtagctgccgatgataacgtcatgccgcaaacaaaggaagcaatcaaccatgcgatggcggcaggtgtgcctattgtctttgccattaataaggttgataagccgacggcaaatccggataagattaaggaagaactggctgccatgaactatctcgttgaagaatggggtggtaaatatcagtcacaagatatctctgccaagaaaggcataggtgtggaagatttgttggaaaaggtattgctggaagcggaaatgcttgatctgaaagcgaatccgaaccgtaatgctacgggttccatcatcgaatcttcattggacaagggacgtggatatgtagctactgtgctggtatctaacggtactttgaaagtgggagacattgtattggcaggaacaagctacggacgtgtgaaggcaatgttcaacgaacgtaatcagcgtattaaggaagcaggacctgccgaaccggcattgattctgggattgaatggcgctcctgccgcaggtgacacattccacgtggtagaaagcgatcaggaagcccgtgaaattaccaacaaacgtgagcagttggctcgcgaacagggcttgcgtacgcagaaaatccttacattggatgagttgggtcgtcgtatcgctttgggtaacttccaggaattgaacatcattgtgaagggtgacgtggacggttctgtcgaagcattgagcgactccttgattaagttgtctaccgaacagatccaggttaatgtaatccataagggtgtgggagcaatctccgagtcggatgtttctctggctgccgcttcagatgcgattatcgtcggattccaggtacgtccttcgggtgctgccgctaagatggcggaacaggaaggtgtcgatatccgcaaatactctgtcatctatgatgcaatcgaggaggtgaaagctgctatggaaggtatgttggcaccggaactgaaagaacaggtgacagctacgatcgaagtgcgtgaagtattcaacatcacgaaggtgggacttgtagccggtgcgatggtgaagaccggaaaggtgaaacgcagcgacaaggctcgtttgattcgcgatggtatcgttatctttaccggaaacatcaacgctttgaaacgcttcaaggacgatgtgaaggaagtgggtacaaacttcgagtgtggtatcagtctggtgaattgcaatgacatgaaggtgggcgatatgatcgagacattcgaggaaatagaagtgaaacagacattataaactgtactgtattgagaataaacggaggcacagagtgaattataactccgtgcctcttttttctttatagaaaggaatatgacaacgattgatataataatccttatagtagtgggtgcaggggcgattgtaggctttataaagggctttatccgtcagttggcctctatcttgggattgatagtcggtttgctggcggcaaaggctttgtatgcttctttggcggagaagctttgtccggcagtgacagattcgatgaccgttgcgcaggtattggctttcataatgatatggattgccgttccgttgatttttgtgctgattgcctctttgttgacaaaagcgatgaaagccatttcgctgaactggttgaaccgttggctgggaagcgggttgggagcgcttaaatttctgttattaataagtgtggtgattggagcgatagagtttgtggatggcgataataagttaattagtgcaacaaaaaaggaagaatccttgttatattatccgatggagacgtttgcgggaattttttttcctgctgcaaagaatatgactcaacaatatatattagagaataaagatgcaacaagaagaacccaataaatatgtaaaggaactgacgcaggagaagtataaatatggcttcaccacggaagtgcataccgatgtcattgagcgtggactcaatgaggatgtgattcgtttgatttcatcgaaaaagaacgaaccggaatggttgctggagttccggctgaaagcgtaccgccattggctgacgctggaaatgcctacatgggcacatctccgtattccggagattgattatcaggctatttcatactatgctgacccgacgaagaagaaagagggaccgaaaagtatggaagaagtagatcctgaacttataaagacgtttaataaactgggaattcctctggaagaacagatggctcttagcgggatggcggtggatgcagtaatggattccgtatccgtaaagacgacattcaaggaaacattgatggaaaagggaattattttctgctcgttcagtgaggcggtgcgcgaacatccggatttggtaaagaaatatatggggtcggtagtgggttaccgtgacaatttctttgccgcactgaattcggcagtgttctcggacggctcattcgtctatataccgaagggagtacgttgtccgatggaactttccacctatttccgtatcaatgcccgcaacacgggacagtttgaacgcacattgatagtggcggatgatgattcgtatgtttcctatctggaagggtgtacggctccgatgcgggatgagaaccagttgcacgccgctattgtagaaattgttgtacacgaccgtgcggaggtgaaatacagtaccgttcagaactggtatccgggagattccgaaggtaagggcggtgtatataactttgtgacgaagcgtggtaactgcaaaggggtggacagcaaactctcttggacgcaggtggagaccggttcggcaattacctggaaatatccttcctgtattctgacaggtgataattcgacggccgagttttattccgtagctgtgacaaacaattttcagcaggcggacaccggtacgaagatgattcatttagggaagaatacccgtagtacgattgtaagtaaaggtatctctgccggacatagcgagaactcctatcgcgggttggtgcgtgtggcggaaaaagcggataatgcccgtaactacagtcagtgtgactcgctgttgctgggggataaatgcggtgcgcatacgttcccgtatatggacattcacaatgagacggcggtagtggagcatgaagctacgacgagcaagatcagtgaagatcagattttctattgcaatcagcgtggtatcccgacagaagacgctatcgggctgattgtgaacggatatgcgaaagaagtattgaataagcttccgatggaatttgcggtagaagcacagaagttgcttactatttcgttggaaggaagcgtaggataaatgaattttaatcaagattatgttagagataaaagacctgcatgccagcatcaatggcaaagagatattgaaaggcattaacctgacggtaaagccgggcgaagtacacgcgattatgggaccgaacggttccggtaaaagtacgctttcctccgtattggtgggtaatcctgcttttgaggtaacgaaaggttcggttactttttatggaaagaatctgttagaactgagtccggaagaccgcagtcatgagggtattttccttagtttccagtatccggtagagattccgggtgtgagcatggtaaactttatgcgtgctgctgtgaatgaacaacgcaaatataaaggtctgcctgcactgaccgccagtgagtttttgaaactgatgcgcgagaaacgtgcggttgttgaactggacaataagctcgctaaccgttcggtgaacgaaggtttctccggtggagagaagaaacggaacgagattttccagatggcaatgctggaaccgcgtttgagcattctcgatgaaacggattccggtttggacatcgatgcgctccgtattgtggccgaaggggtaaataaactgaagactcccgaaaccagtacgattgtcatcacccactaccaacgtttgctcgattatatcaaaccggatattgtgcatgtgctttacaaaggtcgtatcgtgaaaactgccggaccggaacttgctctggaattggaagataaaggttatgactggattaagaaagaagtaggagaatgacgatgaatgctgaacaacaatacatagatctcttctcacaaacggaagccatgatctgcaaacatagcgctgaggtgttaaatgcccctcgtgctgctgcttttgccgattttgagcgaatcggatttccgacccgtaagatggagaagtacaaatatacggatgtaagcaagtattttgaaccggatttcggtctgaatctgaaccgtcttgctattccggtcaatccgtatgaggtgtttaagtgcgatgttccgaacatgagcacagctctttattttgtggtcaatgacgcattctataataaggcactccctaaaacccatttaccggagggcgttattttcggtagcctgaaagaggtggccgaacagtatccggagttggtgaagaagtattatggtaagttggcggatacctccaaagatggtgtgacagcttttaatacgacttttgcacaggatggtgttatcttctatgtgccgaagaatgtggttgtggaaaaacctattcagttggtgaacatcctgcgtgcggatgtcaactttatggtcaatcgccgtgtgctgattattctggaagacggtgcgcaggcacgtttattgctttgcgaccatgcaatggataacgtgaatttcctggcaacgcaggtgattgaggtttttgccggagagaatgtggtattcgatatgtatgagttggaagagacacataccagcacggtgcgtttcagcaacctgtatgtgaagcaggaagcgaacagcaatgtacatctgaatggcatgacgttgcataacggtacaacccgtaatacaaccgaagtgttgttggcaggcgagggagctgaaataaatctttgcggcatggctatcgctgataagaaccagcatgtggataacaacacgagtattgaccatgcagtgcccaactgtacgagtaatgagctgtttaaatacgtgctcgatgatcaagcggtaggtgcttttgccgggttggtactggtgcgtcctgatgcgcagcatacaagttcccagcaaaccaaccgtaatctttgcgccacccgtgatgcgcggatgtatacacagccccagttggagatttatgcggacgacgtgaagtgttcgcacggagcgacagtgggacagcttgatgaaaatgcgttgttctatatgcgtgcacgtggaattgcggagaaagaagcgcggttgctgttgatgtttgcatttgtcaatgaagtgattgatacgattcgtctggatgcgttgaaggaccgccttcatctgttggtggaaaaacgcttccgtggtgagttgaacagatgtcagggatgtgcaatctgtaaatgaacataaaaatggatattcaaaagatacgtgaggattttccgatcttgagccgtacggtttatggtaagcctttggtttatttcgacaacggtgcgacgacgcagaagcctcgtctggtggtcgattcgttggtagatgaatattactccgtgaatgcaaatgtgcatcgcggcgtacattatctctctcaacaggctacggaactgcatgaagcttctcgtgagacggtacgtcagtttattaatgcccgtactactaacgaagtgatcttcactcggggaacaacggaaagcattaacctgcttgtctccagtttcggtgatgaatttatggaagaaggagatgaagttatcctttcggtgatggaacatcacagcaatatcgttccctggcagttgttggcagcccgcaaaggtattgccatcaaagtaatcccgatgaacgataaaggtgagctattgttggatgaatatgagaaactcttctccgaacgtactaaaattgtcagtgtagtccaggtttccaatgtcttgggcactgtgaatccggtcaaggaaatgattgcgacagcacatgcccatggtgtgcctttcctggtagatgctgcccagtccattcctcacatgaaggtggacgtgcaggatttgggagccgattttctagtgttctctgcccataagatatacggaccgacaggagtcggcgtgctgtatggaaaagaagagtggttggaccgtctgccgccttatcaaggaggaggagagatgattcagcatgtctctttcgagaaaacgacgtttaatgaacttcctttcaaatttgaagccggcacaccggattatatcggtacgaccggattggcgaaagcccttgattatgtgaacggtatcggcatggaacggattgcggatcacgaacatgaactgactaattacgctttgcgacgattgaaggaaattcccgatatgcgtatattcggtgaagcttccgacaggggagctgtaatttctttcctggtaggtaatattcatcactttgacttagggacgttattagaccgtttgggtatcgctgtccgcacaggacatcattgtgcacaacctttgatgcagcgacttggcattgaaggtaccgtcagagcttcgtttgctatgtacaatacgaaagctgaagtagatgcattggtggcaggaatcgaacgtgtcagccgtatgttttagtccataaaacaaaatagtctcatatattaaatcgctgttccttgaaggaatggcgatttttttattctttaactaaaaaaagttccctccgagtgcagttatttggagtttgatgcgtctaatatataaaacgaatatttggagggtcgtgagactatgcttatattataaattctctctctttaacattaatggcagctatatcgtaaaatacatacggtatagctgcaactttttcatggacactgctattcatccctttttgattttctttcttttttacttgcttttttcgattgatttccatatttttagcggttgtaaaccctttaataattttggatctatggatgacattcttttctggctggttccggtcgcttccgtgttggccctctgttttgcctattactttcataagcaaatgatgaaagagagtgagggtacacctcaaatgataaagatagctgccgctgtgcgcaagggagctatgtcttatttgaaacaacagtacaaaatagtaggttgcgtattcttgggattggtgattttgttttcgattatggcatacggcttccacgtacaaaacgcatgggttcccattgccttcctgacaggtggtttcttctccggtctttccggttttcttggaatgaaaacggctacttacgcttcggcacgtaccgctaatgcagctcgcaattcactgaatgcggggttaagaatcgctttccggagcggtgcggtgatggggctcgtagttgtcggtctaggtttacttgatatttccttttggtatctgttgctgaatgcggtgattcctgctgatgcactgacacctactcataaactctgtgtgattaccactaccatgcttacttttgggatgggagcttcgacgcaggcgctttttgcccgtgtgggcggaggtatctatacgaaggctgccgatgtcggggctgacctggtaggtaaggtagaagccggaatcccggaagatgatcctcgcaatccggctactattgccgataatgtcggtgacaatgtcggtgatgtggcaggtatgggagctgatttatacgaatcctattgcggctctattctggcaacggctgcgctgggtgctgccgcctttatccattcggcggatacggcaatgcagtttaaggcagtgattgcgcctatgctgattgcagctgtcggaatcattctttctattataggtatattcgctgtccgtactaaagagaatgcgacgatgaaagatttgcttggctcattggcatttgggacaaatcttagttcggtacttattgttgttgccacttttttgatactatggcttttgcagttggataattggattttgatttcttgtgccgtagtagtcggcctgctggtcggcattgtcatcggacgttctacggaatattacacctcccaatcctatcgtcctacacaaaagttgagcgagagcggtaagacgggacctgcgactgtcattatttccggtatagggttgggtatgctttctacagcaattcccgtaattgctgtggtggttggtatcattgcttcttatctgctggcttccggtggtgatttcactaatgtcggaatgggattgtacggaatcggcattgcggctgtcggcatgctttctacgttgggcattacgttggcgaccgatgcttacggtccgattgcggataatgcaggtggtaatgccgagatgtccgggctaggcgctgaggtccgtaagcgtactgatgcgctcgactcgttgggaaatacgactgcggctaccggtaaaggttttgcgataggttctgcggcactgaccggcttggctttgctggcttcttatattgaagaaatacgaatcggcttgacacgtcttggaagcgtggagcttactttcccggatggtggaactgtcagtgtggcaaatgccacatttgtagatttcatgaattattatgaagtaaacctgatgaacccgaaagtcctttcaggtatgttccttggctcgatgatggctttcctgttctgtggactgacaatgaacgctgttgggcgtgcggcgggacacatggtagatgaggtgcgtcggcagttccgtgagattaaaggtattctgacaggagaggcggagccggattacgaacgttgtgttgccatctctacgaaaggcgctcaacgggaaatggttgttccctccttgattgccattatcgctcctatctttaccgggctcatctttggcgttcccggtgtgcttgggttgttgattggcggtttaagtagtggctttgtattggctatttttatggctaatgccggaggagcatgggataacgcaaagaaatatgtggaagaaggtaacttcggtggaaagggaagtgaggttcacaaggcgacggtagtgggtgacacggtgggtgacccctttaaggatacgtccggtccgagcttgaatattttgataaagcttatgagtatggtagctattgtgatggcagggcttactgttgcttggagcttattttaaaaagtgagaaataaggaagaaaaaggaggcgaaatacggtctccttttttatttcgtttaattttgcagctaaataaaaacgataaagatgttattaccttatttaaatgagaatctgattgaagcaggatgcgatgaggccggtcgtggctgcctggcaggagcggtatatgctgctgcggttattcttccgggagattttaagaatgagttgttgaatgattccaaacaactgacggaaaaacagcgttatgcattgcgtgaggtcatacaacgggaagcggtggcttgggcggttggtgttgtctcaccggaagaaattgatgagctaaatattttgcgcgcttctttcctggccatgcatcgtgccgttgatcaattggctattcgtccccaacatttgctgatcgatggaaaccgttttaataaatatcccggcattcctcatacaacgattgtgaaaggggatggaaagtatctttcaatagcggccgcatctatattggcaaagacatacagagatgattatatgaatcgtcttcatgaggagttcccttattatgattgggatcacaataaaggctacccgactaaaaagcaccgcgcggctattgccgaacggggaacgactccttaccatcgaatgaccttcaatttgttgggagatggacaactgactttaggtttttaaatcagtttgggcttcttctattctcatccgttctacatttttttgcagaatagacacgtttttgttatgtataaccgcaaaaatgttctatttaggctaaaaagctgttgattagtgcttttatttgttattgaaatactatatatttgcaaacaataacaaggattaaaaagtataaaatcatggcaacgaacaagctactttcttttatgaagctcattgggatgaccttcattatgacaattattactcttcctgcgaatgcgcagttcttacgtacttcttattttatggaaggtacacactatcgtcagcaattgaatcccgctttgacaccgacgaaaggatttattaatcttccggtgataggtgccgtcaatgcaacggttggttctacttcattaggttatcaggatattattgatattatagacgacggtggtgatttttataccaaaccagatttcatgaaccgtttgaaagataataatacgctgaatgtgaatttcagtactgaaatcctttctgctggatggtataaaggaaagaacttctggtcattcaatattggtcttcgtacagatattggtgctaatttgaccaaatcaatgtttacgttcctaaatcagatggagacaatagaagacaattggagaaatagcaactatgatattagtggtcagcaattgaatatcaatgcttatacagaaataggtttaggactttcccgccagattaatagtcgtttgactgttggtgctagagtaaaggctttattaggtattggtaatatggaattgaagcttaatagaatagcaatgagtgctaatctacctactgaccaacaaataaatgaatggtctaatgatagctattggagtggctctttgggggagattgaaacaaaagctaaagacttgaaagcaaagtttgataactatcatgcaaacctcactgttggtgccgagcttaagagttctttcaaaggtttagaattaaaagaagaagagggtaaagattatgtaactgattttgactttgatagtggaaatttaggtatagctggttatggttttggcattgatttaggtgcgtcttataaaattctggataatttgactgtatctgcttctattctcgatttaggttttatttcttggtctaaatcaagtacaaagattgcatctgctaatccggatccaatcaatattaaaggaagtacttatgcagatatgattaatataactgacccacaaaatagtgttaagggtgcattgaatcagctacagaatgatactgaaaattatatggatcttgtgacgcaaggtgatgtgcttaactatgatatgttgcagctcgaagtaggtgaagctaaagaatctcggaaatctcgtcttgcttctactttagtattaggtgcagaatacggtttcttcaataataaattggctgttggtgtattgtcaacaactcgttttgtacaaccagatgcccttactgaattgacattgtcagcaaactatcgtccgaagagttggtttaacgtagcgcttagttattcggctattcagtcagcaggtaagtctttcggacttggtttgaaattgggaccgatctttcttggaactgactatatgttcttaggaaagaactcaaactcagttaatggatttatcggagtttctattccattgaataaaagaaaagcttgctgtaaacaaggataaaaaataatttctctctctattctctttttattaatttctctagaagaaaaaacgtataatgtgcagcttgtcgcttatggtttatataagatgacaagctgtttttattttgcaggtttggacgacctcaattatgtggagtagtattccatacaagaggttctgagttgaatttagaaccatttgattttccggaatatcacgaacgccaatgttgacaatccgatggagaagagcacaatcaacgagaaagcgaaaggtacttcttctaggtggatatccacattcataccatagaagctggcaatcaatgtcgggagcattaatacaatggataaactggtcatgcgtttcatgattgtattcacattgttcgagatgatggaagcgaaagcgtccattgtgcctgtaaggatatcactgtaaatattgacggtattgagtgcctgtttcaattcaataataacatcctctaccaattccttgtccaggtaatccgtgtcttggaaaatcgttttcagtttgccgatcatcacttcattgccccgtatggaagtattgaaataaaccagtgttttctgcaatcgcatcaggcgaagcaggtcctcattacggatactgcgttccaattccttttccgcagcactgatgtccagatttatctgtttcagatatttcagaaaccatacggcagaagaatagataagccgtaaaatcaaatccaacttattgcggacaatgatacctttccgacgggtatgctcgataaagtccggcagcaaatcagtgttgtaataacagacggatatgatgatttcattattggtgataatgccgatggggacagtgccgaaaggcagattctcgttttgcttgttctgcaccgggatgcgcagaatggtgagcaaccaattcccctccgtgtctgtacgcggacgttcgtcggtatcggcaatatcatcaagaaatgattcgggaacatttagtgttttagtcagaaattcaaagtcatcattgttcgggcatactacgttgacccagctattgggcagccattgtgctttttccacaaagccagcctcacaataaagatacgttctcatcttaattgtctcctttcgttgtttagtacgagcagagacatcggatattaatgactctgttcgctttaattaatactagttgtgcacgttcgcgggtttgaatcgtccatatttctatgattttaatttaaaagcgttgcaaaggtaaataaaatagttggattgcccgttgataatcaactggcttaacatagattaagcgtcatcgtaaccatcttttttgtacctttgcgcccgaaaatcagagtgataatttaaatattgaaatattatgagtaagaaagcccttttaatgatcctcgacggttggggactaggtgaccaaaagaaagacgacgtaatcttcaacactcccactccttattgggattatctgatgaacacttatcctcactctcagctccaggcaagcggtgaaaatgtaggtttgcccgacggacagatgggtaactcagaggtaggacacttgaatatcggtgcaggacgcgtagtttatcaggacttggtgaaaatcaaccgtgcgtgcgctgacaatagtattctgaaaaatccggaaatcatttcggctttctcttatgcaaaggaaaacggaaagaatgtgcatttcatgggactgacttccaacggtggcgtacatagctcactggttcatcttttcaagctttgcgatatcgctaaggaatataatatcgacaatacattcatccattgcttcatggacggtcgtgatacggacccgaagagcggtaagggatttattgaggaactgtctgctcattgtgagaaatcggcaggaaagatcgcttccatcatcggccgttattacgcaatggaccgtgacaaacgttgggaacgtgtaaaagaagcatacgatctgttggtgaacggtgaaggaaagaaggcaaccgatatggttcaggcaatgcaggaatcttacgatgaaggtgtgacggacgaatttatcaagccgattgtaaatgccaatgtcgacggaacaatcaaagaaggtgacgtggtaatcttcttcaactatcgtaacgaccgtgccaaagagctgaccgttgtgttgactcagcaggatatgccggaagcaggcatgcacaccattccgggattgcaatattactgtatgactccgtatgacgcttctttcaaaggtgtacatatcctgttcgacaaagaaaatgtggctaacactttgggtgagtatctttctgctaagggtatgagccagcttcatatcgctgagacggaaaagtatgctcacgtgacgttcttcttcaacggtggacgtgaaactccgtttgacaaggaagaccgtatcctcgttccgtctccgaaagtagctacttacgacttgaaaccggaaatgagcgcttacgaagtaaaagataaactggtggctgctatcaacgaaaacaaatatgatttcatcgtagtgaacttcgccaacggtgatatggtaggccatacgggtatttacgaagctatcgagaaagctgttgttgctgtagacgcttgtgtgaaagatgtgatcgaagctgctaaagcacaggattacgaagcaatcatcattgccgatcatggtaatgctgaccacgctttgaatgaggacggtactccaaacacggctcactctctgaatcccgttccttgtgtttacgtgacagagaataaggctgcgaaagtagagaacggccgtctggctgatgtcgctccgactatcctgaagattatgggattggaagttccggctgagatggacggtagcgtgttgattaagtaatttagatttttataattgggagggcggggtagaactccgccttttttgtctgatataaatattgcaaatgatacagattgatgatgtagttgtatcgctggatgtgcttcgggaaaagttcctttgtaatctggacgcttgtaaaggtgaatgttgcattgagggagatgcaggggcacctgtagagttggaggaagtggagaaactggaagaagtgttgccggttatttgggatgagctggcacccgaagcccgtgcgataatcgaaaagcaaggagtggtatatacggatgaggaaggagatctggtgacctctattgttaataataaagactgtgtctttacttgttatgatgagaagggatgttgctactgcgctattgaaaaagcctatcgtgaaggaaaaacagatttctataaaccggtatcctgccatctttatcctatccgtatcggagattacggaccttacaaggctgtcaattatcatcgttgggatgtatgcaaggcggcagtgttgctaggtaaaaaggaaaacctcccggtttatcggttcctgaaagagcctttgatccgtaagttcggggaggaatggtataaagaactggaaatagcggttgaggaactgaaaaaacaacatcttctctgattctcggttccacgggatagtaagatgaaaagaaaaacgcctgctgtgagattactctccggcaggcgtttcctcgttgtaagatgtgaggttggtttataaaaacgtaatatgacaactatgcatcgatatttgcatacgttgcgttctcttcaataaattcgcggcgcggacctacgtcttcacccatcagcatggagaagatataatcggcttccgctgcattatctatatttacttgcttcagcatacggttttcggggtccatagtcgtactccatagctgttccgcattcatctcacccaaacctttgtatcgttggatgtgtacggcgctttcggaaccaccgccgtaagtgtcgatgaaattttgaagctgcgcgtctgtccagcaatattcttttaccttgcctttcgtacaaaggtagagcggaggagtagcaatgtacaggtatccgttctgaatgatttgaggcatatagcggaagaagaaagtcatgatcaatgtgtcgatgtgagaaccatcgacgtcggcatcggtcatgatgataatcttgtgataacgcagcttttcgatatttgcttctttgctgtcatcttccgttccgattgtcacccctaatgcggtatatatattacggatttcctcgctttccaaagctttgtggtacatggctttctccacattcagaatcttaccgcgtaacgggaggatggcttggaacatacggttacggccttgtttggcagtaccgcctgccgaatctccctcgacaaggaacagttcgcatttagacggatctttgtccgaacagtcggccagtttgcccggcagaccgcctccggacatcggagacttgcgttgtaccatttcacgggcttttcttgcagcgtgacgggcggtagcggctaaaatcaccttgtcaacaattgttttggcctctttcggatgttcttccaaatagtaggataacacttcacctaccgcttggtctacagcacccattacttcgttgttacccaacttcgtcttggtctgtccctcaaattgaggttcggctacttttacagaaataacagcggtcaagccttcgcggaagtcatctcccgagatttccaccttcaccttttccagcattttgctgtcttcggcgtatttcttcaatgtacgggttaatgcgcggcggaaaccggccaggtgcgtaccaccttcgatggtgttgatattattaacgtatgagtgaacgttttcggagaatccggtattgtacatgatagccacttcaataggaattccctgcttctctgaattgagataaataacgtcgtttatcaagtgttcgcgagaagactcgatgaagcgtacaaactctctcagaccttcttccgaatagaattgctcgcttttgaagctgccgtcttcatttaccacgcggcggtcggtcagtgagatgcgtagtcctgcattcaagtaggccaattcgcgcagacgtgaagccaatattttgtagtcatacaccgtttccgtgaaaatgctgccatccggccagaattgttggcgggtaccggtaatgtcggaagtgccgacttcttttacagaataaagtggtttacctatttcatactcctgctggtaaatcttaccaccccggaatacttgagtagtcatgtgtgtggacaatgcgttcacacaagacatacctacaccgtgcagacctccggatactttgtaggaacctttatcgaacttacctccggcatgcagtacggtcatggctacttccaatgccgacttcttttctttctcgtgatagtctaccggaataccgcgtccgttgtcctgtactgtgattgagttgtcttcgttgattgtcacctctatgtgcgtacagtatcctgccaacgcttcgtcgatggagttatcgacaatttcgtatactaagtggtgaagtccctttacgctgatgtcaccgatgtacatcgcagggcgttttcttactgcttcgagaccttccaatacctggatactatccgcagaataagacccgttattgggagtgatttgttcttcgctcataattgcctttctaactttaataacagagcaaatatagtgaaatttgtcgacttgacgaagaataaaccgtgaaaaattaagaatggaggaggattctccgttttcttgggtgaactggtatataggtaattataaacaagaaaggccgaacttaaaagttcagcctggtgctatatagaattattgaattcttcttattaagcgagcttgttgatgtaaatagccaacttagatttcagattgttagctttgtttttgtgaatcacatttgtcttagccaacttatccaacatctttgtaatgcccggatacattgcaactgcttctgctttgtcagtagttgcgcgaagctttctaacagcgtttctcatggtcttgccataatatctgttgtgaagtcttctagtctcttcttgtctgattcttttcagtgatgatttatgatttgccatctcgactaatctgttttttttagttcgtttattcttttaacttgtagcccgtgggggaatcgaacccccctttcaagaatgaaaatcttgcgtcctaaccgatagacgaacgggccattctgtgttgcatttctgcttttgctttctcgaatctgtgtttgtttctcgattgcggatgcaaaggtaggaacttttttgaaactgacaaacaatttgctgaaaaaaatagcataaattttccggttgtcttcttttgtctttcttttctttctgatattcaattaattatacttctctgtttctcgtgaaaaaacttcatttttccttttgccaatatcggatgtacttttgcctataccttattatatataaagggcgctcttttcctcttccttctctctgcgaacggaatcgcttattttcttttattcggcagtcaacgggattcttatttagaagattttttgtagttttgttccggaatggaaatttgtgattggttatgctgcaaaaaacgaaaggaatcgttcttcatacattaaagtataatgatacttctatcattgtagatatatatacggagctttccggcagggcttcttttcttgtggcagttccccgttcacgaaaagcagcggtgaaatccgttcttttccagccgttgtcttttattgaatttgaggcggattacagaccgaatgcgactctttatcgggtgaaagaggcgaaatccttttatcctttttcttccattccctatgatccttataaatctgcgatggcactttttctatcggaattcctttatcgggctattcgggaggaggctgagaaccgtccgttgtttgcttatttgcagcattccatcatttggctggatgagtgcagggaaggattctctaatttccatcttgtttttctaatgcgtctttcccgttttttgggcctttatcccaatctggaagactatcatgccggtgattacttcgatttgctgaatgcttgttttacttctactcgtccccaactgcattcatcctatatcaatcctgaagatgcgggacgtcttcggcaattgatgcgtatgaattatgagactatgcatcttttcggtatgagtcgtgccgaacgtactcgttgtctgacgactatcaatgattattatagtctgcatttgccggacttcccggtattgaaatcattagaagtgttgaaagaactgtttgattagctcctttcggctgataggcactgatttagtagatgaaagaagtagggatacaatgtgtttattccctgcattgttcatattggataccggtatagatgatttgtcatggctgtggtgacttcttcccacggctgtgacgagatcctaccacaaccatgacgagatctcgtcacggccgtgacgaattaactatgtcggtgttttaacagaacaatgtcggtagttttataaacttatgccagtgctttgatagatgaatgccggtacttgaaggatgatgagagacgttttgaggaaatgatgagagatactgggagaaatgatgagagataactcatcgtgagttatctctcataaagtatattgctgatatttaatcttttatctctgatttatgagagatgagagatcgaaagtaaaaaaaacttctcagtagagagtgggtgaattatcccaaaagctcttttacttttgctgagatggcacggccttcggcaagtcctgccaatttcttggaagctactcccattactttacccatgtcttttccgctggtggcacccacttcggcaatgatttcctttaatgccgcttccagttcttcggcagacatttgtttcggcagatacttctccataacggctacctgtcctagctctgcgtcagccaagtcctgacggccttgtccgatatagatctcggcagagtcctttccttgttttacgagtttctggatgattttaagtgccgcgtcatctgtcagtgtatcgttagctcccggagcagtctttgcttcaaggaaaaacttcttaacgtttctcaaagtctctaaggctactttgtcctttgccttcattgcgttttttatgtcttcgctgactttatcaaataaatccatactattataattaaaaattaaagattaaaaattataactgaagcctgattctgcgagtttataatcttcgtttttagttctttgtttagaacgtaatcacgccattctcgtctgttgcttcttccgttgtgacttcttcctccaaagcggctttggtccgtatcttggtgagggttgtcttatcgcgcatatatgtgggagaatcttctaccatagcgatgatgtcgtcgttgtccagatcttccatattgaagaggtagatgtgacgacgtttgcgcagactcttgcttccgatattgctggcgctttctccgtatgctttgcggatgcgttctttgtttttctctttttcttcttccagttgcagttggcgttcctcttcttcctggctgcgcgcagcgtgcaggctgtccatgccgggaacatcctctactccgaatccggttgcaagtacggtaatcttcacttttgtttccaaagagttgtcgatggcaacaccccagataacctccacgccttcgcggaacttactcatgaattcatgtatctcgttcatctcttccatcatcaattcggatgacggacagaaagaaacgttcaacatcacttttttggcgttgaagatatcgttgttgttaagtagcggagaatgcagcgcatcatcgattgctttggttacccgattttctccttcaccgaatccggtactcatgatggctactccaccatctttcaagatagtcttcacatcggcaaagtccaggttgaccgtaccgcgcatggtgataatctcggcaatacttttggcagcgatggagagtgtatcatcggccttgccgaatgcattcataaaggtaaggtcggcatatatttcgcgcaagcgttcgttgttgataaccaataaagcgtcaacgtgttgagcgatacgttccacgccgtccaacgcttggataattttcttttccccttcgaagataaaggggatggtaacgataccgactgtcagaatatccatctcctttgcgatgcgggcaatgacaggggctgcgccggttcctgttccaccacccattccggcagtgatgaataccatcttggtgccgtcgttcagttggtttctaatgtcttctatactttcttcggcggcatcgcgtgcccgttcgggacggttgccggccccaagaccttgtgtgatgctacggcccagttgcagtttcaccggaaccggtgattcggccaatgcctggttgtccgtgttgcaaagaacgaacgttacatcatgaataccttcccggtacatgtggtttacagcgttgccaccaccaccacctacgccaatcactttgatgatcttcggtgaatctgtcgggaaatcgaattgtactatctcgtccataatcttatgctaattactagttactatttacaaattacaagctatgtctccggaagttatttcatttcatcatcttcattgaagatgttggtcatttcctcaatcgttttcttcatttttgttgtgaaccaaccgggcttagcttcttttttccgcctttctttctcctccttttctttctgtttgcgaagtttctcggcttctttggcagccagtttggcttctcgttcctcttcctctttcttgagtcgggcgatgcgggcctgttctttcaaatcttggtcgttttcgaacatatcggctgtcttgagaacttccgcttccggtttaggagtggccggagcaggttgagaaacagtttctatcaggcagcaattctggttcccttcaaacagaagtccgaataacgtattctgcgagccgtcttttttcaggatatcactaggggcatgaacggtattgcgtggaagtcttgccattctgattttctctattttgctacgtttgcgcaacatctcttccaggttctttaggttggtagctcctcctgtcatgataattcctgccagcagtttgtcgtcaaagccggagagttgtatctgattccatacattggcgatgatttcttcggcacgggcttcgatgatattgttgaggtcggctactttaatgatacggctgtcatcgtccagtttgcaagtagcctcttcttgttcgggctcttcttcataaagagcgtcaccgtaggttttcttcaaacgttctgcttcttcctcttccatctgcaaggtggtgatgtctcgtgtgatactgttacctcctagtggcagcacagtcaggaagcggaggatattgtttttgtaaacggagatggtagtcgtatctgcaccgaagtcgaccaaagcgcagcccgaacggcgttcgctttctgtcaataccgcgttggctgtcacgagcggggcaatcagttgttcggctatatctatttttgcctgttggaagcaatgctccaaattcttccgcacggaagcacgggcgacaatattgaggaaacggccttcgatatggcttcctaccagacccaccggattggcttgcaggttatttcccactttatattcctgtggcgctacgtccagtatgtccatatctaccaccgggatggcgatgttctcgtcgccgatagcactgacaagttcctccgatatgatggcttcttcttccagatcgcggcttaccacgttgcgtactgtgcgaagtgattgaccgccaatacctacatatactttagcaattgagtttttcaactcaccttccagtctgttgatgatagaagtcagactttgtgccgtcttgtccaggttaaagataactcctttacggatgaacgtagaagagtcttcctgtgcatacgccagtatctgcatacttccgtcactgttctttcttccggccacaccggttatcttcgatgaaccaagttcaatagcggcgataaattctgttgttgccatctctttatttactatttaattgtttacagtttactatttggagagatctgtcacttatatctcatcacttatcactcatcgttctcttttcgtacagataatctgattgctgaattcaaggttgatgcgtgaatatttgttccagcctaccttattgagccctttcttatagaattctttcaggcgtgccagtttgtcttcaaagtcatccagtttgccgagatagacaaggtggtctcccacacgtggcactaattcgatattgcggtcgggcaatacatgaatctgttctatctgcgcatcccagaacttattgttatgcaaaaatacaccaaacttatataaatccttcattgcaaacgacttttctacgtttccggtgacaattacccggtgagcgacgcattttgcatcgggaggcatgacggttcctttgttgtcaaggtagtaattctcaccgttggcgctcattacccgtaagatgggaatgcgttgtgtcacttccacgcagactttgccgctaggagtcttgtagcattctgcttcgtcaatcaacgggtgtttactcagttcccgttccagtgacttggtagagatgcgtcccatctttttcccgatggggtagatgccttttttctgaaggatacctttcagttcgtctttagtgatgaaaccggcataagcggtatccttgataactaattccatgtcacggcaggtctggtcggcaggcttgcggttgaaggcgctgacagctacgaccaggtaggctatgagcaccaacatgacgatggacaaaaggattctctttaccataaattattaatcattcttcctttccagtattttctttatctcggggacatagttgtctatatctcctgctcccaaagttattaatacttcaatgtttttatctttcagaatgttcagtatatcttcctttttgcacatacttttttcgataccgggacggagattgtcgtaaatcagccggctggtaactcccggaatcggggcttcgcgtgccggatagatatctaccagaatcacttcgtcaagcagcgacaggctgtcggcaaagtcttgatagaaatcgcgcgtacgggtataaaggtgtggctggaagatagctgtgattttcttgtctttgtaaagctcccgcatcgacagtacactctgcttgatttctgaagggtgatgggcatagtcgctcaggaagactatccggtcgttcttgatcttaaagtcgaaccggcggtctactccccgaaaactagccatgcctcttttaatctcttcatcggttactccgttcaggtgtgccaatgccatagcggctacgccattttctatgttgatactcacgggcactccgagttggatatcattgatacgggtatccggcgccacaaagtctataaatatctctccgtttccgatgcggatattctctgcatggaagtcgccctcgtcacgtgaataggtgtaaacgcgtacaccgggttgcactttgggctgtagtgagatgcctttgcggatgatcaatgcgccgcccggctggatgagggttgtgtaatgttcgaaactttccagataagctgcttctgttccgtaaatatccaagtgatccggatcggtagctgtaatgacagacataaacggggacagccaatggaaggaacggtcgaattcgtcggcttcgattaccgtgtaagggcttttctgtgaaagcaagaggtttgttccgtaatttttcgagattcctccgagaaaggcggtacattctacgtgtgactgatggagcagatgtgccgtcatggtggatgtagtggtctttccatgagtaccggctacacacaagcctttgctcgaatgtgtaatcgttcccaatacttgagcgcgtttttgtatctcgaatccgttgttgcggaagtaaaccagttcttcgtgttcctgtgggacggcgggggtgaatacgacgagcgtactttctttgtctttacaagcttccggaatcaaatccacattttcttcgtaatgtatctgcgcgccttcggcaatcagagcttcagtcaatggagtgggagtacggtcatatccggctactaccttgcctttgaagaggaagtagcgtacaagggcactcataccgataccgccggcacctacgaaataaactgattttatagtttcgatattcatttcttctatctttagtatttgtatgaatcgattagttctttgcttccgccagttttatcacttcctgcgcgatgattttcgcagaatcgggtaaagccagcttggctatattctcgcttaattcttttaatctccgctcatcattgacggtggttaaagcaacatctaccaatgtcttttccgcttcgctgtctttgacgtagatagctgcctgtttgtctaccagtgctagggcattcttagtctgatggtcttcggccacattgggggaaggtaccagaatgacaggtttatgcaataggcagaattcagagatggagcctgctcctgcacgggagataacaaggtcggccgctgaataggcagcagccatatctttgataaaatccgttacatatagattgggaagtgcgcctgccgctttcacagcttctgtcacttgcggatagtaaaatttaccggtttgccagataaattgtatgtttccgttttctttgattgtcgctaatccggcagtcagcgtgttattgatggtgcgcgctcccaagctgccacctacgataagaatcgtttttttgtccggttgcagatggaaagaacgtagtgcgtcctctttggacggcatatcttttgtcaggttctgacgtaccggatttcccgtcatgataatcttatcggcagggaagaatttctccataccgtcataagctacacagattctccgggctttctgtgccaatagtttattggtgactccggcatacgagttctgctcctgtatcaaggtaggcactcccatcattccagcggtcttcaacgtgggaccactggcgtaaccgcctacgcctaccgctacttgcggacggaagttcttgatgatactgcgcgccttccattggctgcgtatcagtttgatgattaccgatacattcttccataaatgcttgcggtcgaaaccggctatcggaagaccgatgatttgatagcccgcatcgggaacccgttgcatttccatacgaccttccgctcctacaaagaggattttggcgtcagggcgtaactctattatcgcgtttgcaatagagacggcgggaaagatgtgccctcccgtacctccaccgctaataataattctaagttctttttccgtcatagttcttttctcctatccgtttcgtgctactgaccgttcattgcttgtcactctcatcctcgaattttgcatcgctgttcaaaatctgtgcagttggctcggcagcagtctgagcttccgaattggcggccgcatctgtcgcgatctgcaactgaatctgcgcatcgtgcgctttctgttcttccagatgagcggtatatcggctgacgcttaatatcattccgatgtaagcacaattaatcaatgtacttgttcctcctttgctgactagaggtagcggttgtcctgtgacggggaatagtccgacggcaaccatcatgttcagtattgcctgcgataccaacaacaaggcaatccccatcacaaggaaggcgggaaaagtcctttcgcatttctgggcgattcgtccggcccgcatcagcaagcatagatagaggaataccacgaatatcccccctatcaatcccatctcttcgatcacaatggcgaagataaagtcggagaaggcttgactgaggaaatcgcgttgtattgagttgcccggacctttgccgactacattgctggtagcaatggcgattcgggcgtgtgctatctgtgcgtctttatcaatatcgaacttggcggcaggtacctctttattttcgaagaagccggaaacacggttctgccaggtctcgaaacggtgaagtcccggcgtattgtgcagtgtctttccgggaatggccattagtattcccacagccactatgcctacaagtgccattagccccagcataccgaacagtttcttggaagatacccgcccgatgaacatcatcatacatacaactccgaatagcagcatggctgttgaaaggttttccggtgcaataagcagaaagaccagtccggtaagaatcataatgtatttgaaggctttcgggttggctccgtattcgtcctgtttcttggacaagataaatgagacggcaatgataaccgccatttttgccaactccgacggttggaactgtaatcccataaaggtcatccaacgcgcagctccgttgacacggtcgcctgtaatgatacccatcagggtgacaaatgccaacagtaccagagaaatcggatacaggaagaccggaaatacctgaaaccatttgtagggtatgttgtgtagaattaccactactactgcacccaccatcagaataacagagtgctgtgtaatcggtccccaatggtcgccacttttataggtcagtgtcgacgctgccgagaacacctcgattatcgagatgaggcagagacaaaggaaaataatccagattaccttgtcgcctttgaatatgttctttaataaatccaatcttgcagaaattaaaaattataaattaaaaattaaagggcacggacgcattctttaaattgctcgccacgatcctcgtaactcttgaagaggtcgaaagaagcgcagcaaggacttaataatacggtttcacctttcttcgccaatttataggcggcttctacggcgtctttcatgccggtttgcacgtctgctacgggcaaaccgaaacggtcgaagaaatcatgcagtttctcgttgtgaagtcccatatatacaagagccgagcacttttcgcgtaccaggtcttcaatttccgtatagtcgtttcctttatcttttccaccgagaatcaatactgttttggtagtcatgctttgcagggcataccaacacgaattgacgtttgtcgctttggagtcgttgatgaaatcaattccacggacacgtgccactttctccaaccggtgttccacgcccttgaagtcggagagggccttgcgtatgttctctttggtgatacctgccagattggctgagataccggctgccaaagaattgtacaggttatgctggcctgtcaaagccaattcctcctgttccatattgaaagcaatcggctcgttgattttcacttcgtgatcttctacgtatgcaatcgctccgtcttcctttacggctgcgaaagggtagaggtgtgctttcagaccatgctttgccaattcgcgtttaatgatagggtcgtcgttccagaagataaaagcgtcgtccggagtttgattctgggtgatacggaatttggcatcgatgtaattctgcatacaatgatcgtagcggtccagatggtccggagtaatattcatcaatacggctatatttgcacggaagttatacatattatccaactggaaagaactcagttcgataatataatagtcatggtggtcttcggctacctgcaaagccaggctcttgccgatattgcctgccaaacctacgttcatacctgcactcttgaaaatatggtagatgagggaagtcgtagtcgtcttcccgttcgaaccggtgatacagatcattttggcgttcgtgtaacgtccggcaaactcaatctctgatataaccggcgttccttgagctttcagtttcagaatgaggggagcgtcattcggaatacccggacttttgattacttcgtcggcattcagaatgagttcttcggtatggcggccttcttcccagtcaatgtggtggctgtcgagaagttccttatacttgtccttgatggcggacatatccgaaacaaacgtctcaaatcctttgactttagcgagtacggctgcacctgcaccgctttcgccagctcctaaaattactattcttttcatttacactaatgtgctcttgtctccaatatgctgaattgcctattagttgtgcacatcctttaaaagttaataatcgggttaatactctctgattctttattgttaattcacgcctcagttatcttcagcgtttaccttattttcagcgttataatcgttatggctgccagcacgatggtcacaatccaaaaacggacagtaatttttgattcgtggaacagttggtcgggcttggtgaacttcaccgtacatcccggttctatcaaattcatggaagtgcggaaatgatcgtgaatcggcgtccgtttgaacagccgttgtttcactccttttcgttttccggctttatagtaagcccgttggagaatgaccgatagattttctacgaggaatacaccgcagagaatcggtatcagcaattctttatggatgatgatggcgaatacggcaatgattccgccaatcgtcagactgccggtatctcccatgaatacttgtgccggataggcattgtaccagaggaagccgatcaatgcaccgataaaggcgcagatgtaaattacgagttcttccgatcccgggatgtacataatgttcagatagccggcaaactcaatgtgtgatgatacgtaagccaatatccctagcgtagctccgatgatggcggaattgcccgccgccattccgtccatgccgtcattcaggttggctccgttggatacggcggtaacgacaaagatggtgatgataacgaacagtacccatccggccgcttgtgcgtgatcgcccatgaaagctaccagatctgcatagtcaaggttgttgctcttaaagaaaggaatggtcgtctgggtagatttcaagtcatttgttccgtgtaccacttccatctcctgtcccggattgtgtatctcgatgttttcgcgaatgaccacgtccggacttaaatataaagtaagtccgacaatcagtcccagacctacttgcccgatgatcttgaacttgccatgcagtccttctttatctttcttgaaaatcttgatgtagtcgtcggcaaaaccgagtgatcccagccatacggtggtgatcaacataagtatcatatatatattatgcaacttgcctaaaagcaggcaaggaatcaggatggcggtaatgatgatgacgcctcccatacttggtacgcctactttgttgacgccgaacgggtcgattttcgcatcccgttgtgtctccgtgatttgtttcttcttgagcaggttgataaacttatctccccagatactcgaaataagtagggcgaggataactgccatcagtgcacggaatgaggtatatccaaacattcccgctccgggaaaattgagcttatgcagccattcaaacaaataatataacatttcttcagtggttggtgtctaatcgttcaacattctcttcacttcttctttgtcatcgaagtgatgttttactccttttatctcttggtaattctcgtgcccttttccggcaatgagtattacgtctcctttctcagccagcatacaggccgtacggatggcttccttgcggtcggcgatgcttaatgtttttctcatgtcttctgcatccagtccggccaacatatcgttgatgatgtcttgcggctcttcaaaacgtggattgtccgaagtgatgataacacggtcgctggctttggcggcttcctttgccatgatggggcgcttgcctttgtcacggttgccacccgcacctactacggtgattacttttcctttcccttccaataccccatgtatggcattcagcacattagtaagggcgtccggagtatgggcgtagtcgacaattgcggtaactccgtcttttgaacgcacagcgtcgaaacgtcctgcaaccggatgcagtgtgctaagggcaaccaacacatcttcttctttttttccgagcaggacagcggcaccgaataccgctaataagttggaagcgttgaacttgccgataaactgaactgccagctcgtgattgttgaaatcaagtagcattccttcaaaatgggattccaacacccgtcctttgaagtcactgagacttctcagcgaataagtatagactttggaacgtgtgttttgcgtcattaccagtccgttcttgtcatcgagattggtcagactgaacgcattcttcggcaggtcatcgaagaactttttcttagctttcagataattctctactgtcttatgatagtccagatggtcacgggtgagattggtgaagatacctccggcgaattttaatccgctgatacgcttctgtgcgatcgaatgggaactgacttccataaaggcgtatttacatccttcgtctgccatccgtcccaataaacggttcagcgtgatagggtcaggtgtggtgtgctccgttggaatcggctcgtcatcgatataattgcagactgtagagataagtcctactttatatccgaaatagcggaaggtattatataataaggtagcgatggtcgtttttccatttgttccggtgacaccgaccaactccagtttggaagtcggatctccatagaaggtagtggcaatcttacctaccgcgtcctcgctgtcttttacttgtatataggtaattccctccaccggtttttcgggcatatcctcgcagaggatagcggtggcgcctttactgatggcggcgggtatataggcatggccgtcggcttgcgtaccgcgcatagccatgaacagttgtccggcttctaccaaacgggaatctatgttgattccggcaatttctatatttgaatctccggctatctgtaccggttggattgctttcagtagctcatttaataacattactctatttgtttttaatcattcactattttagcgtaagcgtcactgtctgtccttttctaacaatgcttccgttggctatcgactgactttttaccttgcccactccgacaagatgcactttcaaccctttactttccagcaggtatacagcgtctttagctcccatacctatgacactcggtacaaaattctgcatattgctccgactttccagcactacggcttgtggagccaggtgggtatttccccacacttcttttcctgcgtcggctattttaccttgcacctgaatattcagttcttccaatacccgctgagcttccctcatctctccggcttttacgttcggaatgactacggaattcgtatcaatcgcattggtgagcggcaaacgtaagtctttggcgtatactctttcggcaatcctgctgaatacgctacctgccatcaaacctcctgaggctggtagtcccggtttctgaatggaaacaatcatgctatatttaggatcctctgacgggaaataaccgcagaaactgactagataattcgttctccccgtcttgtatccggctgctccctgtgagatttgcgctgtccccgtttttcccgaaacatggaactgtttgcttcctgccggtttggcaagtccttcacctactactttacgcaatatcatctgtatgtctgccaatgtcttgtccgaacatatcttcggattgataacttcggtcggatattcttttactatctctccgtcttttatcgctgcttttacgaacttgggacgcaccattacgcctttgttggctattgcattgtaaaaagtaacgatgttcatcggtggtacttgtgtctcgtaaccgatactcatccatggcaacgcggtctttgaaaaataacttctctctttggggccccgaatgttcggcttcccttctccggctatctgcagatggagaggttggtcaatactcatccgttttagtccgtcgacaaacttctgcggattgcttccgtagaagtggtctatgatatacgatgtacccacgttggaagacactcctaatatctcggtgacagttagtttgccgtatcctccgcgatgccagttgtggtccttcatcacgcgaccatgcatcggcatttgcccgttgcctgtatccactacgtagtcgggagtgatttttccatcttcaagagctaccataatggaggccgtcttgaaggtagaaccgggctcaagcatatcgctgatggcgttattgcgcatttcgtaatattctccgtccttgccctgcatcatattgacgattgcttttacttctcccgtagccacttccatcagaacgactacaccaacacttgcattcaactcttttagcttgtctaccaatgccttttcgcaaatatcctgcatacccacatcaatagtagtgaggaggtcgcaaccgtcaaccggtggtacgtctactatattcaggtatttattcatcactttctggcgatgtgtcagtccgttccgccctttcaagatggtgtcaaaagccaactctatgccatttctggctccttttgccgtatcggcataaacatctcccaacgtacgtgctgccaacgagccaaacggttttttcctctgattgtaggctaactccttgaatcctcctttgtatcggttcaggcagaacacaggcaatctctttacctctttatattgtatataggagatgcgtttcgggtaaatcagatagttacggctcttagcctggcgcccttttttaagatgtgccttgaattgagcgacactcttatccgggaaaatcttgttcagtccgatgcagattgaatccatgttggcattaagaatggagtcgcgtctggcctgatctttctttcttcgtttttcgtccttctcaccggacataaagtccatatatatcctgtattcgggtaaggaactggccattagtttaccgtcggaggaaataatgtttccacgattaggcttcaccgttacgttctctttcacgaaacgatcggctacgtcctgccaatactgacgctcggcaaacatagtgattcctgcctttacgacaattgctacacctatcaacgccatcacgaggatgacgaagaaatagcgggtcattatattctttttattaactgccacagtgcttgtcttttaaaactcccagatctccacctatttaataaggtaaggagggttggtggatgtctgcaaatcactctccttactagaaatatagtcttcgatacgtgactggcggctcttctccatcagttccgagctacgtgtcagcgcatcgtattttatatctatcagttccttttttaaccggtctatctcgatctgctgttgctgactggcatagcggttatggatgtagaagatgatgaataccatgatcagtaccagcaacttcgtctgacggcggaaaaagtcggtagccagaatgtccccacccagaatactttttagtgaggtgcgttttttcttttttccctcttctgttttcttatttactacttcctcttccatttctctttatttcttttctgcaattcgtaatttagcacttcttgaacgcggattcctttctatttccgtttcgtcgggaacaatcactttgttgttgacaaggcggaagggggtattcagattcccgaagaaatcgctttctgcttttccctctacatttccggttttcataatgtttttcaccatgcggtcctccagtgagtgataggtgatcactactagtctgccacccggtttcaatgcttctgttgctgccagtaacatttctttcaatgcttccatctcttggtttacttcaatccgcagtgcttggaatacctttgccaattccttcttttccctttcgcgaccaaaaagtggcttgatgacttccaaaaactctccgatggtacggatagcctgcccgttccgtgctttgacaatcacagacgcgagtttacggctattttttaattctccatagagatagaaaatgttggcgaggcgttcctcttcgtaagtgtttacgatatcggctgccgtaagtcctgcacgtttattcatgcgcatatccagatctccgtcgaaacggaaagagaaaccgcgttcactgtcatcaaaatgatgggaagacacacctagatcagctaaaatcgcatctacttgctctatatcgtgatagcgcaggaaattgtgcaggtaacggaagttgctgcgtacgaaaataaagtggggatcatcaacgatattccgttcggcgtcttcatcttggtcaaatcctaaaagtcgtccgccttccccgagccgtgaaagaatctctcgcgaatgtcctgctccaccgaaggtaacgtctacatacgttccgtcagggcggatgttcatcccgtcaacgctttctttcagcagcacaggtacatgatatgtcagttcatctttctccatcttgtttgttttcatcgttcataatttcttctaatgccgctccgaactcttcgggtgacataaacggctgttctgcccgctccttcgaccagatctctatcttgttgtcgatgccgatgaagcgtatatccccatgtatattgcagatctgtaaataccgcttggggattaatatgcgtccgttgctgtccggtgtcaccacctcaacgtcgctcacaaactgtctgaaaatgagttgatgcttattgttccacttgttaagtctgctgcgaagttcgttcaactcctcgttccacacgccctctgggtatagagtcaggcagtcttgaaatacgtctttgcgcataataagcctttcttcagaagcagcttgtaattgcttcctgaagatagcgggaatgaacactcttcctttagtgtctgctttggcttcaatattacctaaaaaacgtatcattaccttattataataagagaccgtaaaagtatgaaattccccacaattccccacgattttccacaaaaacttttagagaagttttcaacagagtgttaaatgttgatttacttgaaaaaaagagccccgagtgtcggtatgttcaacactcggggctcgtacaatttagtatctttttagttaaggtctagcgaaaatctttcaggtcttcctgcaatttctggcgtgtgaagaagatgcggctttttactgtacccaaagggaggttcagtttctccgcaatttctcggtatttgaatcctgaaacgtgcattgcaaacggaactctgtattctttagggagtttgttgactacccggtgcatctctttcaggtcgtatgctctctctgtactttcataacttgtatcttgcggcaagttcaggtggtataagttgtcggtttggtcaacaaatgtttgatcgcggactaccttgcggtagttgttgatgaatatattgcgcatgatggtgtacatccatcctttaaaattagtatcaggcatatatttatcttcgttatctaatgcttttaatgacgtctcctgcaacaaatcgtttgcttcttcacgatcagttgtcagtttgtaggcgaagcggaataattcttcttgtactcctactaaatcttttctgaagcttaaacttttcatactgtgttgcttttaaattgtgaatattcgttcgtaaatttcgatgttgcaattttacggtattttcaggaattcgatgggggaaaatcagactgaatttgacctgaaaattgtcagctgatagtttttaggtggtatttgatagtttttgggtgctatttttttgtgttatgaactttaatcctgcattttctaccaaattattgcgattaataaaaaagaaccgttaattttgtgccatcatttttatttgaaaagaatgactgatgactctttatttttgattgatgtcgataagattcttcggacaaaagctccgaagcgatataagtacatccctaagttcgtgatttcttatttgaagaaaattgttcatcaggatgagatcaatgtattcctgaatgaatcgaaagataaagtaggggtagacttcttggaggcatgtatggactttctggatgcgaaggtggatgtgaaaggtatcgaaaacctgcctaaagacggattgtacacctttgtgtccaatcatccgttgggagggcaggacggtgtcgcgcttggttatgtgttggggcggcattatgacgggaaggtgaaatatctggtgaacgacttgttgatgaatcttcacggattagctccgctttgcatacctattaataaaaccggcaaacaggcaaaggatttccctaagatggtggaggccggatttaagtccgacgatcagctgatcatgtttcctgccggtctctgttcgcgtcggcgtaatggagtgattcgcgatctggaatggaagaagacatttgtagtaaagagtatacagacggaacgtgatgtgatccccgtgcattttggaggtcggaactccgatttcttttataatctggcaaatttctgcaaagcattaggtattaagttcaatatcgccatgttgtaccttgcggatgaaatgttcaagaaccgacaccagacttttactgtaactttcggtaagccgataccctggcagactttcgataaatcgaaaactccgacacagtgggcggagtacgtgaaagacattgtatataaactgtaactgatagaacaactataacaagaaatatggaagagattattaaaccggtaagcaaagagctgctgaaggcggagttgacggaagacaaacgcttgcgaatgacgaataaaagtaataatcagatttatattattacttatcagaatgcacccaatgtaatgagggaaatcggtcgtttgcgtgaaatcgcttttcgtgctgccggtggaggaacggggctgtcgatggatatagatgaatatgacactatggaacatccatataagcagttgatcgtatggaatccggaagcagaagaaatattgggcggctatcggtatttgcttggaacggatgtgcgtttcgatgagaaaggcgctccgatcctggctacttctcatatgtttcatttctcggaaacttttattaaagaatatcttcctcagaccattgaactgggacgttcgttcgttacgctcgaatatcagtctacacgtgccggtagcaaaggattgtttgctctggataatttgtgggatgggttgggcgcgttaacggtggtcatgccgaacgtgaagtatttctttggaaaagtgaccatgtatcctagttatcatcgtcggggacgtgatatgattctttatttcctcaaaaagcacttctatgataaagaagaattggttactccaatggagcctttgaagtcggagacttccgaagaagagttgaaggctttgttctgtaaggatactttcaaggaggactataagatattgaattgtgagattcgcaaattgggatataacatcccgccgttggtgaatgcttatatgagcttgagccctacgatgcggatgttcggaaccgccatcaactatgaatttggcgatgtggaagaaaccggaatcctgattgcggtagatgaaatattggaggataagcggatgagacacatccagacgtttatagaaagccatccggatgcgatgaaaatgccttgtgataatgatgaagcattcgctccgaaagtcgttacaccgcaggcagactgttgccgttaattttacgataaagatcaagagcgaagacatcggtcatacccgatatatagtcaagtaccgcctgtattctttcatagagtgcaggcgcttttatattatactggcttgaaacccgattgatgagcaactcggaataggcctttccgggagaggttaccgcatctatcatcagttccagcaaggtactgatgacgcggaaaccggctaactcgatgtccagtacatcccttgaccggtagatctttttcagggatacttcggcgcagtgcttgtatgcgtttgccggacgctcggatatatgtttgataagcgctccttcaaaagtgccggatagaatctccgcttcgtgctccagaaatacacgggtacattcgcgaatcagtaatccgatgacggaagaacgcagataagcgatttgctcattcgtgtcgctgacaatgaggaaggtttgtcggatgcgttcccggcgttcttcactgaaataggccattaacagttcctttgtctcttcggtagtgaggattttcagtttatgcgcatcttcaatatccatcatttgatagcagatgtcatctgcggcctctaccaagtagaccaatgggtgacgtgcatatttcaacggatgttcattaagtaaggttaatcccaactcggttgctatcttatggaaactttcttcttcgctgacgaagaatccgaatttggattttgtgccggcaagacttgatgaaaaggggtatttcacaatggaagccaatgtcgtgtatgtcattgcaaatcctcctttccgcctgccttcaaattgatgggtcaggagtcggaatgcgtttgcgtttccttcaaaatgtgtcagatcttcccattccatcgtagaaagttgctctccgtccggctgtatttctttcaagtggagtcctttcccttcagagaagaatgtggatatagcccgctcaccggaatgtccgaagggaggattgcccaagtcatgcgccagacaagcggcggagacaatagaaccgatctccggtaaaaaggattcttgaagctccggttggcgttgcaggatggctttggctacatcattgcctagagaacggccgacacaagaaacttcgagactgtgtgtgagccggttgtgtacaaagacactgcccggcaggggaaatacctgcgtcttattctgtaacctgcggaaaggagcggagaagatcagacggtcatagtcccgttgaaattccgagcggttctcctgtcgtacttcgtggaattcttccattccgaagcgtttagctgatattaattggttccaattcatggcaaatgtgtgcattatttattatttaactgcaaacttaactatttttcagttcaaaatgtgtattttcgcctgttaatatagtaaacgtgtattttatgaatattcaagttatcaataaatcgaagcatccgcttccggcttatgccacagaattatctgcaggaatggatatccgtgctaatctttccgaacctattatattggaaccgttgcagcgttgtctggtacctaccggattatatatagctcttccgaaaggattcgaagcacaaatacgtccccgtagcgggctggctatcaagaaaggaatctctgttctcaattctcccggaacgattgatgcggattatcggggggagatttgcattgttttagttaatttatcgtccgaagcgtttgtgattgaagatggagaacgtatcgcccaaatggtgatagccaagcacgaacaagccgtgtggcaggaagtggaagtgcttgatgaaacagaacgtggagccggaggcttcggtcatacagggaaaaaatgaaaaagataatactattcttgctgataaatgccttactgtttcctctttgcacgactgtgcaaggtaaaaagaaaaaggtgaggaaggaggagaaaactgttgtactgcaactgacggaagagcagcaacgtaaatatgactatttctttcttgaagctatacgaatgaaggaaaagaaagaatatgctacggcttttggtctgttacaacattgtttggaaatcaacccgaacgcttcgtccgccctttatgaaatttctcaatattatatgtttctccgtcaggtacctcagggacaggctgctttagagaaagcggtagcttatgctccggacaattattggtatagtcagggattagtcagcctgtatcagcagcagaatgaactggataaggctgtgactttgcttgaaacaatggttactcgttttccggcgaagcaagaccctttgttcaatttgcttgatatttacagccatcaggagaaatataatgatgtgatttccacattgaaccgtttggagaaacgtttgggaaagaacgaacagttgtctatggagaaattccgtatttatcttcagatgaaagatgataaaaaagcattcagggagatagaaagtctggtgcaggaatatccgatggacatgcgctatcaagtgatactgggggatgtatatctgcaaaacggaaagaagcaggaagcatacgaagcgtaccaaaaggtattggctgtggaaccggataatccgatggcgcttttctcgatggcttcctattatgatcagattggacagaaagaattgtatcagcaacaattggacacattattgctgaataagaaagtggcgcctgatactaaaattaatgtgatgcgtcagattattgtggagaatgagcaatcggccgctaaagacagtacccaagtgatagccctgtttgatcggattatgaaactggaccaggatgatccgcagattcccatgctttatgcacagtatctattgtcgaagaatatggaaccggaagcagtgcctgtattggaacaggtggttgatttagatcccacgaataaggctgcccgcttgatgttggtcagcgctgccgtgaaaaaggaagactacaagcagattataaaagtctgcgagccgggcattgaagctactccggatgcattggaactttattattatctggctattgcctatcatcaggcagagcagacagacagtgtgttgagtatttgtagtagggcattagagcatattacacccgatacccgaaaagaggtcatttcggatttctattcaattatgggggatatctatcataccaaaaagcaaatgaaggaagcttatgctgcctacgattcagctttggtgtataacccttccaacatcggtgcgttgaataattatgcctattatctgtctgtggaacggcgtgatttggataaagcggaagaaatgagttataagaccgtaaaggcagaacctaataattcgacttatctcgatacgtatgcctggattctttttgagaaaggcaactatgctgaggctcgtatttatattgataatgcaatgaagagtgatggagggaaaagtgatgtaatagtggagcattgcggggatatttattttatgacgggtgatgtggaaggcgcactgggatattggaagaaggcattggagatgggtagtgagtcgaaaacattgaagcagaaaatagaaaagaagaaatttatagcagaatgaaaaggatagtttatctattgttggttgtggttgtgttggctggttgtaagagttcgaagcgcctggtgacttcggagacaaaggcacctgtatccagttatctggcttccaagctccaactgactattcccgataaaaaaggaggaagcctgtcggtaggaggaaccatgaggatgaaaactcatgagcgggtgcaaatctctttgctgatgcctattctgcgtacagaggtagcacgtatcgaagtgactcctgaggaggtattgttagtggacaggatgaacagaagatttgttcgtgcaagtaaagaagaactgaagggtatattacccaagaatgcggagttctctcgtttggagaagatactgacagatgcgtctttacccggtggaaagacagaactgacaggaaaggatataggaatttcttcgttggaaaaagtaaaggtgcaactttatgagttctctacgaaagagttttcaatgactccgactgagttgagttctaagtacaggcaggttcctttggaagaattaataaaaatgttggtagctttgttatgatgaaacgtttttttgttattcttatcggttgcctttggctggcagttccgcttttcgctcaatcgaacaaactgattcgtgagttggagagcaaacgtggtgcgctgcaaaaacagattgccgagtcggaaacgatattgaagaatacaaagaaagatgtaggtagtcagttgaatagtctggcgacattgaccgggcagattgaagagaggaaacgttatatcatggctattaacaatgatgtagaggctatcgagcgtgagctggcttctcttcaacggcaattgaggagcttggaaaaagatttgaaagataagaaaaagaaatatgaagcttctgtccagtacctgtataagaataaatcgatagaggaaaaactgatgtttattttttctgccaagaacttggggcaaacttatcgccgtatgcgttatgttcgcgaatatgctacctatcagcgtttgcaaggagaagaaatcctgaaaaaacaggaacagatacgtaaaaagaaggcggaacggcagcaggtaaaggctgccaaagagaatttgctgaaagaacgtgaaggtgaaaaagtgaagttggaagcacaggagaaagaaaaaaggattttggttgccaatctgcaaaagaaacaaagaggattgcagaatgagattaataagaaacggagagaggctaatcaactgaatgcccgtattgacaagctgattgcggaagagattgaacgtgcccgtaagcgtgcacaggaggaagcccgtcgtgaggaggcggctcgcaggaaggcgcaaggcaaggaaggacaatcggctggaaccggagcgaaaacgaagtcgaagcctttggaggtgtatacaatgagtaaggcggatcgggagctatccggcaattttgccgccaatcgtggaaagcttcctatgcccatatccggtgcttatatcatcaccagccattatgggcaatatgcggtagagggactacgcaatgtgaaacttgataataaaggaatagatatacaaggaaagccgggtgctcaggcacgtgccatctttgacggaaaagtggcagccgtattccaactgaacggattatttaatgttcttatccggcatgggaattatatttctgtttattgtaatctgtcttccgcttctgtgaagtccggtgatacagtgaaaactaaacagcacatcggagaggtcttttcggatggaacggataatggacggacggtgttgcatttccaactgcgtcgtgaaaaggagaaactgaatccggagccttggctcaatcgataaagtgatagttgaagatactaagagtataacgagcggacttctgtattaaagcagaagtccgtctaataattccagatatagtccgatagcttcttctatctctttcagcataatatattcttctgccgtatgtgaacgtgaagaacgtcccggtcctatttttaccgatggaaaaaacattaatgcctggtcggatagagtaggggaaccgaaaggaatacgtcccatttttattgctttttggacaaacggatgtttctcgtcgatccgtgaggagttgagacggaacgagcgggctttggcttcgcaagagatatgtttcttgatttcagcaaataaatcttcattcgagtaaagctcgttgctacggatatcaacaacgaaagtgcacttatcgggaactacgttgtgttgagtacctgcattaattacagttacactcatttttaccggtcctagtaactgcgattctttatcaaagcgatagtcgcggaaccaggcaatatcattcaagaccttataaatggcattgtctccttcgttgcgtgcggcgtgtcctgccttgcctgtggcggtaacgtccaataccataagccctttttcggcaatggcaggttgcatctccgtcggttcgcctacgatggcgaatgaaatgggggggagtccaggtaatacactttcaattccgtctttgcccgatacttcttcttcacaggaagcaagataaatcaaattatatctctgtgaagtacgacatagttgcagaaacacctgtaatagagatacaacacttgcgcctgcatcgttgcttcccagtccatacaattttccgttctcttcacgtggcgtaaacgggtctttccgccagccgttgacaggtttgacggtatctatgtgggaattgagcagtatagtcggcttcttcaggtcaaacatggggctaaagcaccacacattattacccttgcgcccggtctgcataccttccatttcaatataattttgcaggaagtctgcggcttgagtctcttcccggctaagagaagggatactgattaatgatttaagaaggcttgtagcctctgctgtcatagtcggaatatcatatttcatactgcaaatattttgtctattacttaatatttgcacaaagatagtcgttttgcgcaattgtttcaaataaaactaatacctttgtaccatatttactaatacaaagagtatgacttatcatcatttatctgtcttagtccatcgtcaggctgaaaagtatggcgacaaggtagccttaaggtaccgtgactatgagacagctcaatggattccgatcacctggaatcaattctccggaactgtgaggcaggctgccaatgcgctcgttgcgttgggagtgggagaacaagagaatatcggtatcttttcgcaaaacaagcctgaatggttttatgtagattttggtgcattcgccaatcgtgctgtgaccattccattttatgcgaccagttcaccggcacaagcacaatacattatcaacgacgcacaaatacgctatctttttgtaggtgagcaatttcaatacgacgctgcattcagtatctttggcttttgcacctcactgcaacaactgattatctttgaccgttcggtagtaaaagacccccgtgatgtgtcgtccatctattttgatgagtttatggcgatgggagaaggacttccgcacaatgatgtggtggaagagcgtacgggacgtgcttcttatgacgatttggctaatattctttatacgtccggaacgacaggtgaaccgaagggagtcatgcttcatcattcttgttatttggaacagtttcgcactcatgacgaccgcctgactacgatgtcggataaggatgtttctatgaacttccttccattgacgcatgtatttgaaaaggcttggtgctatctctgtatccataaaggggtacagatctgtatcaatctccgtccggcggatatacagacaaccattaaggaaattcgtccgacattgatgtgcagcgttcctcgtttctgggaaaaagtgtatgccggagtacaagagaagatcaatgagaccacaggaatgaagaaagcattgatgttggatgctatccgggttggtaagattcacaatcttgattatctgcggaaaggaaagacgcctcctgtgatgaaccaattgaaatataagttctacgaaaagaccatttattctttactgaagaagaccatcggtattgaaaacgggaatttctttccgactgccggtgctgccgtacccgatgaaatcaatgaatttgtccattcggtaggcattaatatggttgtcggttatggactgacagagtctacggctactgtgtcttgcacattgccggtgggatatgatattggttcggtaggtgttgtattgccgggagttgaagtgaagatcggtgaggataatgaaattcttcttcgaggtaaaaccattacaaaaggatattataagaaagcggaagctacggctgctgctattgattcggacggatggtttcatacgggcgatgcaggctattttaagaatgggcagttgttcctgacagagcgtattaaagacctattcaaaacttcgaatggaaaatatatcgctccgcaggctttggaaacaaagttggttatcgaccgttatattgaccagattgctattattgccgatcagcgtaagttcgtttctgctttgattgttcccgtatatggatatgtgaaagagtatgcgaaggaaaaaggtattgagtataaggatatgagtgaattgttgcaacatccaaagattgtagggctgttccgtgcgcggatagaaaccttgcaacaacagtttgcgcattatgagcaaatcaaacgtttcaccttgcttcccgaaccatttagtatggagcgtggagagcttaccaatacattgaaactgaaacgttcagtcgtttctgaaaattataaagacctgattgagaagatgtacgaggagagttgagagccaggcttgagattcgatgtgagataagtgtacgattataatttataacttttaatttctaatttaagaagatgattactattgaacaacttaaagacgtgaaagagcgcacggatgcgctgaggaggtatctttgacgtcgacgggaagaaaattcaagttgaagaagaacagttaagaacgcaggctccgggattttgggatgaccagaagaaagctgaagcccaaatgaagttggtgaaagacctgcaaaagtggattgacggctataatgaggtcaaaacgctggcagatgaacttgagctggcatttgatttctataaagaggaactggtaacagaggaagatgtggatactgcttatgcgaaagcgcgtgaggcggtagaagcgcttgaactcaagaatatgcttcgtgatgaggccgaccaaatggattgtgtgttgaagatcaattccggtgccggtggtacggagagtcaggattgggcttctatgttgatgcgtatgtatttgcgttatgctgagacaaatggctataaggctactattgccaaccttcaggaaggtgatgaggccggaatcaaaacctgtacgatcaatattgaaggggattttgcctacggttatctgaaaggagaaaatggggtgcaccgtctggtacgtgtctctccttacaatgcacagggtaaacgtatgacatcttttgcttctgtctttgtcaccccgttggtagacgacagtattgaggtgaatattgagacggcacgtatctcttgggatactttccgaagcggtggcgccggcggtcagaatgtgaacaaggtagaatccggtgtccgtttgcgttatcaatacaaagatccttataccggtgaggaagaggagattctgattgaaaatacggaaacccgcgaccagcctaagaaccgtgaaaatgcaatgcgccagttgcgttctatcttatatgataaagagttgcagcaccgtatggcagaacaggcgaaggtggaagcgggaaagaagaagatcgaatggggctcgcagatccgaagttatgtttttgacgaccgccgtgtgaaagatcatcgtaccaactatcagacttcggatgtgaacggagtgatggatggtaagatagaggattttattaaggcttatctgatggaattctcttcacaggaatcataaaatacaaaattagcaactgttatttttggaaagttaaaagatttgtccttactttgttagcgttgaactttaaagctaactattatgggcaagggtaagaaaaaagtagcgattagtaagaaggaagaagagcaggcccagaaggttgtcaaaatagtgtttgtctcattaattattttggcactgattatgctgattgccttttcctttttcggctgataatctcaccacaggtttgtgtaatctgtggtgagttttttgtaatactactgtaaccggattgtcattcttgtgtatccttgcagttgtacttttgctgcggattaagtagcaaacaactgaaatgagtagaattacaacaacagtcgtaacattattgttggcggcaacagctttcggacaggctaaagaagacgccggagatggcaaaaaattagataagcagacgatggaatggaaagactatttgcccgagattcacggaacgattcggggaaaatacgaattccagacagaaacagaggaaagtcgttttgaagtacgtaacgcgcgctttagtgtttcgggaaatgtgcatcctttggttgcttataaagcggaaatcgacctttctgacgagggctctattaaaatgctggatgcgtatgcacgtgtctttccgatgaaagatcttaatttcacgattgggcaaatgcgggtaccttttacgattgatgctcatcgttctcctcaccaacagtattttgccaatcgttcattcatagccaagcaagtaggaaatgtccgtgatgtcgggttcactactgcttataaacatacgagtggcttcccgtttattcttgaggccggattatttaacggttcggggcttaccaatcagaaagaatggcataaaacattgaactactcggttaaagctcagttattgcccggcaaaaattggaatataacactcagcacccagatgataaagccggaatccgtacggattaatatgtatgatgccggtatttactatcaaaataatcgttttcatattgaagcggaatatctatataaaatgtacgggcatgagacgtttaaagatgtgcacgctgtgaatagctttgtcaattacgacttgcctttgaagaaagtattcaataaaatttcttttcttgcacgttatgacatgatgacggatcatagtgacggcaaaatagataagacgacaaatgccttggttataaacgattatgcacgccatcgtgtcacgggtgggatcacacttagcctttcaaaagctttcattgccgaccttcgtttgaacttcgaaaagtatttctataaaaaaaacggtatcccgaaagaatcggagcaggataaaatcgtaattgaatttatgacaaggttctgatttttatgattacttttgtggcatggcacaagaaatagaacgtaaatttttagttatcggagagtataagtcgttggcatttgcgaaaagtcgtattgtgcagggatatatcagcagtgctcgtggaaggactgtccggatacgtatccgggatgataagggatacctgactatcaagggggcttccaacgcttccggtacaagccgttatgaatgggaaaaggaactgtctttgccggaggcggaagaactgatgaaattgtgtgaaccgggaattattgacaagacccgttatctggttcgtagcggcaggcatatatttgaagttgacgagttttatggtgagaatgaggggcttgtggtggcggaagtcgagctggcttctgaagatgaggcctttgtgaagccggactttatcggtgaagaagtgacgggcgatatacgttattacaattcccaactaatgaaaaaaccgtataagatgtggtgaacgttaacaaataaaccgtatatttgttcttataataaaaagggtagtatatggaacagttatatggttatgtgccacgagaattggttacctttattctggtgaccttattctctttgttaatcggactctcacagcgccgtatcagtctgaagcgtgaaggggagacaactcttttcggtactgaccgtacatttactttcatcggtatattaggctatcttctttatatattggaccctacggggatgcgtttgtttatgggaggaggcgctgttttgggactgttgctgggactgaactattatgtgaagcaggctcaatttcatgtttttggcgtgacgactattattatcgccttaatcacctattgtctggctcccattgtgtccacccaaccttcctggttttatgtcatggtgattgtgacggtacttctgcttacagaactaaagcatacctttacggaatttgcccagcggatgaaaaatgatgaaatgattacgttggcaaagtttttggctattagtggtattatattacctatgcttccacataaaaacctgattccggatataaatctgactccttattctatttggttggcaacagtggtcgtctcaggtatttcctacctctcttatttgctgaagcggtatgtgtttcatgaatccggtactttggtgtccggtattataggtgggttgtatagtagtacagccactatttcggtacttgcacgtaaaagtcggaaagcttcggagcaagaggctacggagtacgtcgcagccatgttattggcggtcagtatgatgtttttgcgttttatgatactgatacttatttttagcagggaaatctttctttctatttatccgtacctgttgataatgtcagtggtatccgcgatagtaggttggtttgttcattcacggcagaaacttcctaaagatacttctgtcgagtcggaagaggatgatagcagcaatccattggaatttaaggttgcgttgatctttgctgtattatttgtcgtatttacggttttgacacattatactttggtttacgccggtacaagcggattgaatttgctctcttttgtatccggtttcagcgatataaccccttttattttgaacttattgcaaaatacggggagcgttgccgtactgattattacagcttgcagtatgcaggcgattgtaagtaatatattggtgaatatgttttatgccttattttttgccgggaaaagaagtaaacttcgtccttggattttgggaggcttcggagcagtgattgtctgcaaccttgttttactattattcttttatctttaaaaaagtctccttttttctatttgtcatacaaacatcttctttttcgtttactttctgctaatgaaaagattgaaaaacttcttttttcttttttcttttttctttttgtgttttattaaaaagtttgttttatatttgttatcttgcgatatttaatttacttttgctgctgattagcattgtattagggaacaatgtagaacaaataagcaaaaacaaacgcgtaagacgcaggttatgggaaatgagggcgaagggcatagtgctttccttgtacaaggaaagccggtgtcgtttatatgtaagcacaaaaagatttggcatatttctagaataaaactactattttgtgtgttgtttttattcttttcctttttaggggtagaatgctatgctcaatcttctatgcgtaagaaggcagtggaaaataaggattccatcatgccttttaagtctcgatgggcatttaaaacaaatgctgtcgagtggcttgtattgttacctaatgttactgccgaattcgatttgttcggttctccttataaacactacacattaagtctcggtatcaaaggcaactggaacacttctcaaaattataaacctagcattgtatataatctggttgatgcccgtatggagttccggaaatatttccgtactactcaacgtaacttccatcatctggattctgcttctttctttcaacggatgaaagaggaagtgttcactattaaacgtttccatcctcgttattggcgtgcctattattggggggtgtatgctgacgttgctaattataattttaaatttggttcgacaggaatgcaaggttctgcttacggtttgggtgtatccggtggattcagtattcctttatatggttatcgccagaacttcattgatttggagttaggtgccagtgtcggatttgtatatactaaatatgatgcgtataagcatgatgctgaaagtaattgttatcctcgcttacctgaaaaaagtaagggaggtcatttagttcctttcccggttgtcagtgatttgcgggtagcttttgtttatcgtttctctacttctgtcaagaacaagtataaactaattgattatgataagataaatgcgcgtgcggaagctaagcgtcaaaagcaattgaggcgtgattctattagtgaagcacgggatagggcgaaacatctgaaagagttgcagaaagactctatacgattggcaaaagaagctttggatcatataaaggactcacttaagagacaagataagttgatgaaagattctttggaacaagtgaaaaagttggagaagaaaaattcaaaggaagagaagaagcaagctgggaaagtagtggaaacacctgatatacaacaatcaacggaggaacagcaacctgctcaggagaaacagcctgctgagtctgactcgcctgaaccgcagggcgtcgaaccacaatctttgaaagatcaggaaatcgtgccactaacgactaatgagggaggtgaagcgtaatgaaagtgactgttatatatcaaattctattggcttccttgcttttggtcggttgtacaaaggtagatctgtgtgatgaaactacacatccgcacgtggtggacgggttctcggttacatataattggaatgaactgggcttatctgccaatgaaacgcctgagaaactatattttgtagctactcgtatcctgaatacacggcatatagtttatcagacagataaagatggaaactttaaagtggagaagagcaaagaagaaacggcaataactcctgatgacggaaatactgaaacttcgggtgatggctcaaccactcgcgacaataccgacatcacgactcccgatgaccagtccgaacctcagagtgagtatcagcctgatatcaagcttcctggaggtgaatatgtgatgatggcttttactgatccggcatatccgatggtgaagaaagagaagaaggatgaggacgggaatgttgtaaaagacatgaatgataatatcgtcatggaggaagtgaaagatacgagagttgaattgcataatttggatgaattcaaggaaaacgatgctgttcacatgaaagaagtaaaaatgcgtcatcatgcattagagagtgttacggatattgttcatgatacatggaaggatttgaatcccggcattgaacatgtatgggaggcaggtcgtagattaatcatttcccgttgtgattatctggaactgaatgcggggaataattatgaacaaccattcaatttcacctctttaactcagcatattgatattaacttttacctggacttggtagaggatggagagggtgaagataaacaacagctgaaaccggaagatatcaaatatatttttgtcgaaatgtctggaattgtaccggaaatttctctttctaccggattgttgaatacttcatctttgaaaagggtgattgtgaaagtgcctgttcctactactggagaaactataacggaagaaagtggcaagaaatgcaccaccttgaaatgtactgcctctatggatgtgttcggtttagtcggtggtatggataattatgcgattatgggaccgggagtttgctgtctggctctttcagtgaagaccggaacaaaagaatttatttctaacggtatagccaatctttccagaaagatcaaggaattaggcttgaccgaagaaaccggacaggtgaatgagcgaaggagactgaaagatagcggtgaattgactattgatgtccatttacgtatcactccttccggtgcacaaggtggagcaggtagtgatggagtaataggctgggacgatgtaacgaatgagattcatgtggatatataaaagtatgatggaaagaggtcaaacatatataggcgtaagacaggtcttgtgggtaggactttgtatgttgctgctgtgcggttgttccagaggtacgtatgtgggcgagttaccggaagatgacgatgcacctttgacggagaatattcctatcgttttaggttttggtgtatcgagctttgatatattgacgcgtggaagtggagctgtcgagagtggaacaaatttagaattttggaagaatgcgaagttctacgtttatgcatttaataagaatgtagaaaccgatttgtctgttcgttggagtgaggcaaatgaagacatttgtttattggatgcaaacagactttcggaagatgggggacaatcctccagccatgggaaagaggttcgggtaaaggttgataattcgaacttaatgccattctttcctgatgataaaacaggctcacaggatatttactataatatgaagcatacggattggccgtataacttctttgcttattatctggatgatttggatttaacacaacttcaatgcgttcgggagaagaatcgtatttattatgatgtagagttggatgggcgtagggattttatgtcttctgtggccaatcccaaattgcaggaagataaatatgcaaataatccctataaacaaaaaatcatggaccgtgcatatagcgcctattctgctagtcatggtttgaatccagtgtttagttttcagcaccatttggtacgtctgcgatttgtaatctgccgtccggaggagggtggaagtgtaccttctatcaatgaaagtttggttgtaaaaaaggttagtgtaaaatctaaagttcggggacgttttaccgttgctgtcaatgatatagatgcggatgatgcaggaaaaactcatgtagggctatcttttaatagagaagactacgcgtcggaggaggcttatgcgaatagtgaagactatctgtacttgttgaaaaagaatggtgaggagatagggagtgacggatggtgtcgggtaattgactgcaagaagtattcagagttaagtgcggaagataaaaagaagccttcttttttaggaaaagaagatgagaatgataatagcggtgccagcttgttattagcgcctgctactacttattcggcacgtatctttttggatgaagataagtcgagtgacccaggacatggatttgtagatgttgatttggagcctggtggaggagctggttttgtagcaggtggtgcgtatgtaatctatttaacaattaatagtttatctgatattaaacctaatgttgaaatcggtgaatggacaccgggtggagaaactatattagatccggatggggaatttgaagataaataaaatgtgaaattcaaatatatttattaatttaaattgtattatttatgaaacgatttcttctttatgcaatgatgacagccggagtgttggcgtcttgttcacagggtgagaatgatggtttacctcaagatgattctgtaaatggaggtactgatgcagctcctattctattgtcggctgtggctccttcagcttctgttgaggcttcgacaagaagtgcaggtactgttggtgggaaaggtgacgctaatgtttggagtggtcaaagattgcatatttttgcattccaaaaagacgcaactactggtgaaacttatggtgataaaattacaggtgataagactttctttgataagattggtattgctgccagtgacaatgaaaccgtagttaaatgggaaaatgatcagactttatatttccctcgtagtggtgcttatgatttctttggttactatgcagatgatgcattgggagcaaatccaacttatgaaacaggaacaaatacattatatgcaaactttacaattgatggctctcaggatcttatgattgctaaagcaaaattgtcaacagaacaggaggctgcacttggcgatgacaagtataaagcatatagtgcatatactgctcgtaaaggatatcaaccagcaatgacatttgaacacttattgactcgtttaacttttaatatacagggtatgggcgatcaaggtccggaaaatgtatatgtaaagagtattcgtgttaaatcaagaaatacaggtaaattggtttttgcttatgtaacagatactgataagggggctgtttttgaccaatttacaccggagactctccctttcttatatctgaaagagagaaatatgcaaggtgttatgcaggcattggacgcagacattactttcacagaggctgacctgactgaggatataaaagatttcaaaggtactatcggaaaataccatgcgtctgcaactggtgctgcaaatgcgactcccgtaggagaagctttgttggttgaaccgggtgtaacatcgtatgcccttgaagtggatgttgtacaatattataataaaaatggtaagataataacagatttaactcaacgtgaaaatacttataagttgaatttggacattgctaaagttgctcctcctaaaggtgaaccgactcccacaatatttgaagcttctaaatcttacgatgtaactattcaggtacatggcttaactgagataactcttactgctaaattgggcgaatggaaagatggaggaagtattgtgttcgatcctgataatgatttttcaaatgatgtaaaataagtaatgaatatgaaaaagaatcttttatatgtaatggcaatggccgctgttttcgcaggctgttcaagtggtgaaggttttgacgaaaaagaaggaaataatactccagtagaaccggtagataatagtgaagtcgaaatagcttttggaaaagcaactacggtgagtgcagtgcaacagtataataatactagagcagctcttggggatacctggaacggtgaacaaattggaatttggggagtagatcgttcagaaactgcagaatggaacttggttagttctcatatatttgggcaaactgatcctgtgactgctacggttgcaagtggtggagatgtgacttttgataatggcccttattactatccgatgagttctaaagttaattatagtttctattcttgttatccggtcgttagaactgctgttgctgctaggaggtcgatttcttgtccatatacaattgatggtaagactgatattatgtggggaagtgcagtttgtgaagataagatggtcgatggtgttacatactcaggttataatgcattatattttcgtaaagtggttgacgcacctgttcctgatttgaaatttcaacattgcttgactagattaaactttgtagttcaaaaaggaattgaagggggaggaaaacctgtccctgttgctgttcaagatataaaagtcttgaatgttcctactgcggctaatttaacagttgtgggagatggtgctggaaccttgacagagtctggtgcaacaggtgagttgtctttgtataatggagatactccttcttttgatacgattgttgttcctgaacttggtcaagaaaaagcattgggaacagtgctgttaatgccttcaaaaacaaaagaatatgagttggaagttactttggtagccctcgacgagaataacactcctactggaaaaccagaaaagggtattgtgaaaattaacagtaaagtcgatttcgctcctaataccaaatataaagtcactttgacagtgtatggattacagatagtccaggttcatgctacattgggtaagtgggaaaccggagaggatataactcaagaggtcaattaaacattaaaaaagtgtttatgaataaatggatattaggtgtatcggttatattatttttactgacatcttgtagtaaagataatgatgagggtacacctcaatctgatgatataatgaatggaggggctgaattgaaattcagctccgatgttctttcgtctatcgtggttgacgttgatcctactagaagttcgactcgtgcgccattgagctcttttgagaacaactctcaaattggaatttatggaataccgggagttgatggagggaagaatgaatcatgtaatttgcgtgattgtaaatttgaatccgattttcaaaaatatttgtttaatggtcgatatacctatgtttctgggtatgacgaattacaatcggaatttcaggctacatatccatcacgagcaaatcctgctttatatttgtatgggtattatccttatacggacaaggcggaatatcgtgaaattgccggagcttctcagtgggctgttccatggcaactagatactgacaatatggctaatacaatagactatctttatacaggtgaaaaattcgttcgatattcagaatggggactcaatccaattactttggagtttcaacatgcctttggtagagtggattttaagttctatacgacgagtatggctgttcttaataagaattatactgtagagtctgttacaataacttgtatttccggtaaaaaaggttggatggcaattgccaatggaagtatgtcatttacaacagagcaatttacttctacatataaagtcgtggatggttctgtcgcatggaatataccaggtgaaccggcagctcgttttatgtttcctcatactcagacgctgataaaagaagtgacttgtgttatgagaagcggagctggagaggttaagaaatatactatttatgatcaatattccggttatacaattccggtacggcaaggagaaataacaaatatgaatgttaaattcttgccaaaagatgcatccatctcatctgcagtcgatgtaaattcatgggatagcaatacgactattgataaagatgtaaagttataataacgacatgacacgaatcgtaaaatatctgttcttctttattttgctgcttggagctggagcacaagagatgtgcgcccagcaaatagcagtgaaaaccaatggcttgtcacttttggcaggagtgcctaacttaggatgtgaacttgtagtgggagaacgctccagtgttgatttaagtttctatggaggatacaaaccttgggggacagatatcaagcttatcggagtacagccggagtatcgatattggtttaacggacgtcctatggtgcgtgaatacatcggtatatccgctttaggtgcgagctatgatatgcatctgggaaaacatatttacgatggagatgccataggtattggtataacgatgggatattcaatggtattgggaaaacgcttgaaccttgaattttcggcaggtttcggagccgtttgtttctggcaccaacaatactatgagaatgataattttgaggattatctgataaataatccgggaaagacgaatgcgcatggatataaattgtttccagccaagttagcggtttctatttcttatattattagatagttagaaagtgagattgtagatatgaaagtaaatttgataagggtgaacggagctatgagaatagcttttctattgatatgttatttagctacttgtgttcagttgaatgcgcaagcccccaaattagtgatgggacgtattttggacaaagaagcatccgagaagaaacgcaaacctgtcccgtttgatatttcttctattggtgacataaagatttattatttcaataccgttcaagaaggaaaggatatggaagcggcactgaacaaagacaatatcagtttgaccctttcagccatgtacgaagtacccgatgcgacgggagcttatcagattactttaccggagaccggttcattggttatcaaagtaagtacggcgcccgctgtatttgaagcaatcagtggtcgacgggagattactacgtatgtagatatgggacacatgattagtcaggtaaccgttgtggggcaacgtacggaggttacgtccatgcccgaaacgcctgatcagtatggagatatgattattttgaacggagcgaaagttgcagttcctccacgtattggaaaggacaatgcccgaatgatcgtacagccatacgtgataaataatagtaaaggaaagaaagttgaaatgtatcgtctgcctcgtgtatacgatggttcgcaatattatctgactcaggaccgtcgtatgggatatgatataacccgggattcgctggacgcttttatcattgaaaacgaacccctctcagcggagaaggcttcctatatgtggaatgatacaatcaaactatccaatgcgcaagataactttcaagtgctggctcttatgcagatggaagattatacgcgtccttattacgagcgcttgttggagctctctacccgtagccccagacgtccgttacgtttcctcgaatattcgctcgaccagtatgaactggaccctaagaaatatgaggaaaaaccgaaagttgaacgccgtaccggtgtggaagacatttctttgagcttcttactggggaaggcggaattggatcctgaagatcctaataatgaagtacagttgaataaactgaaagcgaaactgttggaggtggtaaatggcgaaagttctactttgaaagagcttcatttgtatagcgtttcgtcaccggaaggttcttatgcgtctaatatggctttgtcgcaacgtcgtctggcgtatgcacgttcgttggtgtactctgttattccggctcatacgatgcaacgtttgtatacttatacacctaatgattcgcgagttgctacttggttggaggtagcggatttgctggagcaagatacgctggctgcggaggctgccgctattcgcgaaattgtagagaaatacccgaagaaccaagaccagcaatttcggcaagtagctgctttaccatattatagtactattataaaaagccatcttcccaaattgcgttcaatgaagtgcgaatataccgcagaaatttatcgtgccttgacgaaggaggaaatattgaatcgttaccggaatgatcctgattatcattcgggaaaaaagaattttgctttgtatgaatactggcacttattcaatatggtgaaagatcctaaggaattggaggagctgtatcgccgtgcatatcactattctcaagaattgacgggtggaaaaccgtgggtgctggctgctaataatttagcggtggcttacttgaaacgcgatacggtggatacggaagtattgaagccgttaattgatttctcagtgagaggctgtaatgtggagcgtacgtttgacggacgtgtgattggtattgataatgttgaggaggtggtagccaatcaacttgccatgtatttgaagaagggagatttttcggaggccagtcgtctggcgcaattgctgcccgacaatgagaagaacaagaagataaaggcatttgcgttctgcttgggaggatattataaagtgaccagcggattgaatgatgcggaaatagcccgtcgtctggaaacatttgaattggtcaagaatagttctcctcttaataatgtcgtgatgtgtctggcgatgaagacacacgcatggaatgaaaaagcggagaaagcattggaggatttacccgcagacgatccgaagacgatgtatctgaaagcggtgttatattgtcgtaaaggagacttttatgccatgcaggcagaagaggcgttgacaaactgtttcaagaaggacagcagttatatctcaatagccgaatgggatggagatatcagtgaagactgtttcaaatatgctaagatggggtatgaagatgcaatgactacgggaggaaatgaatagcttaaatagataaataatggtgatgaaaagatatatattgacgtgtatttgttgtggaatatttgcgggcggcgtacttgcccagcagcaagattccattgcaaagatgcgagatgcagcagctgctcaggattccgcaatgcaacgaagaagccaggccgatacagcctatcgtgtgaagttcaatgcaatgaagtattcaatgcagaaacgttatcagcctaaagggatggagttcaacaataaaaagtttcttgataacttcttcttcggtttttggggtggttacaaccgtattattccacaaggggatatgaatctttccggcggaccggaaatcggactgtctgcaactaaattcttttcttctaaaaacggaatgcgactctatggaacatggcaaagcgccagtcgccagagtgataatgaaaaatggagcaattattcgttcggtatagatcatatattcaatcttagtacggcttttgccggatataatccttatcgtatgttcgagatttctacggttgaagggctgggtgtacatctcgcttctttggctggagagaaaaaaagagcgggcgatttccatctaggtttacagatgaagttggccaccggcacgcgtctggacgtgtttgtagaaccggcaatctccttttataccgataatatcgatatctccggagaaaataactggcacggatatgatttgggattgaatgcccgtgtggggatgaattatcgtttaggtaccttcaagcagcgtggaagtacggaagcaggagaggagaacttcttggacaatactttcatcagtgcggctatgggacttcaagcgcaaaattcctcattggccagggaacaaggactgctgggctctacaggacctgtttttaatgtgtccttaggtaaatggtttttggatctgtttggtttccgcttatctgcattcggatcgtatgatgcgtggaaagagaatcaaaaggcaggtatggacagaatgactctgtatggaggcggacgggcagaagtgatgttgaatccttttgtgttgttcaagaaagaagcgcgttctatgcggtggggagttgtcccgatgttcggtgtcgagttggggatgatgaagaaacaggatgagcaggaggttatttctaaaacatatacgggatggacaggtggagtacagtttaagtattatccgatagagaacttggctttcttcgtagaaccacgtatgtccttcgtaccttatacctttacagagaagacgatttccggaaaagtgaatgagtattcttttatggataagctgatgaatattagtgtaggggtcgaattgcgtcgtcctactcgtccgcaatggcagcagttagccaaacttaggggagattttactccttattattatacttcttatgctgtcggcatgacaatgccgcaacagttgaaccggcctacttcacgccgtccgggtttcattaccggagctgcggtcggacggcagtttagtccgctttccggattccgtttaggacttgacttcaacaatgcggctacccgtttggcggatgctaaggttgaccgttacacttttacgagcctttctttggattatatgtttgatatatccaattgggtaatcggttatgatccggaacgtaagtttggtacggaagtttttgccggtccggtcattacccatcgctttgaaccgggaaagacctatttgggaggagaaggcggtgtacgtccttattggaggctaggtgagcaatttgatgtttttgctgagtctaaattgcgactgtatacgcaacgttatattaattcgcgtgagggtaagggaactcctttacagctctcttttgcggtgggtacttcgtatcgattcagcccttcttatcgtaagagattgttagaaagcggttttggtgatggaacattctggggaaatactttcatcagtggaggggtcggctttcagttcctgagtggctcgggacgttctatgggggctttagcttcggtagggcctactatgagtgtatctgccggtaaatggtttctacctttctggggattacgtttctccggttttgcaggtataagtagttgggggcaggctgcgcgtgaagatggaactcttgctgacaagcgaacgatgcaaggaggagtccggatagagagtatgttgaattttctttctttctggcagcatgataatgaacaacgttggggaattgttccgatgttaggtctggaactaggtaaggtacggaggcaaaatgaaaatataaaggttagtgcggcaggtgctgcatatgccggtgtgacggcagggctgcaatgtaaatattacttctccgatcatacggcattatttatagaacctcgtttctctcgtattccttattcttacagagatgtcaacgttattgataattatgtggggcctcgcatctctacggcagataatgtgatgagtgtgcaggtcggactggaattccgtcgtgcaggtggtaagacgttgaaagagctggctgctcgcagaagtgaattcgagccttattattttgcctcatggaatgtaggtggaaatatgcctattcatcgggtgaaattagatgacggttctggtcttggagttttaataggagtgtctggaggacggcagttcttcccttgttctggtgcacggataggcttggattatgttgctttgccgggaaagaacggatcggatgcccgtaagttgattagtttatcggcagattatctctttgatgtgactcattttatgggaggttataatccggaccgtaaatttggtgtcgagttgcttgcaggtcctgtgttgtcattcggaaaagagcctaataaaacgaatattggtgcggagggcggcgtacatttttattatagattgcttaagggattcggtgtttttgccgaacctcgtttgcgactatacactaaagatatatggtcgggtggagatttgactcctgttcatgcgtcattctcggtgggaacctcttacagattttgatttatgagagtataacgtgtactcaaagtattgcaagcttttttagggatattccttaaatatagaatataaggcaactaattcgtaatgaagaagttgccttatttattaaattaaatatagtcatcgcccagttgaatttgggcgtcattgacatatttgcggatggaatgttcttcgtctttacggcaaataagtaagacgttttcggattccgctatcaggtatccttccaacccgtcaattacagcgagttttcctttcggtaatactaccatattgtctttgctgttatataaaagtgaatgacattttaaactgacgttaccttcttggtctctgtctgataaatcataaagtgatccccaggttccaagatcagaccagccaaaatcacctaatgacacatatacattatctgctttctccataatgccgaaatcgatggacacattagggcatgctgggaaattttcttcaataaatgctttttctccatcagtggcataaatttcctttccgggcgccagtttagaagtcagctcgggcaataaggactcacttgctttgataatgctatttacattccacatgaacagtccggaattccaataaaattctccactttctacaaatactttagctaattccagttctggtttctcggtgaatgtttttactttgtagaagttatctccggcaggctcggcgatttgtatatatccgtatccggtttccggtcgattaggcttaattcctagtgtcagtagcttttcagagtgtgagacaaaatccagtcctttttcgatagcggcaagaaattcatcttcctttaaaataaggtggtctgagggggccactactatattggcatttggattcagtgccctgatgtgataggaggcccaagctatacatggagcggtatttcttcgtgcaggttctagcagtatttgtttttcgtttacttcgggtagctgctttttaactaagtctgcatacattgcattggtaacgataagaatattttctgttggtattaccttttggaaacgatcaaacgtttgttgtaagagtgaacgaccggttccgaagaaatctaagaattgtttaggcaatgttttgcggctaaacggccagaagcggcttccaataccgccacccataatcacgcaataattatccttgtttgtcataacagagactctatttaaaagtttctgctaatgtacggtttattctctgaatatagaagtgtttgagatatgttttattatttttttctctttttttctaccaaactattgcagattcaaaataatgtcgtatctttgcaccgcaattgagaaatcaagtatgcccagatggcggaatcggtagacgcgctggtctcaaacaccagtggattcacttccatcccggttcgaccccgggtctgggtacgaataaaccctgataatcacctgattatcagggttttctgcttttatagggcgtactaaat

SEQ ID NO: 11744 - DNA, 11586 bp, Unknown
  gut microbiota DNA sequence
aactgcttgattactaactctgcgacatttttgtatttccccctataatacttaagaataatacaaaaatgtcacagcatattattcggttcgtttgcaggcatttgccaggaagaactcgttcaatgcatcttcatggtttccatgaaccaggatatgatgattgcccaatggattcttcaggaaatattctgccggagtattcatccgtatgcgcgcttgtgtccggcacatattgatataattcgtattttcggatagggtcccggtagacaggtagtactcgtccagacattcgccgccgcactttatgatagtcacgtctcctgtcgggagcaatccctggatggcaattcctttttccgtttcgaaatggttgcggataatatacctttctgtctgtttgagcccgatagtacagtgggctaatataagttcgttggtacgtgtattaatcatggaaggatttgccatgaatccgtcttttccggtcagtgacttcacggctagcagggtgaatatggattgaaggtcgccttcgcagcctgccattattccgtcgtcattcaacaaggatagtgccagacagccggtagtgtcgatttgctcaatcagtttgaagcaacttagtgtcagtgcttccagcttctcttcttcgcatactttcttgatagcccggtagagccgcatcgctttgataatatcttcaggagttccctcgcggcaggcaagagcttgcgagacgactgcggcacaggaagcacctacttgatcatccgtgatttgttgaaaatgttcatagatacgttccagtggaatgtctatgtattcgatgccccagcggcgtttggccagcagatagtcaacattactggcgaccagccaggatgaaggagtgccgataactccgatacgtttgccgaataatgaacgttgtgcccggaaattattataaagtatatgtacacgctgtataatggatggcagttcaccatgaaggatttcgctcttcattccccttccgcgaagccatgtagatatctccagggcagctgcaagagagttttgcatgccatctgccagtaaaatggcagggcggggaaggttttcgaaatgttggatgaccagtctttctactccgccagtagcaataaaaataattttgaaatcatcacttgtcaacttgtccatatcttgatagtcgacgagttttacggtataatatttttcaagttcacttaaaatcgcttcgtgtgaactgcgcagtgagacttgtttatgaagtagtgacgcgaatgagataaggtgtatggtcattatgatattgttttaagttttccgtatgacaaatgtatagctttattttcaaaatcccataacgtttttaaccttgctaaggtttttaaagtttttatgtctctgtattcaaattattgcgtacatttgcaacctcaagtagaaaaagtaaatagtaattagtaatttgtagttaaaattatgccaaccatatccattcgcggaaacgagatgcctgcatctcctatcagaaaactggctcctttggcagacgctgccaagcaacggggagtccatgtgtttcacctgaatatcggacagcctgacctgcccactcctcaggccgcgattgacgcaatacgcaatattgaccgtaaagtgctggagtatagtcctagtgcaggttatcgtagctatcgcgagaaactagtgggatattatgccaagttcaatatcaatcttactgcagacgatataatcattacctcaggaggttcggaagcggtgcttttctctttcctttcctgtctgaatccaggtgatgagattatcgttccggagccggcatatgctaactatatggcgtttgctatttctgcaggcgcgaagattcgtacgattgccacaaccatcgaagaaggtttctcacttcccaaagtcgagaagtttgaagagttgataaatgaacgtacgaaagcaatcctgatttgtaatccgaacaacccgaccggatatctctatacacgtcgtgaaatgaatcagattcgtgacttggtgaagaaatatgacttattccttttctccgatgaggtatatcgcgaattcatatacaccggttctccttatatctccgcttgccatctggaaggtatcgagaataatgtggtactgattgactccgtatcaaagcgttattcggaatgcggtatccgtatcggtgcgctgattaccaaaaataaagagatacgtgatgctgtcatgaagttctgtcaggctcgtctgagtcctccgttgattggtcagattgccgctgaggcttccttggacgctcccgaagaatactcacgcgagacgtatgacgagtatgtggaacgtcgtaaatgcctgattgacggcttgaaccgtattccgggcgtttattcgcccatcccgatgggggctttctatacagtggcaaaacttccggtggatgattccgacaaattctgtgcatggtgcctttccgatttcgaatacgaaggtcagacggtattcatggctccggcttccggtttctacacaactccgggttcgggtatcaatgaagtgcgtattgcatatgtattaaagaaagaagatttaacccgtgcgctttttgttctccagaaggctttggaagcgtatccgggaagaacggaataaaagtctatgtctttatcacttttcatagctcggcgcatctaccgcgaaagcgatagcggaaaacaggtgtcacgtcctgcggtgctcatcgcaatggcgggtattgctatcggactggctgttatgattatagcagtggcggtcgttatcggctttaaaagtgaagtgagaaataaagtcattggattcggatcgcatatccagataactaatctggatgcggtcagttcttacgaaacccatccgattgtggtaggagacagtatgatgactgcccttgacggttatccggagataagccatgtacagcgtttttctaccaaaccgggtatgataaagacggatgatgcctttcaaggaatggtactgaaaggggtaggtccggagtttgatccccgttttctgcaagaatatctggtggaaggagagattcctgttttcagtgattcggtttccagcaatcgggtgcttatctccaagtctttggctacaaagatgaagttgaagttgggggataagatatatacctattatattcaggatgatgtccgcgcgcgcaggctgactattgccggaatttatcagacaaatttctccgaatacgataatctttttttattgaccgacctcagtttggtgaatcgtttgaacggttggcagccggagcaggtgacaggggtggagcttcagctgaaagactatgataagctggaagatacaacgtatgaaatcgcaatcgataccgataaccggaaagacgaatatggaggtacgtattatgtgcgcagtatcgaacagttgaatccacagatatttgcatggcttgacttgttggatctgaatgtgtgggtgattttgtttctgatgataggcgttgccggttttactatgatttccggtttgctgattatcattatcgaacgtacgaatatgattggtgtcctaaaagctttgggtgccactaattttacaatccgcaaaactttcctttggtttgctgttttcctgataggcaaaggtatgctttgggggaatgttatcggtctggcgttctgcattcttcagtcccggttcggcattttcaaactcgatccggagacttattacgtagacacggttccggtatctttcaatatcatccttttcctgctgattaatatcggcacactgctggctgctgtcctgatgctgataggtccttcatatctgataaccaagatcaaccctgccaactctatgagatatgagtaatttatcttctcatgaaatctcctttaccccgcaatagacgacagagcttgaacttcaacgactgcaacggttgcaggatatcgaataccggcaatgagaaataatatttccggttgccgcccatttcttttgctgtttggttaatgacaatggcttgcaccgtgtagcgaatcagccatagtaataatgtgatacctgctgctaaccagtggaaatcgaaaatgcctaatacgatacctgcaatgcaagtggcgtaaaataacaggcgtgatagggtttcaaagcctaataggtagcgttgtgccccatgataaaagcgtgcggtggccatataactgaccttttcttctttccagtctttgtaacggtagacaggctgtatccgcatggttgcgttgagatccgtttctacacgggtgttactgctgttggctatttgattgataaacaggtcatcttctccgcgttgaaggttcaggtagcttgaaaatcctttttgcttgaagaataattctttccgataggcaagattacgtccgatgcccatatatggctttccagccagggcaagacctaagtaacgcaatgactggaagagtgtgtcgaaagcgacacgtttgtgcaaccatccttttgtccggtcatacccgctatatcctaacacaacctgtgtctgtgatgtaaaattgcgtgccatcagctttaaccaatccttgcttgccggtatacagtttgtttccgtgaatacgagccaatcatatttgctggctttgatacctaatgtcagcgctaatttcttatgactgatataacgtgcgctgtcgggagtaaaactatggtaaagatgagggtatttttcctccatgaatcccaatacatcctctgtctcgtcggtggaagcatcattgattacaatgacttcgaactggggatagtcctgttccagaatggcaggaagggccttacgcagattgtcggcttcgttgcgtgcgcaaagaatgacggaaaggggcggtaattcccgcgtgaaatgaatttcttccttgcgtacagctttgttatgcgaatgtatccggttgtataaaccgagataataaataacttggatgataaagagaactcctgccgctgacaataatatcagctcggcagtattgaatgtaaatgcttccattgaattttagtgtcgttttacgactacaaaagtacgcaaattttcggtagtttcgccatccggaaggtaggttattttatgaatccaggtattctttcttgaacatattgacgaacagaaagaataacgagagtaataacggaccgaagatgattcccataaatccgaataacggcagaccgataacaactccgaagattgtaatcaacggatgtgtatccgccatcttcttttgaaggatgaagcgaatcaggttgtcggactgcgatacgacaatggctccgtaggcgaaaagtccgattgcatgaaaccagtctccgctgatagccagataagaggcgacgggaaaccacactaatgcggtacctaccatcggaatgatggtagcgaagcaggtgaggaaacctagcagtaagacattgggtgctccgaaaatgagatagcctatcatggcaatgcctccctgaataatggccagcagtggaataccaatcgcattggagcgcacgatcatgttgatttcatgaataacttcccgcgtgttcgtttcattgaacgggagaatatcattgatgtatgcttccatctttttacctcctatcagcatgaagtaaagaacaaatatcatgacgaacagattgacggcgagactgctgatacttgacataatcagttgtccgattcgtggaaggatggagactatgaacgacaacgtatccttccctaatacatcgtatcctgtcttttctttgataaatcctgctacttgctggatgggctctacgaatgtctgcggagccagattgatgtcttgaagtttgtttactatcatccagatggtcagtccgagaggtacaaggaatacaaaaatggtttctgccgtgatcagtaatgcgctgatactgcgttttattttcttcttttccgtcagatgatgcatctgcgtgcgtactaatatgtaaatggtaaatgctcccagcagccctcccaaaaaaggagtgatttgccggaagatgataactcccataaacagaatgatgacaatgagggaatatttccagtattgttctttgagattcatattgtgtaagtaattcgtttatataataaacacaaaaaatcccggaaaggtttgctgccctatgctatatatctgagtcacgctatcgggcattcgttaatatccgatagatttatgttaaatgttaacgagtttgctatttctattaaaccatgttataagacacattgctttttccggaaaatttggagatatgcagaaagtccgtatctttgcaatgtgtttttcatagtattagatttaaggttaacaaaagattggctgtctgggatagatagcctttttttatgctaaaaaagtaacaacaaaatttgcacataacacaaaggtcatattatgaatactttctttgttaagacgctccgtattatgatgcttttcctctttattatttcattagcattaggctatgtgatatatgaggatacattagcggtatggtggattcctgttggcgtggcgcttttgatcgctcttgccactttgcctttttatagaaaatggtcttggctgactacaacagagggtaaagtgatgaatgtcctatgtcatattggttgcgtgggcgctattagttatgccttgttccttagtggcaattattggctggccggtactgcttccatatatgaagaaacggttatggtgcagaaaaaatatatagagacccataagaaaactcgcagggtcggcaaacatcgttatgtatcgaatggagtgcgtaaagaatactatttgcaggttgcttttgaaaatgggaatgtggaaacgttgcatgtatcctctgctgtttataacgagacgcggcaagggaaggagaaagtactgactttgcaaaaaggcttctttggcttgccggtgattgcgaaaggactttgattcaatacacggtgattcgttcaaacattcgtgatatgttacttgttaagagtttcaattcccaaaaaatgattgattatgaaaatggctctttacgacttcgtattacggaaaaaaggaatctatggcattttgcacattgttattcttctactttctctttttctgatcataagtatctctattgatactttcaaaggtattcctttctatacgcagagtgtgtacatgaaagtacagctatggatctgtgtactgtttctggttgacttcgttctcgaatttattctggcggataataagaaacgttatttcactactcactttatattcctgctggttgccattccctatcagaatatcatagcttatatggggtggacattttcgcccgaagttacctatatgttacgttttatccctctggtacgtggcggatatgcgctggctattgtagtggggtggtttacttacaacagggcttcagggctttttgtatcttatttgacgatgttgctggctaccgtttattttgccagtctcgctttttttattactgaacatacggccaatcctctggtcactaaatatacagacgctttgtggtgggcatttatggatgttactacagtcggctcgaatattatagccgtgaccactaccgggcgggtactttcggttgtactggcggctttggggatgatgatgttccctatcttcactgtctatataaccagtattattgaacggagaaataaggagaaacaggaatattatgaagagaaaggagagccggcacataagcaacaggcaaatactgccgcccctcaataaatcttgtagattcaggaactgaaaatataaacgatgagtccggttatcgccacatacaccaaagcatacgggatggccgcttttagtatctcaccttccttaccctgttggtttccggcagaggtagcgatggcaatgctctgcggagagatgatttttcctccggtagcgcctactgtattggctgccgacagccaatccggactgacatgaatttgtcctgccacacttgcctgtaactttccgaagagaatattggatgacgtatcacttcccgtgatgaacgtccccagacaaccaatcaccggagcgaataacggatatagacttcctgtagccgtagccagtgcggtagcaatcacggcaatcattccggaggtatccataatggtagataatccaacaaggcatatcactgtgataaatgttttctttagctgcttcaccgtattccaaagaacggcaaacaactcttttactttagctccttgtattaatccgccgacaaaagtgccgataaagagcagcactccggcatgagtcagccaggaaatcgtatagttggctgtagaggaattaatgggcagactgattctggtgacccagttattttccaaagtatggcgtaatcctggaaaaagagggctggtaagtataatcagaaataagatcagcagatagatactccatgcgttcattatatctttcaccttcagatggcttttccgcgctttttcttctttggatgcggtcagctttccatacaagacaattacaataatggaaagaatgcttccgatgatagccggagattcggctcccatatatttggctgccagatattggctgattagcgaaacgcttcctaccagcaaggcaaggaagatgttctttggtagtgatttgattttggagtcggtaagaaaaagcaataccaatggaataaggaacatcaagaccgacaattgtaatacgacattggtactgagatgcaacacattcagattggtttctttggctaatactagtacaggagttccgatcgctccgaaagcggtagccacactattggctatcagactgaccgtggccgagaatataggtttgaatcccagactgataagaatcgctgccggaatggcgactgcagttccgaatcccgccattgcttccaataacccgccgaatccccatgtcagcagtaagacctggatacttttatcggtagagatagaggcgaattgctgtttgataatctccatcttctctgttttcagtaatacattgtagctgaagatagccatcaggataatgattaaaataggggagacggctttcagtgctccatatataaaggaatagaacagattgtccgcagaaaaagagaagccgaagagggcgatcagcattgttacgatcagagaaatgatactgcttttgtcgcccggcattttgaagaatgccattaatacaattaatagtaataccggaataacagcaaggactaaggtcataatcatatcaggttttaaaaggtgaaacgtccgttagttagttgtataacaaatgaagctctcacttgggtcggtgagggaaatagatttttcgaaaataaataggattttacgtctttattttccataaaatatttacttttgacagataagtacattttttattccactatgttatggacagtgaacggacagtaaaaacaatggctgaacaattagaggcgcttactaaagaaaatgagcggctcaaacaagaactttcagttcttaggcaagagaaagaaaaagccaatcctgttagttttaaagaaaggtatgctgtaaagatcttgaattctttgccggatatgttgactgttttcgatcataacgagataggaatcgaagtggtatccaatgaagaaacgaatcatgtcggagtgacaaacgaggattttgtagggatgcatatgcgtaatatggttcctccggaagcctatcagaacatacattccaatatgcagcacgcagtcgcaacaggggctgtttctgccgcacatcacgaattggatttcaacggcaagcgtcactattacgaaaaccgcattttcccattggacgaaaagtatgtactgatcatgtgccgtgacatatcggagagagtggctactcaacggcaattggaagtttttaagagtgtgcttgataaagtgagcgatagtattcttgccgtgtcgaaggatgggacattggtgtatgccaacaaacaattcatagaagaatacggagtgactaaggaattggggatccagaaggtatatgatttgcctgtttccatgaccacgaaagaggcttgggaaaaacgacttcaggaaatacgggataatgatggcagttttgcctaccgtgccgcttacgtacgtatgggagagacgaagaagcgggtgcaccaggtgtcttctttcctgacacatgagaatgaacaggagctgatctggttctttacgcaggatattaccgatgtcataaagaaacgggatgaactccgtgagctgaatcagttgttggacggcattctgaataatattccagtctatctgtttgtgaaagatccggcagatgagttcaagtatttgtattggaacaaagcatttgccgaacattccggtatccctgcttccaaagcgatagggcatacggattacgagattttccagtcagaggaagctgagaagttccgtaaggatgacctggaactgcttcgtacccaccaaaggattgatatacaggaaacgtatctgacagctaacggtgaagcgcgtattgtgcagacgcttaaagcacttgttccgatggaagaccgtgaaccgttgctgatcggtatttcttgggataccacgaatctccagaatatagaacaggaattgattaaagccagaatcaaagcagagcagtctgacaggttgaagagtgcttttttggcgaatatgagtcatgaaatcaggacaccgctcaatgcgattgtcgggttctcgcagttgttgcctactgcggatacccccgaagaacagaaactttattcggatattatcaaccagaattcggacatcttgttgcagcttattaatgatatattggatttgtcgaagatagaagcgggcacgttggagtatgtgaaacgtccgataaatctgggggaagtctgcaggacaatctatgctgttcacaaggaacgtataaaaggaggggtggacttcatctttgataatggagaggaggacttgcagatggagggcgatccgaatcgtattatgcagatcattacgaattttatcaccaacgctaccaagtttacccatgcgggagagatacgtttcggatttgaacgagaaggggagaatgtccgtgtatatgtgaaagatacgggaataggaatagaaaaagaaaaggtgggacatatttttgaacgctttgtcaaactgaacagctttgtgcagggcacaggcttggggctttccatttgccggatgattatagagaagatcggtggagaaattggggtgacttccgagtttggcaaaggttcgactttttatttcataataccgtgggatattcctaaaataataaaatttaaggcaactacttcattgcgaattagttgccttttttgtatc

SEQ ID NO: 11745 - DNA, 20958 bp, Unknown
  gut microbiota DNA sequence
gatcattgccagcgttatcagggaattacacgagcctcaacaccgcaagccatcgaagcagtctccgccacgcggggggaagtgctgatgtataaaggagcgatttgtgatgcccgtttctctaaatgttgtggcggagcttttgaagagttccaaaattgttgggaaaacgtaaagcatccttatctaatcagacaacgggatagcaagactgaaaaacaacttcccgatttgaccatagaggcggaagctgataaatggatacgcacctcgcctgttgctttctgtaacacgcaggataagaaaattctaagccaaatcttaaacaattacgatcaggaaactgcagacttctatcgttggaaagtcagttattcgcaacaagagctttcagaactgattcatcaacgttcagggattgatttcggacaaatcattgatttaattcctgtagaacggggaacatccggacgtcttgtccgactaaagattgtaggaaccttacggacactcatcattggaaaagagttggagatacgccgcactctatcaacgtcccatctttacagctccgcttttgtcatagacaaggagtacggagatgaactcccttcacgattcatccttaccggagccggatgggggcatggagtaggactttgccaaatcggtgccgccgtgatgggagaacaaggttataagtatgaagaaatactatctcactattaccccggtagtacgcttgaaaaacaatataaataaaatcgaacgaatgccatgacaacacccactacaaaaagaaatccctggagctggatacccaccctctacttcgcagaagggctgccatacgtagcggtaatgacgattgctgttatcatgtacaagcgtttgggattatccaatacggaaatagccttatacacttcctggctttatcttccctggactatcaaaccgttatggagtccattcgtcgatctggtgaaaacgaaacgttcctggattatcgccatgcaagggttcatcgccgccggatttgcaggcatcgccttttttatcccaacggcacattacgtacaattcacccttgctttcttttggttattggcattcagttcggctacccatgacatcgcagcagacggtttttatatgctcggcctcaacaacaaggaacaatctttctttgtaggcatccgaaacacattctaccgactcgccaatattttcgggcaaggtattctcgtcatgcttgcaggatggttggaaacctctcaaggcaatatacctctggcatggagcatcactttctacctcctggccggattattcctggctcttactttgtaccatcgctttatcctcccccatcccgattccgatgtcaaacgtcccggactcacagcaggtaagctattagaagactttcttctgacttttgtcactttcttcaaaaagaaacacttgggtctcatgttctttttcttactcacctaccgattgggagaatcacagctagccaagattgcttcccccttcctactcgaccatgccgataaaggcggattggaactatccacggcaacagttggaatgatatacggaactattggtgtcatagccttgttacttggtggaattatcagcggctttctcgtttcacgtgacggattcaagaaatggatattacctatggcattagccatcaaccttcccgacatattatatgtatggatggctgcagccactcctaacaacccgatattgatttccacctgcgtagctatcgaacaactgggttatggtttcggtttcacagcctatatgctttatctgatttatattgccgaaggcgggcacaagacagctcattatgctatcggaaccggatttatggcacttggaatgatgcttcccggtatgccggcagggtggatacaagaacatctcggatacaccaatttctttatctgggtttgtatttgtacgatacccggtattattgcttcattaatgattcgcaaccgattggatgattctttcggaaaaagcaataaattcacgtgattatatttaagatattaaactgaaaatatacagtaaactatgatgcttatcgcagacagcggttctaccaagaccgactggtgtgtcatcctcgataatacacccatcaaaaggattggaacgaaaggactcaatcccttcttccaatcagaagaagaaattcagcaagaactgacacattccctcctgccgcaattgccggaaggaacaatcgactctgtttacttttacggtgcaggctgtacacccgagaaagctcccaccctccggcgggcaatagccgacagtttacctgttgtcggaaatatcaaagcctactcggatatgctggctgccgctcgtggactatgcggtcgtgaagcaggcattacctgtatactgggaacaggttccaactcctgtttctatgacggtaaagagattgtcaaccacatttctcctttaggctttatcctgggtgacgaaggaagcggagctgttctaggcaagttactagtcggtgacatcttgaagaatcaactctctcccgccatcaaagaagtatttctaaaacaattcgacctgacagttcccgaaatcattgaccgggtttaccgtcagcccttcccgaatcgttttctggcaagcctgtcaccttttatagcacaacatctggaagaacctggaatacgacaattagtgctaggcagcttcattgcttttctccgaagaaatgtaatgcaatatgattacacgcagtatccggcacatttcataggatcagtagctcattgttacaaagagatacttcaagaggcagcacaagagacaggtattagaatcggaaagattttgcaaagcccgatggaaggactcatccaatatcattccgatccgttacatcagccgtagattagctttccttgatcgtttctatcagcttcataaagtcagtcggatgaacgtcaccgatattgccgatacggaaagtatctgcctgtgatatctttcccggatagatgacaaaccctttagctttcagtttcagatagaaatctttaaagttaaagtcagccgaaggataatagaaagaggtgataacaggcgactgctgttcatcgggcagcagagtcttatagcctaaagcgcgcataccttccaccaatacgcgatggttctcacagtagcgggcatgacgagcttctacaccaccttcggctttcaattcagtcaaagcctgcatgaaggcacgtaccacgtgagtaggcgaggtaaaacgccattttccatgtcctttctccattgtttcccattgctcataaagatcgagcgaaagagaacgggcaattcccttacatttctccatcaaagaacgacgggcaatgataaagccaaatcccggtacaccttgaatacacttgttggcactactgatcaagaaatcgatacctaactttgccatatcgatgggtactcctccaaagctactcatagcgtccactatcaatatcttaccgtgacgcttcaccacggcggcaatctcctccaaaggattgagcacaccggtcgtagtctcacaatgtactacagacacatgcgtcacctcctgatgttcattcaaataagtatctattttattggcattcaccggttctatttcttcaaacctcatcacgtgacaatcaatatggtaatattcggaaataatgcccatacgcttaccgtaagcaccattggctgctactaacagtttatcctcaggacgaactacagagccaagtgtggcttccacacaaaaacttccgctaccttgcatcagcacagccgtatactcgtcaggagcgctagtagcaatctccaccaattctttacggataacttctacaataccaagattgtaatcttcatcccaagtacaccagtcgctcatcatcgcttgtttcacagtgtcggttgtagtaagaggaccgggagtcaaaagtaaataaggtctcatattatcttaaatttattcatttatcggtttgttatttttattattctttcttttataatgccatacgttcattgatatcctctatcaacatcggcagttcggcaatcgtgtccaccacataatcagcaccagcggcatacatacggtcccgcaccttagccatgcggcatttcagttcccccatcggaagagtgcgggtttcttcttcagtcagtcccaattcgttacttcccattattacacctacactccacacaccggcattcacaccttcacgtatgtctgcaatcgtatcaccatatttcagcacagagaaacgggaggcaacgtccagatcacacatattgcgataaatcatataaggcttcggacgaccaccgggcagattgtccgaagtgacacaattatcaatcctgtaacctttcttttctgcggcaggaattaccacatccatcatcttttgagtatatccggtagtagaaccgattttgattccctgagcacgtagtttggcaatcacctccaccacaccgggaataggctctgtataatcttccaaagtatcgaacaataccttttggaaacgtttatagcattcctgcacatcctcttcggtataatcacgtccgtacttctcacgaaagtcctttcctacccgttcaatggaaaacaaagcacgtatctcttcaatcttagtcacccccatgtgggcacgtgtctcggcagccgtaacagtcagtcccatctgcttgaaactatccacgaaagccgctaccggtgcaaaacatccataatcgacggaagtacccgcccaatccataatcacgcattctatttttttcatattgcagttattgatattactcattctagtgtaattgatgtcaatcatatcgttggatttgaagttaataattcgttgtaactattcatgtcatttacctttcttgcgctacccgtatcagggattttcttagccttcatcacatagacggccgcagcggcaaaagcgatgcaacaggttatgcctacaaatacactcatctcattatagaacaccgcccagtctatatgcgaggctttcaactccttaaacagcagtaatgctaacgtacccacataaccgacaaaatctatagtgataatgaagaatcccacattccccttcactttgaaacaagcaatgaacctttcaaagaaaatggtttggaaactaaggtaagcaatgtctatacagagcgtctgcaaaaagagccacaaagtagtagacaactgtacctctccgctacctagcagagccaagccccccatacttgcggtagaaagtcccaacaatgtataaagtactttcaaatgattgccggagaaagcgagtacggcaaacgtggacaataataccaatgtagcgatggtatcaagttgggcaaacagccaggaagaaattgtatccacatcaatgatacagacaatgaaatcctctttaatatcacgttgtacagtaagcaacagattggcgacaaaaagcaaaagcagtaagggcatatattgtttgaagagcgcccaacgttgctgtccgttgagagtgacacgaacggaacgggctgcaatatccgctgccgtaggacgaggaaacttggtcatcatccatcccataaagcaaagcaacggaaaggccaatccccctacgagtgcaggcatccaaaactcactgacatgaagttgattcagcgcataaagtccgagactctttgccactcccgaactcagcgccatactcactcccataatacttgccagaatatcggtagtacgacgaccttcgagaaagctgaatatcactccccacatgcaacccaaagaaagcccgttaaagaaaagtgccactatattatagggcaatggtaacagaccgaacgccaacagggaggcttcagacaaggcagcagatccgataatgaacttcaaccgattctgcggctgcaattcggaaatatatttaatgccaaacaacttggcgcatacataaccgatgagttggataatgctcaccacaatcttataatccataccagccaccgtcaacccttcaaactcagcagcagtaaagggcttacgcaaagcgtaaaccaacgagtaagacaatagtgccgtaccacccatccagagaatgaaaagccagtcaggagtatgtctttccgttttaccgtattgtatgtccggtctttgtcctatcagtttattcagtgataaattcatattcttcttcgttttgacatcgcaaaagtagagccacccaacgaggtaaaaaatgaataaaacaggaataataagtacgaaataattcagaaatattcatgtaattgtaatgtaacacactggaaagaggctacaaaacaacctttttacaataaaagtcaccgtatagagagttgaattcaagagagaaagctatttttgtaacaagctaatgaactcctcaataaaaaatatgaatgagctgaaagaaatctacgaccgcattactttcctacgtggaaagggtatcaagatgaaagaaatggccgaacaagcacaactcaccccgagcgtattgtccgccatgtattccacagtattcccggcatacttcaaaaatgtggaaaaagggatggatgacaacgaagcattggacaacgctttaatgtgggtcaataatctttcgaaaaagaaactcttcggactacttccgcaaatgaaacaggcactcttcgctatggaggtggtagtaaaagaaaagccggacagtatgaatccttttctttccgaactggaacacaacgccaggcaaagtgtgaatcatatcacaaatttcagtggcatatataccagctacagtctctcctccaacaccaatgacctgaaaatcgagccttacttcatcgctccggccgagaatggcaactacatcgaagtgggacacacgaatgctcatggcaccactcattggggattcggactgatgaatggcatgagtcatctctatcttgttttcaatgagagtcatgccccgcaactttccatgttcaatatttgcctcaaactgccgatgtttgaccgtccgcctttcctacgcggcatttaccaatgctttgattataattacaaccctatcgcccgccgtatattattggttaaacagaccgacaatgccgaacgttccaagtttcttcaacaaaaagggaacctgaaatcctacgatgagctgagtgaaatcgagcgtctctattacagctatacctgtcgtgaaggagacgttatacgtatgtgtaacatccccactccccaaatgactaccgacgacctgacattggaaaagaaaatattggaactgagtaagctataacattggtaatcagcagttgttaaaacaaagggcacgaataatgtaacaattagaataatatttgaaacagattaaaaaacaacggttacacatagatatagaacagaaacaaatcttataatcagacagtttctaattatacttcaaactttaccaatatacccacaatcagaattccaccaagatacggaataccttccccgggttagccgcccattcttgcatagcttctaaagctccttcaggtttggcaactttcgagatcaactcttctaccggacaatttccttctttcatataattgatgactgcacggaagtctgtcggcaaggcatttctagaaccacgaatatccagttctttctgaacaaagagtttcgtttggaaagcaacttcacttttagcgtagccgatacaaatcacccgtcctgtgaaaccgacttcatccactgccattacataagtcacgggactaccaacagcttcaatcacgacatcagcacccagtccttccgtaatctcctgcatccgttcgtgcacattttctgtcttggagttaatcacataagaggcacctacctttttcgccagttccagcttttcatcgtccaagtcgacagcgattaccgttgcacctctcaaagcagcacgcacaatggcaccgatgccaatcataccacagccaatcaccatcacaaactcgttgtcgatcacctgtgcacgagatacggcatgaaatccgacactcatcggctcaatcaacgcacagtcacgagaagaaatattgccagctggaataatctttgtccaaggcaatacagcatattcgcacatcactccattgcgttgcacacctaatgtttcattatgttcgcaggcattaacacgaccattgcgacaagaagcacattttccacagttggtatatggattcaaggtcacattcatgcctttctcaaaacctgccggaacatccggaccgatttcctcaatgactgctcctacttcgtgtcccggtatcacaggtaatttcaccatcggatttttgcccaggaatgtgttcaagtcggaaccacaaaaaccaacatacttgattcttactaatacttcaccggctccaacgaccggtttttccagttcaaccaccttcatttcggagggattgataatttgaactgctttcatttgatatgtatttgataataaatttattaatcgattactttataacctttccatccgtaataggcacagaaaacaaaacaaatcatcggcacgccatacgcgatataatagatgttctcgttaatatgcatgaaataagccgtcaactgcgggagacaggcattaccaacgatcgccattacaagaaaggccgagccgctcttcgtctgatttccaagtccttttaaagccaatgagaattgagtaggatacatgatagacataaagaacgagatagccagcatcgcatatagtccgatcattcctccccatatcatcaccactccacacaggaggatattcatcagggcatagatcaacagcatatcttgaggacggaatttcaccatcaagcctgtaccaatccaacgtcccaaaagaaaagccaacatatagagtccgaagaaagtggtagcggtatcttccggcaatcccgcataggtgcagcaatagaccaggaaaaggctgttgatggctgtctgccctccattatagaagaattgcgcaatcactccccaacgaagatgcgagtgttttaatactccgaagtctatcagtttttctttcttgccatcagccgtcactgcatctgaagaagcagtttcatctccaatcttcggcaactttgaaaagacaaatacaacggctatggcaatgagtagtaacgccaatatcaggtaaggaagtttcatggcatccgtttccagttggatataggcttgccaaccacccggataatctacaggaagcgtttcccgtgtgtaatgattcccactaaggataagtttgcttaggaacatggcggcaatgaaagctccgagcccgttgaaggactgcgccagatttaatcggcggggagccgtttcagaggcacccagcactgttacatacggattggcagccgtctccagaaagcacattccggtggcaatgataaaaaagatgcaaaggtaagcccaatattctttcagtatggcagcagggaaaaagagcagccccccgatagcggccaggataagtccgaatataattcctgctttatagctgtatcgtttcatgaacatagctatcggaataggaaaaatgaagtaggcaagccaataggctgtctctgtaaaagaagcctcaaaggtattcagctcgcaggtcttcatcaattgccggatcattgtaggaagcagattgctgcttatcgcccacaagaagaaaaggcagaaaaccaaagctaaaggtattgtatatgtattctttttcatggcatgaatatagttttacgataaggttgttttctcaatcattcggacatattcttgatgtaaggaagcacggggagatctgtaaatccatagaaattccgggcattctctcctaaaaagagtcttttatcctcttccgtcaattcggaagacttcaccacaaaatcataagacattttgtaggtgatcgctgtgatggtacgcggataatccgagccccacatcagtttttccatgcccaccagctctgccgcttcacggatggcttttatcgctcctttaaaaggatagaactcgtcattgaaaagccaggtaattccaccggattcaatcatcacattggaatgacgcgccagacggatttgctctttccagtcggggcgagtcaccattccgaagtgcccgatagctatccgcaaatccggacattcctgaacaatctcctccatttcaggaacctgtgtggctccgtcggctagatcaatagaaagcagaatgtcctcatcttccatataatggaacatttccatcatctcttcgctgttcagcatcacccttccttctttcagcaaaagacgatgggcaggaatcttgatggctttaaaaccttttgcgatcagctcttttgcctgttccagaaatcccggtttacgaaattcgcacataccgcaaataaagaaacgaccgggataacgggaaacgacttccgacaaataatcattctgaataccatcaataaattcttgagtgataacagcggcagatacttgtgcatagtccatattcgaaagaaagacttccgcactattcaccccgtctatcataaaaggaggaaccatctggcgaatctctcccataaattccgaacgtccgttttccaacgtacgaataggcagtccgtctacgaccgtatcttgccgtagccataaatgagcatgtgcatcaatgattgtgtagtccataccaacaagttcgttttatgagtttgcccagcttacacgtttctgttctccgataatctcctgaacttcccgaacgagctcccaatcaatcggttcttcaatgaaagcgatattctttttcacattctccgggttggttgtactgaacagggtggtggcaatacggggattgctgacagagaactgcatagccagtttttcaatcggacagttcttggctttgcagtgttccactgctttacggcaggcttctaccaacgattggggagccggatgccaggcaggaacaccacgttcgctcaacagtcccatcgaaagcggagaagcattaatcacaccgattcctttggattcaaaatagtccagaaaatccactaacttatcatcgcacagacaataatggcaaaaattgagaatggactcgactgtgccgattggcgagtggtcgattacccatttcagattctccaactgtaaatctgtgattccgacatggcctaccacccctttctcacgcagtgctactaaggcaggcaatgtttcattaacaatctgattcaaatcggcaaattcaatatcgtgtacatttatcaaatcgataaactctatatgcaagcgttccatactctcgtaaacactctcagttacccgtttggctgagtaatcccatgtgttcactccatcttttccataacgccctactttggtagaaagataataacggtcgcgcggaagctctttcaacgcttttcctagcacggtctccgctttataatgtccgtaataaggagagacatctataaaattcattcccgattcaacggcggtaaataccgcttgaatgccttcttgttcttttaaatcatggaaaactcctcctaaggaagaggctccgaaactaagggatgacactttcatccctgtctttccgatttcatggtattgcatacttcttggttttaaatagttttgtatgcgacaaaaataggtcaggaatgatttccgtatagcggtaaagccactaaaaagcaacgtaatggtttacgtaaaaaatattgtttcagatatgcgtatttatccgggaatgtactttctttgtaaaagaatcaaagtaaaagaccttcaaatgaaataccggaaacatacttcactcaaagatctcgctcaagcattgggagtatcgattcccactgtatccagagccctgaaagacagcccggaaatcagccgtgagctctgcgccaaggctaaggaactggcaaaagaaatgaattaccgtcccaatccttttgccatgagtttacggaaaaatgccccgcgtatcatcggagtgattgttccggatatcgtaactcatttcttcgcctctatcttgaacggtatagaaaatatggctatcgccaacggatattttgtgattatcactacatcgcatgagtcatacgagcatgagaaacggaacgttgagaacctggtaaatatgcgtgtggaaggtatcatcgcctgcttatcacaggagactacggactattcccattttgcaacactaaaagatatcaatatgccgcttattctatttgatcgtgtttgtctgacggaacagttttcttcggttgttgcggacggtgtgcaatccgctcaaatggcaacacaacattttctggataatggaagcaaacgggtagcgtttataggtggagcgaatcatctggacatcgtaaagaaaagaaagcatggttatctggaagctctacgtgacaaccggattcccatcgagaaagagttggtcgtctgccggaagattgattacgaggagggtaaaattgccacagagaccttgctgtcgcttcctcagcctcctgatgccatacttgccatgaatgataccttagcttttgccgctatggaagttatcaaaaaacatggactgcgtataccggacgacattgccatcatcggatatacggacgaacaacacgccaattacgtagagcctaaattatcggctgtgtctcatcaaacttataaaatgggagaaactgcctgccggttgttgattgagcagattaaaggggataaggctgtcaagcaagtggtcattccgactcatttacaggtgagagaaagtagtataaaatcaaataaggtgttgtatcccttatgaccaacaccttatttattttccttattcttgagaagattatcgttctacaatcttatccaattttacatcatagactagtgccgaataagcctgtaaagaaccatcgctacctgtaccggaaccatatccactctggtaaggaatatacaaagtccaaaattctccttctgccatttcagttagcgtatacccccagcctgagatcacttcattcaataagaattccgaaggcacatcaaactcgtcaggctctgttcctgcaaaattctgttgaacaacgtcaccattaaaataagacatacgataatatgcacttaccttagaagtatatacaggtttatcgtcatccttcacgccgtctctggaaattcttttcttggcatatattgtctgcccattcgtcaaatccgtaaaaggataaagtctctctttttcatccgtgactgttatgctgccattttgttgtccagcatacacattggctattgaatcaataaaagcctcactacgcgcacgccaattgtcataacgtccggtctcttccgtttcgctacaagcggtaaacgtcaaagccaacaatactaaggagaataaatagatctttttactcattcgtcaaaggtttattgtaaagttttcaatagagaagtgatgcttactctgtctgcgatgatattattcagttcagagatagcgacacgctcctgctgcatggtatcacggttacgcaatgtcacacagttatcttctaatgtctgatgatcgaccgtcacacagtacggagtaccaatagcatcctgacggcgataacgcttaccgatgctatctttttcatcatactgacaatggaaatggaatttcaagttatcaataatctcacgagctttttcaggcagaccatctttctttaccaacggcataaccgccagtttcaccggagccagagcagcaggcaatttcagaaccacacggctttcaccattttccaattgctcttcgcaataagatgcgctcatgatgctaaggaacatacggtcaacaccgatagaagtttcgattacatacggagtataagactcgttcagttccggatcgaaatatttgatgctcttgccggagaacttctcatgttgagacaagtcgaagttagtacgagagtggataccttccacttctttgaatccgaacggcatcaggaattcgatatcagtagcggcatttgcgtagtgagctagtttatcgtgatcgtgataacgatagcttgcatcaccgaagccaagagctttatgccatttcaaacggatttctttccatttcttgaaccagtcaagctctgttcccggttttacgaagaactgcatttccatctgttcgaactcacgcatacggaagatgaactgacgggcaacgatttcgttacggaaagccttaccaatctgtgcaataccgaaaggaactttcatacgacctgttttctgtacattcaggtagtttacgaaaataccctgtgcagtttccggacgcagataaattttcatagagccatcggccgtagaacccatttcggtagagaacatcagattgaactgacgaacttctgtccagttcttagtaccggagatcgggcatacgatttcttcatcaatgataatctggcggagttcttccaaattgttatcattcaaagcttttgaaaagcgagtatgaagtgcatctcgcttagcctgatgttccagtacacgtccgttagtagaacggaactgagcctcatcaaacgcttcaccgaacttcttggcagctttcgctacttctttattgattttatcgtcatactttgccaactgatcttcaatcagtacatcggcacgataacgtttcttagagtctttattgtcaatcaaagggtcattgaatgcgtctacgtgtccggaagccttccagatagtagggtgcataaagatggcagagtcgataccgacaatgttttcgtgcaacagcaccatgctgtcccaccaatatttcttaatgttgttcttcaattcaacgcccatctgaccgtagtcatacacagcgcctagtccgtcgtagatatcgctcgaaggaaatacgaaaccgtactctttacaatgcgatacaagcttcttaaaaacgtcttcttgtgccattttcttttctatatctattaatttgaatttgcttttttcgtaaaaagtgccacaaagatagggatttatcttataaataagacagagagggtattaatttatcttattcctgaacttcttcctcgatttccggtgccaccatacggtcatattcttcccgctcctgctcccggtccgctttcttcatttctttggtcagcatctcttcaggcatatacagattaaaaggaatacgcatgcatttcatttttttcacttcccggctaaattcaggacaagccacgaaatagacacgtgaaacggacacctttcccggagttacctgttcgggacgttcaaatcccggactggtcagtgatgtatggaatgtgccaagtccttcgatagtaaccggctgtccgatagacaacagactacggatagcatcaaccatttccgtcaatataccatctatctgcccgcgatgaaatccactccgtttttccatgtactcggcaaattctctattccgaatcggatctatcagttttttgggtacaccataccataattcttttctttctcccgatgttaaatcggctttctttctcactacataaggcactgccatcgtttatactcctttcttttttcgtttatactcgcgttctatttgacacccgggtgtcaacaccattgagacccgggtgtcaaacataccaacacccgggtgtcagtgctcatgagacccgggtgtcagataagtgttggctgcaacaaaattaagtctttattataggaaatcaaagttttcttatatatttgtaccatccctacaataactaaagaaaaagaataagtcaatttatacccttttaacattcggaatatccccctttcttttccgaaatctcttttatttttgtatttttgcctgcgtatgcgttaaaatattatagtatatacgaatttatgagtgacgaaatcaacgagataccggaaggacattcagattacaaaccggcggacgcacgggacgaaagcgtaaaacatcagctcacaggcatgtaccagaattggtttctggactatgcttcgtacgttattttggaacgtgccgtgcctcatatcaacgatggtttgaagccggtacaacgccgtatcctacattccatgaaacgtctggacgacggacgatataacaaagtggctaacattgtgggacacaccatgcagttccaccctcacggtgatgcttctatcggagatgccctggtacagttgggacagaaagacctgttgattgattgtcagggtaactggggtaatatccttaccggagacggcgccgctgctccccgttatatagaagcacgcttgtccaagtttgcgctggacgttgtcttcaatcctaaaacaactgaatggaaactttcttacgacggacgaaacaaagaaccggtcactcttcccgtgaaattcccgttattgctggcacaaggtgtggaaggtatcgccgtgggactttcttccaaaattctaccgcataacttcaacgaactttgcgatgcctccatcagttatctgcgtggagaggaattccaattgtatcctgatttccagacaggaggttctatcgacgtagccaaatacaacgacggagaacgcggcggagcggtgaaagtacgtgccaagatcactaagattgataataaaacacttgctatcacagaaattccatacggaaagacgacttcgacagtgatcgactctatcttgaaagctgttgataaaggaaagatcaaaatccgtaaggtagacgacaacacggctgccaacgtagagatactggtacatcttgcgcccggcacttcttcggacaggactatcgatgcactgtatgcattcactgattgcgaagtaagcatttcccccaactgttgtgtcattgatgacagcaagccacatttcctaaccatcagtaaagtactgaaaaagtcggcagacaacacgttggatttactgaagcaggaactggaaatcaagaaaggcgaaatactggaagcattgcatttcgcctcactcgaaaaaatattcatcgaagagcgtatctataaagacaaagagttcgagcagtccaaagacatggatgcagcctgcgaacatatcgacaagcgtctgacaccttactatccgcagtttatccgtgaagtgaccaaagaggatatcctcaagctgatggaaatcaaaatgggacgtatcctgaaattcaattcagacaaggcggatgaactgatcgccaagatgaaagaggaaattgccgagattgataaccatctggctcacatcgtagattataccgtcaactggtatcaaatgctgaagaacaaatacggcaagaatttcccgcgccgcacggaactccggaacttcgacaccatcgaagctgccaaagtagtggaagcgaacgaaaaactttatatcaaccgtgaagaaggattcatcggaacaagtttgaagaaagatgaattcgtggcatgctgttcggatattgacgacgttatcatcttcttccgcgacggtaaatatattgttactcccgtcgccgataagaagtttgtcggtaaaaacgtgctctatgtcaatgtattcaagaagaacgacaagcgcacgatttacaacgtggcctaccgtgacggaaaagaagggacaacgtatgtcaaacgcttcgctgtaacctccgttgtccgcgaccgtgaatacgatgtcactcaaggaactccggactcacgtatcacttatttcagtgccaatccgaacggggaggccgaaatcatcaaggtgacactgaaaccgaacccgcgtgtccgccgtattatctttgaacaggactttagcgaagtaggtatcaaaggaagacaggcacgaggcattatcctcacccggcttccggtgcataagatcgccttgaaacagagaggcggttctactctcggaggacgtaaagtctggtttgatcgagatatactccgcctcaactacgacggaaggggagaatatctcggagaattccaaagcgaggataccatattggttgtcttgaacaacggtgacttctataccagcaacttcgacctgagcaaccattacgaagataatgtaagtattgtcgagaagttcgatcccaacaaggtatggaccgccgcactatatgatgcagaccaacagaattatccatatttgaaacgtttctgctttgaaggttccaaccgcaagcagaactatctgggagagaataagaacaatcgccttattctgctgacggacgagtactatccgcgcctggaagttatattcggaggacacgatagcttccgtgatccgctggagattgaagccgaagaatttatcgcagtcaaaggtttcaaagcgaaaggcaaacgtatcaccacctacgcagtggaaactattaacgagctggaacctacccgcttccccgagcctgtacaagaaactcaggaggagccggaagaagaaccggaaaacttggatccggatagcgacaaaagcgagagcgatattattgatgagatcacggggcagatgaagttattctgatgaagaaaaaaatactatatctagggctggcaggatgcatcctgttcgccctttgcacaagattacaagcgcaggcagacagtctgctgattcatcgttatgtaacacgtgctacgatgtacggtgtcggattcacgaacgtgtttgatacttatctttcgcctcaggaatacaaaggaatcgatttccgtgtttcccgcgaaacaatccgtatgaccaagctttttgacgggaatgtgtctgtacagaatttctttcaggcggatataggctatacgcacaaccgagccgacaacaacaatacattttccggattggttaactggaactacgggctccattatcagttccgtctgacagagaacttcaaactgttggcaggaggattgctagacgccaacggaggttttgtctacaatcttcggaacacaaacaacccggcttcggcacgagcatatatcaatctggatgcatcgggaatggctatctggcatctgaaaatcaaacgttatccggtagtattgcgctatcaagtgaatttgccggtaatgggagtcatgttttccccccattacggacaatcttattatgagattttctcactgggaaatgccggaggagtcatcaaattcacttctttacataaccagccttcgctacggcaaatgctttccgtcgactttcctataggatatactaaaatgcgtttcagctatctggcggatttgcagcagtccaatgtaaacaatatcaagacgcacacctactcacatgtgtttatggtaggctttgtgaaagaattataccgcatccgaaacaaaaaaggagccagtgttctaccgtcatcggtaagagcttattaagttgagagttgaaaattgagagttgagagttaatacaagattaagaatgagaaataatattagacaaatgctttggctgctctgttgtcttccggtagtgaccggatgtatcagggaagaggaatatgccaatgatcctgtaggaaacttcgagcaactatggaagattattgatgaacggtattgttttctggaagagaaaggcattgattgggacgctgttcacgacaagtatggaaaactggtgaaacccggaatttcggatgacgacctgtttgatatactaagtcaaatgctatatgagttgaaagacgggcacgtcaacctctcctcctccagtcgtatctcatattacgatgcctggtatcaaggatatccttggaactatagagaggatatcttatacaattactatttgggaagtgccagttccggttatcgtacatctgctggtttgaaatataaaatattcgataataatataggttatatccgctacgaaagttttagtgccggagttggagacggtaatttagaccatgtactcgattatttgaagctctgcaacggattaatcattgatgtacgcgacaacggaggaggaaacctgactaattccacccgtattgccgcccgtttcaccaacgaaaagacattgaccggatatatccagcacaaaaccggtccgggacataatgacttttctgaaatggagccgatctacctggaaccctctaatagcatccgttggcagaaaaaagtggttttacttaccaatcgtcgttgctacagtgccacaaacgattttgtgaatgccatgcacagtctaaacaacgataacgaagagcaaagaatatttcaggtaggtgaccaaaccggaggaggttccgggctacctttctcttcagaattacccaatggttggagtgttcgcttctcagccagtcctcactttaacaagtataaaaagcctctggaaaatggaatagagccagatgtatacgtaaatatggataagattctggaagagggaatagagcatggagatgcagaatcacaaaagaaggatgcactgattgaaagggcatttgaaatattaagtgaataactttattaccgaattatttgttaaatcagaaaatcttcctatctttgcaccgctaaacaaaaagctacacatgcggatgtggcgtaattggtagccgcgccagacttaggatctggtgccgtgaggcgtgtaggttcgagtcctatcatccgcacattaaaagacagcagccttcaagaacttttcttgagg

SEQ ID NO: 11746 - DNA, 4588 bp, Unknown
  gut microbiota DNA sequence
tcacagaagaaagagacattaactggtgcggtgacagtcgtttccgataaaatgctggaaaataaaggtgctatgtcgagtcctgtacaggcattgcaagggcaagtaccgggagttattattacccgttcctccggtgctccgggtgatgaaagctggggaatgaaactgcgtggtgctgtatcggccaattccacagacccgttaatcattattgatggagtagaatacgaaagtgtgaatgaacttcgtttgcttaactctgccgatattgaatccatcaactttttaaaagatgcttcggcggctatctatggatcgaaggcagcaggtggtgttattttggtgactaccaaacaggctaaagaaggaaaggctaaaatagaatatagtggttcttatacgcataaatttgtcggtttacagcctaaaatgatgagtattgaccaatggagtgaagctattattactactcgtcacaacgatggtttaggtgatgatgaccaatggattaaatatgcacagcttgctcaagcttataaaggtggatatattgatttatctaaaaatccgaatccgatacccgctttcggtgatgtggacgattatgtctttatggatactaactggcaggatgtattgtttggcaatgcaggttctacgcagcacaatttgagcgtatccggtggaaacgaaaagtcgttgtatcgtctttctgtaggttatatgtatgatgatagtaccttgaaatggggaaataataataataaacgtttcaatgttcgtttgacgaatacggtaaagttgacggataggtttactatcgaatccgtgatggcttataaccgccaggatcaggtgtctccaacgatgattgacagggttctgacttccagttatccccagccgggattgccttcctctactatggatggcaaaccttatcattggggtggaaattatactcccaactggtatgcagaactgggaggtgataataaattgaaagtatccggtattaatattagtgagaatttgaagtatcaatttacttcttacttggatgcagtagtcaatttaggttacaatacatctactgcgacacgtgatggagtaaagaacagcattacttggtacacctatgacggaacgttgagtacggcaaagacaaatgctatcaataatcctaatcaggcctctacggaatattcgaaatcttttgcccgtactgattactactctgtttcaggctatttgaattatcaccagacattgggagaaaaacataatgttacagctatgcttggtgcacaatataatttgaaagagtatgattatacagtggtgacagcgaaggatgtgcagagttcattggaaatattgaatggatcgggtgaaataacattgaaaaactcggcaaaaacctccggtccaagtaaatggcatgaagctatgatgtcatatttcggacgtttcaattacaattatatgtctaagtatctgttggaaatgaatctccgttatgatggttcttctaagttccgtcctgagaaccgatgggatttcttttatggattctcgggtggatggcgtctttccgaagaggaatttatgaaaaacgtgaaatttgtcaatgaactaaaattgcgtctttcttatggagtcgttggtaatcagtcaggtatttcacgttatgatggtatgcagttatacaactttaattcagtcaatggggcttacattggtgatggaagaatctcctatattaagactagcggtgaaattgctactatgggacgtagttgggaacgtattcataattataacttaggattggactttcatttgtttgacagccgcttgcagggtacggtagaattgtttatgaagaagaataacaatatgctgatagcagttgcttatccgggaattctgggagataaagctcctgcttccaatagtggaaaatttgaagcaaaaggatatgaaggaactgtgacatggtcggataaaattggaaaagtgaactatcatgtgggaggtacatttacctatgctgataataaactggtagactatggtggagtgacggtatttaaatccggctttgtagacaaacaacagggatactcgttgaactcggtattcggtctgaaatattgtggaaagattcagacagaagaacaattgcgcaagtacatttataaatattataatagtaacggtataggtatgccgaaggatctccgtttgggtgataatatgtatgaagatgtaaacggtgatggtaagttggatgaaaaggattatgtttatttgggttcggatgatccgaaaatttcctattcgttcaatgtcggaatagaatggaataattttgatttgtctgctgtattccaaggtacggccaaacgaaccattttccgtgacgaaagtaatgataattatcgtataccgatgcgagccgctcacttgaattcaacgacacaatctgtgggaaatgtgtggagtcctgataatagagacggacgctatccgacatatactaatattagtacgattaataattataattatcagtgttcttcttggtcggtagaaaatggtaattatctgcgtctgaagagtttgacattaggctataacttcccagcttcattgcttagcaagacgaaagcgatcagcagacttcgtatatacgtatctggagccgatttgtgggaagtgagtaagattaacgatggatgggaccccgaagcttcacgcaaggtatccggtaatggacgtttcccgttcaatcgtacttgtactgtcggattagatgtaaccttttaatacttagaatatgaaaatagtaaatacaataaaaactatattgctgctttcggtagtcgtgattttaccgtcttgccttgatcttgatccgcaagatcaaatgtcggatgcaaatttgtggcagactccaaatgattataaactgtatgctaatcagttttatgaatggactcgtgatttttcgagtgccgtatatgatggtcctcatagtgatacccgttcggacttgatgacttcaagtagctacaatgaatatagtaagggaattaataatattccggtgtcggatggaaattatacgggagcttatacaaagattcgttatgctaatattttgttacaaaaagcagaaagttatcctaacccgacagacatagcacgctatgttgctgaagctaaattctttcgtgcatacgaatattttgatttacttcagttatttggagatgtaattgtggtgactgaacctattgatatcaccgatccgaaaatgaatgcccctcgtgatgaccgttcgaaagtggtagacctgatcattgaagatttgaagcaagccattcctgatttaccgaaagagaatgctattgcaacagctgataagggacgtgtttcacagggagctgcccaggcttttctttctcgtgtggcgttgtatgaaggtacatggcagaaatttaggacaggggatgtaactcgaatcaatgatttgcttgatattgctgctgagtctgcttgggaagtaattgatagtaagcagtatgaaatatttaaaccggcggaattaggtacagatgcttataaatatctatttattttagaagatgttcagtccaatccggctaatattaagaaagataaaaataaggaatatattttctcacgtcgtcatgatgaagtgattgctccaatcggtaagaatattactaagaattgttttgccaatgtacaatgggtaactcgtaaattggcggaaatgtatttgggagcggatggacttccaattgacaatgcgcagtcgactgccggtgttgactattctactccagacaacgagtatgcaaaacgtgataaccgcatgacgaatactttaatggcaccgggacggaaatattggaataacaatgcttctcataccacttggacagatgcggataaagctgcttttgataataaagatttctatccgactagtggtagtggatataacaatcaaaaatgggcaacggaacgtaatgtgaaagatgaatatgaaggatatgactttccgattattcgttatgctgaagtgttactgaactatgccgaagcggtatttgagagaaatgcggatgcagaaggtaacatcatggatgcttctaaagtggatgcagcattggtatatttgaatgaggttcgtcaacgtgtgaatccgaatatgccgggactcactacttcttttgctactactcataatctgaaaatgcgtgaagagattcgccgggagcgtacagtggaacttttcaatgagggcttccgtattgatgatttgaaacgttggaaaattgctgaaacggaaatgccggagaatatgttaggcgtaaaatggaacacgtccggtgattgggcaacgtgggccggaaaatggtctccttcttattcgttggaagatggctgtttgcttatcgaaaccaatcgtgtgtggagtaataaaaattatctttatccactgccgtcagaccaacgtcagttgaatcctaatatcggtcagaatccg

SEQ ID NO: 11747 - DNA, 3442 bp, Unknown
  gut microbiota DNA sequence
ttattgagtctaggcttagtggctgttttctcattgtcggcatgtgatgacggtaaggtatttggtgatgggctggatgaaaagacactaatctccgagattgaattgaccaatgtggagaatggaaaattaacattggctgcaactgtagattatacagactctttgattacttataaatattctccggaacaaccgagtaaccctaaggttaaatggacatcatcgaatgaaaaagtagctactgtgtcacaggatggacttgtgcatgctgtaagtgcaggtaaggcaaatattatgattactccggaagtaggctttggtgcaacagctctttttgaattgactgttgtgcctgaatttaagccgattacagattttgaatttacggaagccgataaggctgagctatttgcttcagaagaaaggacattgaaaccaaccattcttccggcagaccgtacttattctacgataacatggaaaagtagtgatacgtctattgcgactgtaacgaaggatggtgtagtgagaggcgttgatggtggagaagagggaagaactgttaccattactgctgtttctttggatagaggagggtatgaggaatcttttgaattaaagataatgccgataatctatattgatgaaatcacattcgggacacaagaagatttgttgccgggtgaaagtgtgaaactgaatttcactacctatccggaaaatgcaaccgtagcttctttgacgtggactagtagtgatccgaatgttgtagaagtaagtgaccagggagttgtaactgccaagaaatatggtgaagttactattatggctgctacaactatgggacaggagttttccacaactgtaaaagttcctaagggcttgataaaggaagactttgatggagagactacttcttggtttacaaacttcaagggagcatcaggagaaatcaaagatggtaaatttgtagtgacaatgggatcacaaaataatgaaaaatggcgtggagatatcgctttgagtctagatggcaagaagactgagaatacatttgtagatccggataactatccgtatgttgcgattaaaattagtggcataggttttgaaggtggcactggtaatcttacttttgatacgtctttgggaacatataagaagaatggtgctaatggacatgaaattatgtacggtacggatcaaatacctgtttattattatgatcttacaatagaaaatacgtttgtaaataagtcaggagctactacattagatggagtaacagaattcaaaacgttccagtttaaggttgctgatgtcttgaagtctaaatatccggctggtaaatatgaggtatattggattagaacatttaaaactaaagaggctttgacagaatatgtaaatgctaataactaattgaatcatgggaacaaaaatatatatattatcaacgatgcttgcactcaatttgagtgcatgcaccgatatccaagatggcactactgatattgattcatggccagctataaatgaatatacattgaatcatccttgtatgcttcatacggatgctgattttacttatgtgaagtctaaattaactcggactccttggagcgaaggattggataaattgaaaaattcgggatattcttattctaattatactcctgaagcacaagaaatcttagggcgtatggatgacaagaattggtctgctacatttcccgattggtggaataattatacttatttctatgaagatgcagcagcggcttatcaattagcccttcgctggaaactagaaggtgacatagcttgcggacaagctgtagttagaatcttgaatgaatgggctactacttgcaaaggacttgttcgtgtcaagagtcttgccaacgatagaacgtatgatccgaatggagaaattgcggacccgaatgaatatttgatttctattaatgttcatcagatggtaaatgctgcagaaatcatgcgtacagacgaaactcttttcaagaaggatgaattggctgcatttcaaacaatggtaaagaatgttttttatccggctgcttctgattttctggctcatagagaaagttgcaaacagcacagttggttaaattgggatctggcacagatgacttctattttgtctattggcattctttgtgatgatcaggatatgattaatgaggctattctttattttaaatatggagtaggaaatggttgtattgacaatgcagtaccttttcttcatcaagatccggatggtcatggaatgttagggcaaggacaggagtccggtcgtgatcagggtcatgcaacgctttgtgtttctttgatgggggcattctgccaaatggcatataatatcggtgaggatttgtttgcttatgatggaaacaaggtgcttgctatggctgaatatacggctaaatataatttgtggaaagactttgatgatacttcttccacatcagatgagaaatttgtgtatcgtaaaaaagatttcccctatacctattatgagaattgtagctggcagtgccctgaactttcttctcaggaaaagaatgataaatcgagaggtgaaatacgtccttgttgggctttgatttataatcattataaaaccaaaggcttggatgcatattataccaaacagtttatggatggcatgggtgtcgaaggtggtggaggacattacggaagcacaagtggtggatttgaccaattagggtttggtacactaatgtacacaagagaataaaatattattttctaaaaataattatgaggggattaggtatttacctaatccccttcgtatatataagcaaataggtcagtaaatagattgtttgaaaaggaaattagattcagttttctgagagattagttttatctatgaggtagaaagaatctgtttttaggaataacatttgaatttagaaaagaattattagttaggtactatgcgtaaaaagattctgtttttagcaggaatgatggcttgctgttcattggcaggtgcacaagaaatttctaagacctgggtggctgataagggaaatggaacttatcagaacccggttcttcatgcagactattcggatccggatgtatgtgcagccggagatgatttctatatgacagcgtccagttttaattgtattcccggaattcctattcttcattccaatgatttggttaattggtcgttagtaaactatgcgttaccggttcaggagccggaagccttcttcgataaggcacagcatggcaaaggcgtatgggcgccggccattcgttttcataacggagaattttatatttactggggggatccggattatggaatctatatgattaaaaccaaagacccgaaaggaaaatggagcaagccggtattagtgaaagcagg

SEQ ID NO: 11748 - DNA, 6489 bp, Unknown
  gut microbiota DNA sequence
ctcaggtttttacattgacccatgaaaaggtgaagggcgaacctttgttagataaatatatcagaaattgataatatctcctgtaatcagcatttaatattcagctcattcaaaactttacgaatagcttcaaacgtagtaatgcgcgtaggtactagtggcaaccgaagtttattttcaatcattcccattgcattcaacattgatttcacaccggccggattcccatctacaaataatagattaaacaattctgtaaatctatgatggatagccagcgcgttagcaaagtctccttgaagagccaggcgagtcatacggctaaactcacggggaaaagcatttcctattaccgaaataacgccaacagctcctaaagtaataagaggaaaagtgatgccatcatctccggatataacattaaaattctcaggtttatttttaatgatatcatccatctgtgtaatattaccggaggcttcttttatagcaatcacattactgaagttacgtgcgatacgcaaagtcgtttcagcagtcatattcacacctgtacgtcccggaacattatacaacacaataggaagttccgttgcttcggcaatagccttataatgctgataaataccttcttgagaaggcttgttataatatggcacaacagacaatatagcgtcgactcctgtgaaatcatcattcttcaatgtctccacaacagcccgagtgttattaccacctacacctaacagaatagggactcttccgttaacgcggtcaatcaccatttttttaatagttttcttttcttcctcagtaagagtcggcgtttcagccgtagttcccagcacacacaggaaatccgcattattctgtaataaatagtctaccatacgcattagcgcgtcatagtcaacactctcatcctctttgaaaggagtaatcagtgctacccccattcctttcaatttagtctgtatcatgagttttaattataatctctaatttatttagccacaaaagtacgaatatttttcatatcttacgatataagtttcagaaattcgtcttcgcttaatatggttattcctaatttttgcgctttttccaactttgcaggtcccatattatctccagcaagaataaaacttgtttttgcggaaatacttcccacatttttccctccgtttttctcaataagttctttatattcgtcacgcgaatggtggataaacacaccgctgataacaatagactgtcccgctaacttatcagtatacccactcaaatcttcttcagtacgataaaactgcagcccagcctctttcaacctgttcaccaactcgcaattagcctcatttgcaaaatacgtaagaatactctgggctattttctcaccgatttcatcgatacttactaatctttcaagatccgcccgtttcaactcatctatattttcaaacgacttcgcaatcttttttgcaactgtttcacccacaaagcggattcccagagcaaaaataacacgttcgaaaggaactgttttgctctgggcaattcctgttacaatattctcagctgatttttcccccatacgctccaatcctttaatgtcgtctattgtgagtttatacaaatcagcggtattatgaattaaacctaagcgataaaacatatcaaccgtctccggacctaaaccatcgatatccatagctttccgactaataaaatgctctatcttacctttaatctgaggagggcaagccgtttcattaggacagtaatgagcagcttccccttcatacctgactaatttactgccacattcaggacaagtagtgatgaacctgaccttctcaccaaccataaaactacgtgcatctacatccacacccgtgattttaggaataatctcaccacctttttccacataaaccatatctccaatgtgcaaatcaagtccttcgattatatcagcattatgtaaggatgcacgtttcacgacagttcccgagagctgtaccggatccaaattagccacaggagtaacagcccccgttctaccgacttgataagtcactttattcaaacgagtcaaagcccgctccgcctggaacttgtaagcaatagcccatctgggagatttagccgtaaaccccaaattcttttgctgcctcaagctatttacctttaacacaatcccatccgtagcaaccggtaagtttttacgttctacatcccaataatttataaattcaaaaacctcctctaatgtttgacatttacgcattagatcagatattttaaagccccattttgccgcttcctgaagattttcgtaatgtccgtcgcaaggcagattctctcctaaaagataatataaatacgcatccaatttacgggaagcgacaactgaagaattttgcaacttcaatgttccggaagctgcatttcttggattagcaaaaagtggttcctcgcggacctccttttctcgattcaatgcttcaaatacttcccacggcataagaatctccccacgaatttcaaatgaggcaggatagttatcaccgtgaagcacaagcggaatagaacgaatcgttttcacattatccgtcacatcatcacctttctcaccatctccacgagtaaccgcccgaactaattttccatcctcataagtcaatgagattgatgttccatcatatttcatctcacagcaaatctcaaaatcttcattaagagccttacggacacgttcatagaaatcggtgacttcctcctccgaatatgtgttcgccaatgataacataggatatttatgtgctacctgcgtaaagttcttgttcaaatcactacccacacgcatagtaggcgaattctcatctttatattccgggtgagcctcctccaaatcctggagttcacgcatcttgtcatcaaactccttatccgatatttcaggagcattcaacacgtaataattatagttatgccgatgaagttcagcacgcaattcctctattcttccttttatatccatatttctttgattgtttaaggcaaaaatacgggtttatctttgaatatttgtacttttgcgaaaaattaaagattatgcgtattgatattataacggttttgcccgaaatgattgagggattcttcaattgttccattatgaaacgggctcagaacaaaggacttgcagaaatccatattcacaatctgcgtgactacactgaagataaataccgccgtgtcgatgattatccttttggcggctttgccggaatggtcatgaaaatagagcctatcgagcgttgcatcaatgctctcaaagcggagcgagagtacgatgaagtaatcttcacaacccccgacggagaacaattcaaccagcctatggccaacaatctgtctttagcacagaatcttattatcctttgtggacatttcaaaggaattgactatcgtatccgcgagcacctgatcactaaagaaatcagtatcggagattacgtcctgacaggtggcgaattagctgcggcagtcatggccgacgctattgtacgcatcattccgggagtcatctccgatgaacaatctgcactttccgattctttccaagataatttgctggcagcacctgtatatactcgtcctgccgactataaaggctggaaagttcccgagattcttttatccggtcatgaagccaagattaaagaatgggaactgcaacaatctttggagcgcaccaagaaacttcgtcccgacttgctggaagaataaaaacgatatgtaaataaaaacgacagcaggaaataagttattcctgctgtcgtttttattatatcctccgcttggagattttagctctcactcttcacactaaacacaaacatcttattcgttcgccatttcatattcaatttcacagatcaaaacttgaaggtagaataacatttttctcatatatttagtgcgaatagttattgtatgtttgcagttatacctcaagcgcacctataatttccttcacagacttatatccatgtctatctaagtaattatttataccatcttccactttgatggtaacagccggatctatgaaatttgccgtaccgatctggatagcagatgcacccgcaagcatgaattcaaccgcatctttccaatccataatcccgcctaatcctatgacaggaatatttaccactttagcaacttgccataccatacgtaatgcgataggttttacggcggctccggacattccacccgttatagtggataaaatgggacgtctacgctccgcatcgattgccattcccaataatgtattgattaatgatacactatctgcaccactttcttccgctgcacgagctatttcagtgatatctgtgacgtttggagagagttttacgataagtgtctttttataagcagaacgtactgctttcactacttctgacgcaccttttgctgacacaccaaaagccataccaccttgctttacattggggcaggaaatatttaactctatagcaggaattttgtcaagttcattaataatttcggctgttttcacataatcttcgatagtagaacccgaaacgtttacaatcatattcgtttctatgtcttttatgcgaggatatatatgttctacaaagtactcaacgcccttattttgcagtcccacagcgtttaacatccccgaaggagtctcagccatacgtggataaggattcccttcacgtttgtgaagagtagtaccctttacaataataccacctattcgcgctatatcaatgaagtcagagaactcttcaccgtatccaaatgtaccggatgctgtcatcaccggattcttcattttcaattcgccaatatttacatttaaatctgccataatagtttctttatattaaaaacaggaccttctttgcatacacacaagtgaccttctgtcgtattttccacacaacataaacatgcaccgataccacaagccatcgtattttccaaagagacttcacattctatctgattacttttggcatattttgccacagccatcatcataggtttgggaccacaagtgtaaatctgctcaaattgtactttgcctaatatagaatgttgagtaacatatcccttttctccgtaactaccatcttcagtagtagtgtacacctcaccatatttagcgaattcttccaactgcaaaagatccttatcactacgggcgcctaaaagaaaggtaggtttatgaccgtttttagccaattgctcacccaaaaacaacataggagctgttccgacacctccacccactagcaggagcttatcagaagcattgtgaggcattgtgtagccatttcctaacggaagtaccgtattaatcacatcgcctgattttacctctgccaaacgccttgtaccatctccgactaactggatcagaaaccatacttcatttcgttgtttatctacaaagttaatagaaataggacgacgcaagaatgtagtaggcgaaccgtccacccggagttcggcaaactgcccaggcaacatttcgggcaacaacgatggagatgtcaattttagcaatacataattagtatgcaatttaatattctccgtaaccgtcagatctaaaataaatttcttcatgtatggatataaaaagtataaattcgtattccgggtgcaaagatacaggaatttgctcaaacgagcgattttacctcttatttttcaggtctaaacgtttcataggtattatcatcaaagaaaattcttatttcagtgattttcctaacaggcttttctatatacctaatttcctgttttacaacccctttagctacattttcagtgcctcttaatgcaatttccttgcgattttccaggccaatcgtttctttggtcgaatttacaggattctcgtcaaacaaagaaggttgataatctccattagaagataccaatgaagcactttctgcagaagcaagcatttcaccttttccatataatagccattcgagatttacatagctataagtctggtgaactttcatgactacttccagactcggtttatttctatcatttaaaatatgagaaagagtagactgctgaacaccgattgtctcggcaaaaactctggggggaaccttttccctttccataatcattctaattctgtcttttatttccatactgcctttattgaaagttataattccacgcactaaatgatgttttcacaaaaatatatcaaagtttaaatgtaatacaaaagtaattatttaaattcacaaaaacaaattacaactataaaatataaatattacaaagttatatcgtcattcacatttgaaatattacgattgtacacatagataaaagaacctatttatatatcatagttattatttaataaatacatattactatctgataataaacaaatta

SEQ ID NO: 11749 - DNA, 18848 bp, Unknown
  gut microbiota DNA sequence
tgtagaagtatacatcgaaaaccaggaagacaaaaaaggacagctcgttctgtcacacagaaaagcccgcgctactcgttcttgggatcgcgttaacgctgctctggaaaatgaagaaattatcaagggttacatcaagtgccgcacgaagggtggtatgatcgtagacgtattcggaatcgaagcattcttgccgggttctcagatcgacgttaaaccgatccgcgactatgatgtattcgttggcaaaacaatggaattcaaagtggttaaaatcaaccaggaattcaaaaacgttgttgtatctcacaaggctcttatcgaagctgaactggaacaacagaagaaagaaattatcggtaaacttgaaaaaggacaggttcttgaaggaactgttaaaaatatcacctcttacggtgtattcatcgaccttggcggcgtagacggtttgatccacatcactgacctttcttggggacgtgttagcgatccgaaagaagtggttgaactggatcagaagctcaacgttgttatccttgacttcgatgacgaaaagaaacgtatcgctcttggtttgaaacaactgactccgcacccatgggatgctcttgatactgacttgaaggttggtgacaaggtgaaaggtaaagtggtcgttatggctgactacggtgcattcatcgaaatcgctccgggcgtagaaggtttgatccacgtttcagaaatgtcttggagccaacatctgcgttctgcacaagatttcatgaaggtaggcgacgaagtagaagctgttgtgctgacacttgaccgcgaagaacgtaagatgtctttgggtatcaaacaactgaaacaagatccatgggaaactatcgaagaaaagtatcctgtaggttctaagcatactgcaaaagttcgtaacttcactaacttcggtgtattcgtagaaatcgaagaaggtgttgacggcttgatccacatctctgacctttcttggactaagaaagtaaaacacccatcagaatttactcagattggtgctgatatcgaagttcaggtattggaaatcgacaaagaaaaccgtcgtttgagcctcggccacaaacaactcgaagaaaatccttgggatgtattcgaaactgtgttcactgtaggttctgtacacgaaggtacaatcatcgaaatgttggataagggtgctgttgtggctcttccttacggtgtagaaggtttcgcaactccgaaacaccttgtaaaagaagacggttcacaagcacagttggatgagaaacttgaattcaaagtgatcgagttcaacaaagacgctaagagaatcatcctgtctcacagccgtatcttcgaagatgtagctaaggctgaagaaagagcagaaaagaaagctgcttctggtgctaagaagtcatcttctagcaacaagagagaagattctccgatgatccagaaccaggctgcttcaactacgctgggcgatatcgacgctcttgctgcattgaaagaacagttggaaggaaagaaataataaaaagtatttctaaataaacagaaaggtgtattgcgaaagcgatacaccttttttattatctatgtttttatgttctttgaagattgtttataaagccgatacggtaaagtcggcagataaaccttcagcgctgtttgttcctacccataatttgaaatctcccggttctacgttgtaagtcatgttatagccccagaaagccagctctgaaacaggcagagagaatgaaacattctttgattctccggctttgagttctacacgttgaaaagccttcagttcctttaccggacgggttacagagcctaccttgtcctgaatgtaaagttgtactacttccgtgccgtcatactttcctgtattctttagatctaccgtgactgatatctcgccgttaatagcaagtttgtcggaagtcaacttcagattgctatattcaaaggtagtgtaagacaatccgtagccgaacggatacaagggggaggccccggcatcgagatagaaggaacggcagccaacagatgtttgtcccgcttcgacagggatttcatcaatgagcatttctttcgggttggccgggcgacctgtgctgttgtgagcataatatataggaacctgacctgtcatacgggggaatgtaaccggagtctttgcgcttggattaaccttcccgaaaaggatgtcggcaatggcaggtcctcccatagtgcccggatggaacgcataaagaactgcatccgaagcttcaacttcactagcgattgtaagttggcgtcctgccatcactatggttactaatggtttgccggtagtggacagtgcttgtatcagttgactctgtgctccctgaagatttaggtttgccaaagaatgggcctcacccgaaagtattgcttcttcaccgacaaaagcaaggactacatctgcgtggcgtgccgcgtttacggctttggcgataccgtttaggtttttgtcacggctataaccgagtgcaggttcgaaaattacgttgacctgatcgccatacatttctctgatggctttgagaggtgtttgagtatggtctttttcaccgtcgaacacccatgtccccatctgttcatagggtgcgtcagccatcggacctactaccgctacagtacggattttgtttgtaagcggtaatgtttgtgtgtcattcttcaggagaataacggattgctctaccgcttcttttgctattttcaagtgctcttccgcatatttcacattctgtggtgtaacaatatacggattttcaaacaagcccattcggtatttcagacggagaatattccgtacggcgtcgtctattgattctatggaaaccttattctctgctaaagactgcttgaggtttttgatgaacgtttcactcaccatatccatgtcaacgcctgcatttaccgatttctcggcagcttccttgccatctgcacagaaaccgtgattgatcatttcggcagccgaagcccagtcggttactaccataccgtcatatttccattcatcgcgcaatatatctttcaacacaaatttatttgccgtagacggcacaccatcgttatcgttgaatgaagtcatgaaagtggcacaaccagcgtctaccgcagctttgaacggaggtagatatacattgcgcagtactctttcggggataaatgtagaattatagtccttaccgccttcggatgcaccataagctacaaagtgcttggcacacgccgccattgaagtcggactgttcagcgaatctccttgaaaccctttaatcatagctactcccattacggaagtcaagtagggatcttcaccgcaactttcggctatgcgtccccaacgagggtcacgtgatatatctatcatgggcgcaaaagtccaacggataccatcagctgaagcttctatggcagctacacgtgctccgttttctactatctgtggattgaatgtggctgcctgtcccaatggaatagggaagatagtcttgtaaccgtgaattacatcgcgtgacactagtagggggatacctaaccgtgactcttccattgcgattttctgtattttattcacttcttcgggattcatataattcaatatggaacctatttctccattacgaactttgtttgccagttcgttaggatcccacggactcaactgattcatctgccctagcttttcctctaaagtcatcttatccagtaaggcttctactttgttctctatctcagaatcagagttggttcctttcggagagcaggctgttaatgccaatgctgtcagtgttgtggtaaataataacttgtttatcttcataaatcgtcttttattattgtaaatatttattagttcttgcttttgggaggaatgcatcaaaatgcacagattggataaaaagcttcgccaggtatgccgtgccatccattttcagaaccgcccgtcataaggcgtaatccatggtctccgacaccattgtaaaaagtgacagaaggaattgtacctgccagttcatccgcatttatttttttcaattgtttgttaatgtactcttgccccgatgtggaacctgtttgagtattttcaccttgtatcaggtatttaagttcattgaacgaaggagcataccaagcggtactattgtttagtttttcagtatgattattcaaagcgataaatcccagattttcagttcctactaaaatttgtgtcaatttataaccgtttgatgtttccgtatcagtgtatttctctacatttccatcaataaaggcttgctctatatcagctgctgccacagtgccaaaattatttcctttttttgtagagactactaagccatgtttttcttgatatccatttaaattggagtcgtttaaatcatttgtagatttaaaagtttcaaaatcgtctattatgtggaatacgattcctttgcaggtaagaccggtaggaataccggctgcatttcttggaagaatgattgttttattactttctgtggtacagtagaagtcacctactgcaatatctgccgttccttcggaggatgttgggcaagggaaagtgtaacattggttggctgccagtgttataggatctttcagcgtctttgaataagtaatattatcaatcgtgtagaagtagcgaaaatcattttttactaattgttcttcgtcaacaagacagatgtacttgccgctcattgattcgggcgtgtacagttcgtcgccaatggagaaagatacatcggaaagatctaataaataggaaatctcttccgtgtcatctagtttaatggtcgcttccgcagagaacgctatcaatgaaaaggcgtgcttaaagttgattgtcaattgatgggattgaatatcattgatttctgctatcagcaaatctttgtctttaaattccgttgtttcttcctctttcttcgcttcttttagttcatcaacagatgaaggaataaactcttttccatttttcactatttgggcatagggaaagtaggcgatgactttcttgattttgctggtataacttacactgtttttactaacccatttgtttacaccgttttcgtttatatacttaaagggttcattggcgaatccgattccatctttgtctatcagtaaaataccgatttcatcgccgttgacatcttccaagctgtttcctgcttcgaaaagaactgtgacaccatcattgattacccgtgtagtagaatttccggtatcgaaattggctacatttacattttgaatagtcagaacatcagaaacggcggtttcgttttctccgatctgaggtaacatctcgtcttgggtgcaagccgaaaatattaatagcgatacggctgccagtttgatatgtgaatatatttgtttcataatttgtatgattaattagaaagtaagaataagacgaactttttgttctgaatctacagccctgtagaaatcagtactgcttattgcaccattttcattgaaaactactatataagcattagggtcactgtcgaatgtactgtcccaatatgtgccattcaatgcactgtaattagtgaatgttttacccgcaagagttgctagatctcttaattgggtatgagagggcaaataccaaccagatgtgccgggtataagtgaattattgtttttgctggtagaagttgaggctgccggcactgttgtagcctctgctacagctgcttttgctataagatatttagtgttaaggtatcctagatattgtgtggtttttccgtcttttatgccgtgttccggaaaatctgtcccatacaagtttgcattaccttctttccatttgaaactactcttttcgtcgctagtttcatcagttagcgctactacatatccatgaatggtttctatatccgtaccttcgtaatttgttacgttgtccgtctcatgttttcctatcttatagataatacctaaggtggaaccgtctttgtaatctgtcccgtaagtaccgtcactatagaaataatagcctacttccatatattctttagtatatgttaatttgatatccgaacggatattgcagaatgtgaaagtgacagtcccgtttggggtatcaactgtacgtactctgtcacatagaccttcataatcgatgcctccgcttgcatttgtttctttataagttatggagaagccgttggttgcgttgtcaatgaaactgttttccaaacctgtaaactggcaattggtcaaatttgatacttcatcagatataatagccttaaatttagcatccgtaatctgattgtcatcgatcttttcattatcccaattaatttctccggattccatttctacagtcagtccttttttgctgacagacaagtaatatctttgccatgtattgggaagcaaatctccggttttcttattgacgtcattggggttggacttacttggagtatagatataggtatcttctcctatttctacttttatcaatggtttctcccacatttcacaaggaaccatcatagcttcaccgtttctataatattctccttttgtgtcatgagtagaaatcaattggtcagcatcgcctaccgttgtgatttctccattagtatacgttacacttccataaccgataaacgaaacttttgcggtgttcacttcttcatctgtatatccttcaaatttctgaagttcccaccacatccgggtcatttggtgtctgaatacaaaatgtacattctttgcttccactttcgcattacttgccaataagtcacagtcaaagagtttctcttcggtagtttggtctgttaggtttatctgttctgctgtgaggggagtccatgctagcagatcatagcttgtgccatcccatgtataaggtgtatcttcagtagacatttttccattggttgtcactttgtaagtttttactgtttctcccgctttcacacctatcagttcgtcaccatcccatgcgctttctgtggttctgctcatcgtttttcctacttgagctgagaaagtaatgtcgcctttatccagcgaattggcaaattccgtttcgttcgtacatgaaaccgctccaagacttatggctgccataagccctaaatagtatccttgtatttttattaaattcataattttaatctttagcagttacattgttatttattttaattcaggctctataagccctttatcagaatccggtccgttaaaatcccatccgggaattgaaccgtttgaagagatatctccggtattagttccgggttgtacttctgttgatttctgataaaccctgacgtaatctacatacatgctttggggaaatacagtgtctgctgtgggatcaccaccaaatgtaccgcctaccgctacattcagaataataaaaaatggatgatcgaatacccattcaccatctgttacatcagcggctttcactcttttgtaaagtacattatccacaaagaagtctatttgggattcatcccattctacggcaaatatgtggaagtctgtgtcaaaacgttggctctcatagccaaaagtctgtgttatgggatttccacccgaatgtcccggaaaatgtagagcacttgatacgatattaggttggtatcctttattttccataatatctatttcaccgcattttggccatacatcggtggcatagtttgctcctaacatccaaaatgcaggccaaagtcccggaccgtacggaagtttcagacgtgcttcgaaacgtccgtatcgttgttcgaacagtccttcggtctttattctggcagaagagtaagctactccgtcataattgtcgttcaaagctgttattttcaggcatcccaaacctttgtgagttgtgtatgaggcgttttctactctgtcggtatagttctgaagttcctgattaccgtatcctgaagcgcctttttcatacgtccactttgaaggatcgggtctgttgtcgggagtcggtgtgtcaaattcgtccgaccacaccaatacccatcgggtgttttctatctcttcttctttctcgcaacttccaagtaacagtggcaaaggaagtatcagcaagctaagcaatattgttttatatggtttcataagttatcatttttaatagaaataaatattgtccaaaagaatgttcctggtgttgtcatcacatgccaatgccaattgtggtattagtttattttctttttcaagtttcagatcgagtgacagccactgttttgatttgaaatcaggatatttctccaatgttatcggatactttatttccgttgttccatagtatatagagactgttataatagtgctttcacttacttcgtccatgcataatacatccaggtggaggtgagtctttgacgaacaatccgcagttttgttgaatacaatacctacaaagttcaaaccgctataccgtgctatatgattatcaccggtatctatttccgtatattcagctgttgaccattcccatctaggattccagtttgcagaaatcttattagtataagaatcactgaacagagacaacacttccgattcgtctttcgtgggtgttggagcgaaatcgtagcaatgtacctttatttcgccttcagcctcctttaacgagataacggcttctcctgttttgtgcacggttatgttaccatcatttgttaccgaagccacattgacgtcagatgactcgaatgtaaaataattgggagagacccgcattttacggttaatgccgttcggaagattgatagtctcggtcagagttcctatcgtcagttttccgggaaaaccgggaacctctatatcttctattttggcatgagccaatgtaccgagtttttcgaacttgacctcatcgaaccagatggtgtagccttcgtcatttactgcaccggcggagtagtagaataatcctttttccgataaaagctttgcggaattaggaatagggatgataatcttgctccagtttgtattcagttggacatcattaacttgaaccagatattcggtagtatcataatttcctattccaacttcaatagcggtagctacggaagacttggcataaaaagtcagtgcgtcatatccggacaggtttctgcctgtagcggaatagaaagtacctcctgcccaactccccataggatcactcggattgggaacttctattcgcatagatgacgtgccatcgtaggtggtttcagtatccaccccgaaattagttacttttccccatgcctggtattgcaggtcggatgcaaattcatcgataaagacatcagacaagtgtgggtaagttgccagcacatccgtatttatatctctcgtacatcctgtcaacgaaaagagaacagcgacaacagagagcttacatgatatattgattttgtgattcataaaactatcttattaattagttcgtagattagaaaatgctgaatgaaatgtaggttcttatttcccattcgttgccacgacctgcgcctataatatctgtgcttggttcaaaaccaccggaaccgtccggtatatatccggcaacgtaacgaggagaatattgatctaatgttctgaaagtacctctgattcctacgcgagtggataccggacccaaccatttaggcttggcgagactggtcgaaaagtctaacatacattggaaagggaaagtaaggttaaaatccctgtgatagtcgtacggcccccagtcattaaacttcaccattgcgttcagtcgcagtttcttataaatcattttggcgtctgcacctacccgcttaactaaacgggtatcatctccgttggcttgggcagtaccacagtagacacttgatatgataccgaaatctcttgatattctagacgctattttcaggtttgtttcccataaatcatgagccggtgcagctcctccgaaagcaaaggtagaacgaccgttggcaagtatacctatggctgcatcctgtgaggtgggatgatggcggtaaatgaaaccaagtgaagcggcaaacggtgcatcttcgttattgtcattctcccagtcgtacatccaagtagcgggtgtcgggtcataagtcagcaacaattctcccgctgttgtctccctgttatccctaacagcaaaaggatcatcaataatatttcgtaatcttccgggagcatcgattccattaggcattggacctacaagcggtttctgccacaggaaattaggggcaatctggaagttgcctatctgataagtaaaaccggcaaggacgttcgattgatttccgctaccgctatcttttagcctccatcctgttaaagtctgtgtgtaatcggctccgccactggctaccaatcccattatcgccccctgcgcataggcattaaactttcctccgctatataccactttcatcttccctccgaatgtatcggatgtttttatcacgtcggaatatacgatagcttctttattgtattctgtggtagcttgaaattcccgtcctacaagcgttgttcctgaccataatccgcccgctgtaatattgaaacgtccgaaatttctttccaccataagagaggcccgtgtattcttgggacggggtatggcataagaagtagtcgttccttcacgctggtctatatcataatggaaaatacctgctacgttatatttacctatattccgttggtatttgacaagcagagccgggtttgcaccccaccatagttcgggaccgaaagcaattttcagccctttgaagtatttcttaccttcaatttcacttccgaaaggagcttcgccaccataaatatccatattatcaccgtagctcgcttcgggatacaatccaaagaagtctccttcgtatccccaatgatagtgtcctttgcggtaaaatgttttcagattaaacagtttgccatcccagtcaaaactcgcactataaagtcttaagcgttccaacggacccagatctactacttctccgctttcgtccgttatatatctggagcgtcctctgttctcataaaagatttcgtctatcgggttctccgccacatttccaagaacatttacagtgacttccgcctgtacattctctgccggttttgaggctacgcctacgtagaacgattcagtatggtcaaagcctttaaagctggggaaacttgtcggattcttcggcctggaacttggagtggtagtattctttgcacctgtattgtaggtagttatgtcacctctcagttcgctcaggcgtattagctgagtcttttcgccttgcaaggcagctttatcacttctggaggataaaacggctgacattacattgatatcggaaagtttgcttattatcgaagaggtggtacttccgggagaataaggattaatcttgtggacatctttcagcacatagtatgcggcacgcgggtaaagttcgtatattcctcggctgtcaggagttccttttgcgcatataccgaaccattcttcgttcatattgttttcaccgttcacatagtcaaatacatatccgccgttggcccatgatgcattggtgtcatgtatgctcaggttagtattttgaccgaatttccaccaaccgtcggtaaattggaaagtgaaacctccgagtgagttattgttgttgcctagtcctgccgcattcagatatatttcagtccaattcttcaacagaatgtctgcttgctctttttgtgcttcactttgagttatggcattgaatgcatcggatccgaactctgtaaacaataccggttttccatactcagcttttactctgctgaacaagtcgccgaacgagtcaccgcgatagcagttgattcctagaatgtcaacatccttacattctttggctataatatcaaggaatagaaggtcaccgttgcaaatggctataggagctgaagcattcattttcttcatctcgacagtcgcttcattgaacagtttatataagtgaaccgcttgaatagtggatttacgatcttctaccggaatatcttccgtttctgctccttgccaaaataaaccataattgttctcatttccaagaagatagaggagtattccaggagtattattgtattcctttaccaattctctcgcctcgtcgagaagtactttttttactctagggtcggaatagtcggtgttagctatccatgccccgtccaaagctactccatagcgtccgaaggagctatatatcattgtgtgaataccatattgttcatagatatattttacccatctggggggaacgcctatgtgttgtctgatagcgtttacacccatgttctttaataaagacatatccgtatcgagagcagccttgattatatcgtcaggctttgtccataaggaatatgaataattggtgccgactgggaagtaatcccagttcataccattcaccataaaagacttaccgttcacaagcaacttggaacctgttctgtcgttgactaaggagactttttcctgttgtgccgaaaggggaatggacaaaaggattagcaaagataataatattacatttttcatgataagtaaaataacaaattagcactttgtgaaaagaaagcgtctgagattacaaacgtatgtttcatagtttgctttggacctagtagtttctcttgcctcatagattaaatttaaaaagtatatattcgattaatttctcggaggacaaaggtagtatagtataaggtacggtgtatatacaagtaaatagtaagagtaaataaataaaatgttaatgtattgattattaattatataatgtttggtagaagtaaatagtttatgaagtaaaatggtttgtttgctttctctatttttgcattttacccaatgaacgtaccatctcggtgaattcttccttaggaattattgccttgtttctggtttttaaacgattattgtaaaccgtctgcggagagcaatgaagaaattctgcaatcttcatactgtcatttattccgagtctgacaagcgcatatatcctcaactccgtgttcaggagttcgccttctttaagcattatcttttcttcgggacgcaggagggaattgaagtcttttacaaaatcggggtatacgtgtaggaaaatagcgtcgaaactatgatagaactccttcaactcactttgtaccatcgtaatgttggaagttaatgatttgatatcgtctatttgaccggctttaagttttctgctgatattcttcctgtattcttcaagtttggttatataattggagcatattgagaatacatatcctatgtattcttctttcacataattggactctagtaattggttattgatcacttttagcttttcatttacttcgctaagttctccgttcacttcacccagcattcgttgggcttcggaaagttctttgacgtgtgaattaagcagtcggttactttcgttcagttttttacgtgaacgggacagttttctgaattggaaataaatgagtaggatggagatgagtaatacaatggataatatacttgtggtgtagagtgatttacgcaatttgctttcctgtattttgttcctttcgcgataggcctgctgtagtttatccataacggtcgatatgtttattacgcgcaccctgttgggatacagcaatgcggctttaaagcaataactgatgtaagtgtagcctctgtctatgtcttcacgcaaatagaggatattggaaagttcctccaatgaagctatatcgcggttgcagattttaatatcggctatggcagaataaataaggtattttacgtaattatcttcatcgccttcattgtaaaacatgatagcaagcatataagaattgatggcatccacccgcgtggacaatgatgacttgtctactatattttttaattttaattttatactgtctccctctgcagaacggggatattctctatgtagtgacgcacaaaaactataatatgaaggatgatcgggagttatgtatttcttagcttcgtgcttgaattccttctcaagattgtaataagaatttgtcagttccaggcgattaccgatgaattgtaccaaatgggagtatagatagatttttgtatcataatactgatacatattttctttacttaatgaagttatatctacattcaataattctttctcagcctcattcagtagcccctgggctgcaagaaggaaaactttatgcagtatccactcctgttctttgtcctttcggcctaatgcgttggctatctctatattattgtttacataaaccatagccgagtccgcattatagacaaaatattcatcatacagcattttgttaagccatagtttttcttccggttttagaggcatagactgtttcttacgcagttcttctattttatcttctttctctaaaacgtacttttcactgtttgtcaatacggaatccaatctggaaaacaattgttccatttctttattcttggaataaacattcccgaaagtaataaacagtaggaacaatactgataattttctgtatataaagggattcgtcatattaaatacttctttttctgatactgtgaccagctttcatatcatgttcttgaaaccggttgtcgatatgcaaatatatattcttttttgatactatatggcaggtaataagacttttgtttcattgcttgcgaaattaatatgttttttttctatctttgccggagatggaaaagtttgagttacatatattagggtgcggttccgctttgcccactacacgacattttgcgacttcacaagtcgtcaatttgcgtgaaaaattatttatgattgattgtggggaaggggctcagatgcaattacgtcgttcccggcttaaattttcccgtttgaatcatatctttatctctcatctgcacggtgatcattgctttggactcttggggctaatctctacattcggattattggggaggacggccgatttacatattcattctcctaaggggctggaagaattatttgcaccgatgctagcttttttttgtaagacactgacctataaagtgttttttcacgaatttgagacgaaagaaccgacacagatttatgatgaccgttcggtgactgtaactacgatccctcttaaacatcgaatttcctgttgcggattcctgtttgaggagaagcaacgtccgaatcatatcatcagagaaatggtggatttttataaagttccggtttacgaactgaaccgtattaagaacggagcggattttgttactcccgaaggagaagttattcccaatcagcgtttgacccgtccttcgaccccggcacgcaaatacgcttattgttccgatacaatttttcgtccgtctatagtgaaacaaatcaacaatgtggatttgctgttccatgaagctacttttgcacaagcggaacaggcacgggcaaaagaaacttatcacacgacagctgcacaagctgcacaaatcgctttggatgcaaaggtaaaacaattggttatcgggcatttctcagcccgatatgaagatgaagctgttttacttaatgaagcgtccgccatttttccgcagacaattttagcgaaagagaatttatgtattgatattgacggaggaactgtatatgaaaagtagccggttatttttgggagtaatatgtataatttgtttggctgcttgtagaaaggagaagcctttgtctccgataccggactctttggcaggtttcaaagaactgtttaatcctgcctatcagatcagtgcggacagtattcggcagctcattcatgcctgtttggaaaaaaataaacagactacagtttgggattctgcgttagtctctcattatcaggaggaaggcgatttcttatggttgaatgattcattggtctccgataaaccgactgtgcaggcagcggactcaatgttgcattggttagagaatatatcgcgacatgggattaatccgagactttatcctgtagatagtatccgtaatgggttgcagcagatacgtacattacaattgcaagatggaaaaacgatgaattccctgttggcggatttagaatatcagttgacagctgcctatctttcgtatgtgtgccggttaaagtttggctttctacctccagagcgcagatggaatgattcgataaaccgtatttctctgaagcgttgtgatatggaatttgcattgtcggctcttgattctttgcgtgccaatcccactgccgcctttcattgggcgcaaccctcttcccgtttttataagaaaatgcaggaagaattggtgcgcgtgaatggttggggaaagacggatactacggattattactgggatcgtttattgctgaatctggaacgggcgcgttggcagtatgctctggataaagggaagaaatatgtggtggcaaatgtggcggcattcatgctgcaagccgtcaacgaggaaacagactctattctggaaatgcgcatttgtgtgggaagtgtgaggaataaaacacctttgttgtccagcagaatctattatatggagctgaatccgtattggaatgttcctcaaagtattatccggaaagagattattcctacttatcgcagggatacgacttactttacccgtaaccgcatgaaggtgtatgataagaatggtacacaagtcgatcctcatagtatcaaatgggcgaagtatgcgggcaagggagtaccttatactgtgaaacaggataataagacgggaaattcgttggggcgtatcatcttccgtttcccaaatccttattccgtttatttgcacgatactccttcccgttgggctttcatgcgaaagaaccgggcggtgagccatggttgtgtacgtcttcagaaagcactcgattttgctttcttcttattagaagaaccggatgaattactggaagaccgcatccgcattgcaatggacctcaagccgataagcgaggaaggaaagaagcttcctatcagtgcggcctatcgtgaattgaaacattatagtttggagaaatatgtgcctttgtttatagattatcagactgtttatctgtctgccgataataatttgatgtattgtgatgacatttataagtatgatccgtctttactaaaggcaatgaccgatctggatttgaaaccataaataaacatagagatacaagagattatgaccccttataacgagcgcgaagttctgaagctcctccaggaggagagtacgcagcgacaaggatttgaaatgattgtggcgcagtatagcgaacaattgtattggcagatccgtcggttggtgctgtcgcatgaggatgcgaacgatctcctgcaaaatacttttatcaaggcatggacgaatattgattatttccgtgctgaggcgaaattgtctacctggctctatcgtattgcgttgaatgaatgccttactttcttgaatagacaacgtgctgtcactaccttggccattgatgatctggaagcagcggttgtgcagaaactggaaagcgacccgtacttttcgggtgatgaggcgcagttgtgtttgcaaaaggcattaatgactttaccggagaaacagcgcatggtgttcaatctgaaatactatcaagaaatgaaatatgaagaaatgtctgaaatcttcggtacctcagtcggtgctttgaaagcgtcttatcatcatgcagtgaagaaaatagagaagtttttagaagacattgattaaacctttggactcggactatgtctaaatcaaagagaggagaaaaacgaatgaaagaagaagatatcctattgaagaaacttggtaaggaagattccttcaaagttcctgatggttactttgagaacctgacttcagaagtgatgaataaacttcctgaaaaagagaaagtggttttcaaggaagaacctgtcagtacatggacaagactgaaaccattgctctatatggcagctatgtttgtgggggctgccttgattatacgggtggcgtcgtcagatcacaaacctgctgcggtcgatgaagtggcggtgacggaggtggatactgaagttgtatcggacgaaatgctggatgtggcactggaccgcgctatgctggatgattattcgttatatgtttatttgagtgatgcaagtgtagaatgatttattaaaactgattgaatacagaaaatgagaaaattaatcgcatgggttgttttgttgtgtggcttcatgcctgttctttgggctgctgacggatgtgaccagcatttatcccgggaggagttcagggcaaaacaaaaggcattcattatcgaacaggctggattgagtaaagaagaggcagccaagttctttcccgtctattttgaacttcaggataagaagaagaaactgaatgatgaatcgtgggatttgatgcgcaaaggtaaggatgataagacaacggaagctcaatatgcagaaatcaacgataaggtagctaacaatcgtattgctgccgaccagcttgataagacttatctgggtaagttcaaaaagattctttccagtaagaagatatttctcgtgcagcgtgcggaaatgcgcttccaccgggagatgataaaaggaatgaatcgtggcaaggataaaggaaatgattcgaagaagaaataaagaaaaacagagcgtctattcatacgagttagatgct

SEQ ID NO: 11750 - DNA, 60540 bp, Unknown
  gut microbiota DNA sequence
tattttaatttatagaactcctctttaatttcggattgtatagataactgcccaattccatcatgctggtgcgatcaccattgaagaaaggagcacgggcagtattgcttgacagtgaatatgctgtatatgtcagtcctgaattgatacggttattacctgcagtaccatagcttaaacgtaatttcagactagaaagccaattgcgcgtgttttgcatgaattgttcatcagatatacgccatgccaatgcagctgatgggaatactccccattgattgcctttggcgaatttactggaaccatctgcacgaacggttacggtgagaaggtatttgtccattaatgtatagttggctcgaccgaaaaaagaaagcagattttctttggcagcaagtgttgtttgattgggtaatgctgttcctgcaccggcagtagacaaaacttcttcaatgctcatgctggtaggaaatgcgacagaagtattctccaatgtctttttttcgttactacttacttcgtgtcctaaaagtacattgattctatcacgtcctccaaacagctttttgttatcgtatgtcaatgtatttgcattacgccagtttttagtagtaactctagtgaatacagcttgcggttgtccgttatagcctaactttgaattttgtgcaccatcggcattccaaacctgatcagtatcttcatacttccatccgtaaccgaattcagaacggaatgtgaagtttttgaatggtttccagttgacgcctgcattataattctgattgaaagtagtctttttcttatatactcctaataggcgttctaatggattctttgtggtataggcattatttgcttcatcatcacttgcgtcatacgccattggattgaccgggcggaaacgggtggcattggctacaatggaattagccgcatttgattcgttcgtgtcagcacctccactcagaccatctagtgtactgtagctcatacgtacgttgaaatctaaagaaagccacttgtttaattctgaattgatcttagcattcacattgtctttattgaaacctgaccctaacattatactcttttcgtcattgtgagcatagctgatgttatattttaattgcttgctgccgccactgacattcaggttatattgggcttggttgccggtacgtccgaatatctcatcctgataatcagtaccttccattgttttccaaatatccatatcttcaaaaagaccgtattcttccgttcttccggtttcatattgataagccacatagtcgtatgggctcataactttattgagtttagtaacctttttgaaaccataggaggcaccgaaatcaacttgtactttcccttctttgccactttttgtagtaatgataataacaccgtttgcaccacgggcaccataaatagcagtggatgatgcatcttttaaaacatcaatactttgtatttcggatggggcaatgtcactgatacttgaaaccggaaaaccgtctacaatatataaaggtgaattatcttgggataaagaaccaccaccgcgaacacgaatttttacgtctgcatcaggagctccttcggttgttgtaatacttacccctgcaagttttccagtaagggcttcggtggcactggataccggaacaactgccaggtccttggaattgacagaagctaccgatcctgttaaatctcttttgttaactgttccataaccgattacgactacttcatccaatgctttagaatcatcggtcatctgtacgttaattacttttttaccttgaattgcaatttcttgagttttcatacctatgtatgaaataaccaatgttttcttcccatcaatcttgatggaaaagttgccatccagatctgtaatcgtaccgttggtcgtattacctttttcaacaacggaagcgccaataacaggctctccactggtatctttcacattaccttttacagtaattgtttgtgcagatacgctgagcgatattgctgcaaatagcattaacagcaaggtacgcatgttttccactttgttagacattctttgcatgtttataaatagttattaatttgatttagctgtatcactttctttttctgtgtttatttatcgctacaaaagtatatgaatgtaaatatagctatgtgtaatatttgtttttcgcttcgtattttttgttatttagtactttgagagtagtatctctagaaaaaacaatatttcaacatcttctttccattactcttttacctttgtgccgtctgaaagaaaacattaatctaataatatgtaatttgaatgatgaaaaagtatttttattttttatgtattaccattctacctctttgtggcgtttgggcttgttctaatgaaaacacggagtctcatgatgaatttggtaatcaaggagagaatattcctactgcaataaagaagttggattatggacaattattagctttccccggtgcagaaggacatggacgaagtactacaggggggcgaggagggagtgtgtatcatgttactacattggaggataatcctactaatcctcaaaaaggttctttccgttgggcgcttactcaaaaaggagcaaggacaatcgtttttgatgtggcaggtacaattaaactaaaagctcagttaaaaacaacaaatgataatttgacaatagctggacaaacttctccaggtggtatttgcattgctgattatgactttgtaatcaattctaataatgtaattattcgttttatgcgttttcgtcctggaaatgtaaatttagactcggatggattaggtgggatggataaaaagaatattatagtagaccattgttctatcagttggtgcacggatgaatgcctatctgtatatggaatggaaaactcgacagtgcaatggtgtttggctgctcaggcgttacgtgatactccttcgaaagataaaccgcatgggtttggaggaaactggggtggtcattatgcttcctatcatcataatatgattgcacattgcgagagccgtgtcccacgtttgggacctcgtcctactacgttagctctgacagaatgtgtggatattcgtaataacgttttttataattgggcaggtgaaggttgctatggaggggaagaccaacatgtcaatctcgtgaataattattataaaccaggacctgctacggacaaggcttcttctaaagtacagtatcgtattgctaaaataggaatctatacacaggaatatgttcagaagaacccttcttttgcaccgtatgcacaaaaatggggaaccttttacattgatggaaatgtgatggagggtaatagtggagtgactgtagataattggacgaatggagtgtatgcccaacaaacgaatgatgacaaagtggataatatgtggacaagggctgctcaagctgggttgaaattatctaagccattggattacgggacagtgactacccatacggcagaagttgcttataataaagtaatgaaatatgttgggtgttgtgattatagggataaagtcgataatctggttataaaggatgtgaaaaatcggggggcatcttacactgcttccggcaatttagatgggtatatcaatacaccgaacgatataatagaattaggaagtaattcatggccggaattatcattggatactaaacgttgtgtgatagactctgatggtgatggtataccggatgaatgggaaatagagtatggcttagatcccaatgatagctcggatggaaataagaaaatgattgatgtaaatggcaaatatactaatttggaaatgtacatgaatagtttggtgcacggtatcgttcaagaccaaaatgcagattagtaattttcttctttctattctttgttcctttgccatttgttttctattgatgaattaaaaatcctctccatattcttatttggaatatagagaggataattttattgacgagagttgcatggggtatggtgagatgaaatcataattggggaataaattgcacaagactttcacaagtatcctcccgtcaatgcctaaaatcatggcaaaactaattaaataattttttgaatcgcaatatttattaatttatcttatggtaattatgaaatatttaatatattgaagatattttgcactaactttctgtaactcactgatttttcttatgtttgccgattaaatactaaaagaagggagtaaatatgtccacacctatattatataatgactttccaacgtttttgaggaaatacttttcttataaagtacaaaagatatcattaaatgctgggtttacgtgtcctaaccgggatggaacgaaagggtggggaggctgtacatattgtaacaatcaaacttttaatcccgattactgtcggacggagaagtccattactactcagttgcaggaaggaaaatacttttttgcacacaaatatccggagatgaagtatttagcctattttcaagcatacacaaatacgtatgcggagttggaggggctaaaacgcaaatatgaagaagctttaaaggttgacggtgttgtagggctagtgattggaacccggccggattgtatgccggaaggactgttgcattatctggaagaactgaataaacatgctttcctcatggtagaatatggtatagaaagtacttgtgataaaactttgcaacgtatcaaccgtgggcatacgtatgcggaaacagtggaggctgtagaacgaacggctgcctgtggtattttgacaggtgggcatattattcttggacttccgggagaaacgcatgaaacgatggtggagcaagccggaatcctttcccgattgcctctatctacccttaaaattcatcagttacagttaattcggggtactcgaatggcgcatgagtatgctgaagttccggacgatttccatctgtttacggaagtggacgaatatattgatctggtaatcgattatatagaacacctccgacctgatatggtggtggaacgttttgtttctcaatctcctaaagaattattaatagcaccggattggggattgaaaaattatgaatttgtggcacgtttacaaaaaagaatgaaagaaagagatgcttatcaaggcaagaagtataaggattcggaaaaaaggattatttttgcagatgataagtttaccacttaataactgaagaatggaacataaaacaagaattaaaggaaatgtccactatgtgggagtaaatgaccgtaacaaacaccggtttgaagcgatgtggccattgccctatggagtttcatataactcttatctgattgatgatgaaatggtggcattggtggatacggtagatatctgttattttgaagtctacttgcgtaaaataaagcaggtgattggcgaacgtcccatcaattatttgattataaatcacatggaaccggatcattccggctctatccgattgataaagcaacattacccggaaattattattgtgggtaataagcagacctttggtatgattgaaggcttctacggagtgactggcgaacagtatctggtgaaggatggggatttcttagctttaggacatcacaaactgcgattttatatgactccgatggtgcattggcctgaaacgatgatgacctttgatgaaacggaaggaattcttttctccggtgacggattcggctgctttggtacattggatggcggttttctggatactggcatgaatgtagacagatattggggagaaatggtacgttattattcaaatattgtaggtaaatatggaagccctgtacaaaaggctttgcaaaaactgggcggacttcctatttctgctatctgctctactcacggacccgtatggacagagaatattgccaaagtgattggtatctatgacagactgagccgttatgatgcggatgaaggtgtggtgattgtgtacggaagtatgtatggaaatacggaacaaatggctgaggctatcgctgcagagctttcggcacaaggaatcaaaaatatagtcatgcacaatgtgacgaagagccatccttcttatatcatagcagatattttccgttataaaggattaatcatcggttcgcctacttacagcaatcagttattccccgaagtagatgcgttgctttcaaagattctgttgcgtgaggtgaaaggtcgctatttaggttacttcggttcctttacatgggcaggtgctgctgtgaaacgtctggctgaatttgcggaaaagagcaaattcgagttagtgggcgatcctgtggagatgaagcaggcgatgagggatatcacttatactcagtgcgaaaatctggcacgagcaatggcggaccgcttgaagaaagaccgataaaacagtgaatgagatattatttattaactaacctataaaacaatcgacttatgagattaattattcaaccggactatcagtctgtatctcagtgggctgcacattatgttgctgcaaaaataaaagctgctaacccaactcctgaaaaaccatttgtattaggatgtcctaccggttcttccccacttggaatgtataaggctttgatcgacctgaataagaagggtattgtttctttccagaatgtcgtaacgttcaatatggatgagtatgtaggtttaccgaaggaacatccggaaagctactattcttttatgtggaataacttcttcagccatattgacattaagccggagaatacaaatattttgaacggtaacgctcctgatttggatgcggaatgtgcacgttatgaagagaaaattaaatcatacggtggcatagacctgtttatgggtggtatcggccctgacgggcatattgctttcaacgaaccgggatcctcactgacttcacgcactcgtcagaaaacattgacaatggatacaattatcgctaactcccgtttctttgacaatgatatcaataaagtgcctaagacctcattgacagtgggagtcggtactgtgctttctgcaaaggaagtgatgattatcgttaatggtcataacaaggcacgtgctttgtatcatgcggtagaaggcgctatcactcagatgtggactatcagtgctctgcagatgcacgaaaagggtatcatcgtttgtgacgatgctgctacggtagaactgaaagtaggtacctatcgttactttaaagacattgaatccgctcatctggatccagagtctttgatttagtaagaagtggaatatactctataaaaacgggctgcaatcaattcaacgttgatgcagcccgttttctatatgaacaatcagagtatgaacaattataaatggttcaattctcctctagccacccttttccctgacgcacgatttccggttcgttttctgtgcattttacgacagttgacggttctatgcctccgatacctccgtcaataacaagatccacgatatctccgaacttttcgtctataagttccggatcggttatatactccaagtcctcgttttcctcatgaggcagggtggtagtcatgatgggagcgtccagcagccgtgctatctctcggataatatgattgtccggcatgcggatacctacttcctttcggttacggaaaatcttaggcaaccgatttgttccgttcagaataaaggtgaatggtcccggaaggttatgcttcataagcttaaatacattattgtcgactttggcatattcgctgatactgctcaggtcatagcagataattgacaaattattcttgcgcggatctatctccttaatacgacatatccgttctatcgcacgttctttcaaaccatgacaaccgatagcatacatcgtgtcggtgggatagataataagtccgccatcattcaggatatcaatgattcgttgtaaatcctgcgggttattatttttatcatatagcttcagaagcataacctttttctccttttttatttgagtttcttctttaagaaatccagtgctttctctgccgccttttccgtcactttctgcttgacagaatctttattggcggtagcggctgaatccagacctagtttttgtcccagtttgctgatagcctcgtcggctacggcctcaacagcctgacttgccatgctctttgtatcaacactgactttaggagaggtaaacgagcctccgatcttcaagtcaagagtcatcagcttggaaatgttaccggcagaagcgggcagcttgatctttcctgtataatcgatggtttggtcgagtcccgtactacctgaaagattcaagttgtagtcacccatcttgatatcaaacggttttgtttccacacgtccgtctttgatagtgaactccagtgtcatatctttcactttcatttccttcagactcggctgtttcacagcgtcggcaatctggtcaatcgcttttactccactcagactgagatcgcgggtggagaggctgccgtctccttgcattgtgtccaatacagggctcatagttgcgtccagatcagtcaatacattgatactgccggagaaattacctttcaggttttcaaagataggagccatcttctgtatcatatccagttctttgtaagcctgtgcgaaaacgatattcgacagtttgaatccggctttcatctccggtttcttcacgttggcggtagaataatatccattcattactacatttcctcccattgtattcatggaaaggtttttcatgtctaccttaccgtctttcacaatgagtttgccattcatgttgttgaagaccatcttatcgaacaatacttctttcagattagcgtccatttggaagtcaatgttacgggggacttcaaagattccggttgaagtagcaaccgagtctgtagtggcggtattcggtgttgcgtctgttccttcggcggaatcacccatgaaatcattcaaattaaaatgattggagcgaatgttcagatttcctttcaaggtagttcctttcagtacatatccgatatagttctcgaagcggctatcggctgtgatatcattctttccgatattgacggtcgtttcgctcaactgaagatacttcggagtaaaagtgaaaagggatttctggatttctacatccggcatatccttcatctgaagtttcatgcctgtcaatccgatcgtaccggcagcctgtatatgttcatattgttccttttctatataagaaagacggccggacatctgcatatcggcattgatcgttccattcagctccatatcaccgagtggatacacttgtttgatcatacctaaattaaggatgccctttgcttccgctttaaagtccgggtcgctgattggagttttcacgttggcagtcagactgaacggatttcctgccagacggaagctgaacggattgatggtaacggtagtcaagtcaatatttcctcccggattctgaacattggcgctgatgttgatttgatctacaccagccggtagagccggatagcggaacatggcattcttgatctgcatatcgatattgaatgcgggtacggtatctccctgcagaacgcctttggcagcagcagtcagagtagcagtcccgtcagttttcagacttgagaactcagtagcatagatggccggaatcaacgaaagaatttctttaaatccgatatcattcgtattaagtttcaaatccatgtcgatagcgggatcttgtagggcaacccagccgtcaatacctgcctgaatggcattaaggcggatagtattatccttcaatgtatatttattattggctaagtcggcgtctatatccattttagcggaaatattggcatctgccaagaaaggaatgccgttcatcttgtaagtcaaagattgggtttccgcttccagttgcaatgtggtacggtcacttcccaaatcgccggaacaaacggcattgaagtcacggatgtcagcatacattttcccttgctgatcgtcataaaccaagttcatgtttttgatgacaaactgttgtagcttcaccttgaaaggagaagattcctcttctgccgtaggtgtttcctctgttgctgtggtgtccggcttcatgatatcccagttcacttgcccgtccggcaatacaatagcgtgcagccgggtatcttcaatgaagattttagaaatatcatagccactatctccgaaaagtgaaaatagattgatagctgcggtaacctctccggcttgtacgagagtatcgttagcgaattctcctgcacctttcagccagaaatcttcgagtgtgacagaagcctgtggaaagttgcggaacaggctaatgttaagtctctcaaaatcaaattgtgcattaagcattttgttgccttctgtctttacgatatcggctatcttacctttgaaggcgaaagggagaaggagcatgaggatgataataactcctacagtgatagctgcgattttcaaaccttttttcatttacttttattttaagagtttgacgaatatacaagagacaaaactaataaaactttttgataataaaggataaaaggggagttttatgatttctttttccttagttcttccgcaattctccattgcagtgcagcttctccttcttttcctgcttttatcagtgcatctccgaaaagttcgtgtgcgccggcgtgttccggtttcagactggtggctttatccaaatcggcaatagccccttccatattttcaagttttagacggagttttccccggttatatacagctttgaagttggcgggatggaggcttacggcagtattgaagcagttttccgcgtcaaaatattctttattattaaagagggtaatcccttttcgtatccaggcgtccacataattgggatcgaggctgagcgctttgtcataattggcaatggcggctcgtgcatcgtgggcttgggtaatacattcgttacccatcaataaatattcatgagcatattgccgcagacgctcctgctgttcctgtaattgttccttgagtctcctattctgttccttcagcgtattgatgatacccagtttgcgacggatcagccgacggggagcaggtttttctatatcataacgggaatgaatagcacggaagaattgttccaggcattcctccatgtctcctttgtcgaaagcacgtgcggcggcaacatattgtacgtcggcctgtgcttgtttcaaagccttgtcaatagcctgacgattattaaaccgtccggcaaagttcacaatctcgggccggacgaaaacatctgcccggctgatgggctttttaagttgaatcccctccagagaagtgcaccggctgagtgccacgtatgcttgccctccggcaaatacaccacctgtgaaatcgatgactacccggctgaaagtgagcccctgactcttatgaacagttatcgcccaagccagccgaataggatattgagtaaagctgcccaatacctcttcttctatttctttggtcttttcattgtaacggtagcggatgttccgccatgattcccgttttacatcacattcttttccgtcatcggtgataacgtatatcgtttcttcttcctcatcaattccggatatgacaccgatcgttccattcacccatcggcggtcgaaattgtttttgataaagataatctgggcaccgggtttgagtacaagttcttgcgaggtaggcaggctgctttcgggaaagtctccttcgataactccctcgaaagtgattggatctcccggcagttccgccaactttttctcattgatagagtctactgtatcccgtcttgtagcaagagtgatgtacatatcggcttccgattcctcaatctggctcccgtatcgggtattcagcagttgcagatcggctgctccggccgtattcgtacggatatggtcgagaacgctgacaaaaacaggatcggtctgtctgtatactttctgaagctcgatggataccaagtctatctgaccgaatactcgtgcggagaagaaatagggagtaggatagaagcggttcaatatatcccgttcatcgttctttacaaccggttctaattgaaaaacatcacccaccaataacagctgctttccaccgaaaggttcgcgtaagttatgggaatatacacgcagaatacggtcgatagcatcaataatatccgcccgtaccattgaaatttcgtcgataatcaccagttctatctgttccagtaactttcgatgcggttttgtatatttaaagaattcgtggatgcgtccccgttggagactgagattcgggtcgtccggtggcagtggatgaaaaggcagtttgaagaaactatgcatcgtacttcctccggcattgatggcggcaatacccgtcggagcaagtacaacatatttcttcttggtgttttcgcagacgtaacgcaagaatgtagattttcctgtacccgcctttccggttagaaaaacagattggcgtgtatattgaatcaggttcaaggcatcttgaaactctgcgttgttagtgtctacgctcatgttgataaatagagtaaatcccccttgttaaataattccgaaatgtttcatcgctttgctgataccatcctcgtcgatcggagctgttacgtaatcggcggcagcttttacgtccttttcagcttgccccatagccacaccgatagcagcatgacggagcatgctgatgtcgtttcccccatctccgaatgccatcgtgtcttccagtctgatatcaaaataacggattatttcgtctatgcctttttgtttggtatctcctttggcggttatatcggcaaaggcgggataccagcggcctatctcgcaagttgggattgacgggcggatttctctttcttcttcctccgtaatgaaaggagtcatttgtataatctccttgtcggtcgcttctgcaaaagagacggtcgggataacatccacgtgtaggaaatcataaaaaatcttctttaccatctcgttgggctggcaaacggaaatatgatgttcctctacaaaaatgcagggtactcctttcttttcgcagaaatctcccattgcttttacctcttcctgggggatggcgttcttataaataacttgttctccgacaaaacaataggctccgttcatcgtgatgtatccatcaatgagattccgcttctgtagctcggagagattgttgataatggctttcggacgtccggtagcgataaatattttatgtcctttcgtatgggcggcttccagagcctcgatagtggaagacgggatacggtgagtatggaagctgaccagtgtaccgtctatatcaaaaaataaagctttcgtcatagattcctttttgaattgaagacaaaagtactacttttgtctcatataacataaaaacatcatgcagtatgaactataattttgatgaaataataaaccgtaacggtacggattccgtaaaatgggatggagtggaaggccgttggggacgcaatgacctgattcctatgtgggtagccgatatggatttccgtacggctccatttgtgatagaggctttgaaaaagcggttggagcatgaagtgctgggatatacattcgcctgtaaggaatgggcggcttccattatccattggttgaaagaacgtcacggatggtcggtcaccgaagaaatgctgacgtttactcccggcattgttcgcgggttggcttttgctatccactgtttcacggaaaaaggagataaagtgatggtaatgccgcctgtctatcatccttttttccttgtggcgcagaaaaatgaacgcgaagttgtattcagcccgttagtgttgaggaacggacagtattacattgatttcgaccgtttccgccgggatgtacaaggttgtaaaatactgattttaagtaatcctcataatccgggcggacgagtatggacgaaagaagagctttcgcagattgctgatatttgtcaggaaaccggtactttggttatctccgacgagattcatgcagacctgactttgccaccttataaacatcccacttttgctttgacttcagaaaaagcacggatgaactcacttgtctttatgtctccgagcaaggctttcaatatgccgggactggcaagctcttatgtaatcatcgaaaatgaggaacttcttcgacgtttccgtacctacatggaagcgagtgagttttgtgaaggccatctgtttgcctatctgagtgtggcggcggcttatagccatggtacggaatggctggatcaggtgatagcatatatcaaaggcaatgtagactttaccgaaaactatttgcgggaacatattcctgccgtcaagatgattcgtccgcaggcttcctatcttatctttttggattgccgggaactgggattgaaccaagagagtttgaatcgcctgtttgtagaaagagcgcatctggcactgaatgacggaacaacattcggcaaggagggcgaaggctttatgcggttaaatgttgcctgcccgcgtgctacattggaacaggcattaaagcaattggaacgagcagtcaataatgaataagaactttatcggatatctgactgcccttgtccattacaggtgttcggcggttctgtcgtcagaatttgtcggattggcgtaactgaactggatattgctttgttcattttctttcagttccatatcgtttctgtttttggcatacaatgtaatgtcagataaattaaagtttctcgtataacatatttttccgagactgtttgtcgttgccttgatggcatggagatagaaattctccaggcgtaaggaatcgttccatccggaagcagagataaattcatttacgttttctgcttttacatcagacagatacacgttccggaaatgtggatatcctttttccggcggattaacgggagtcagcattactttccaatgctcgggaatttctttgccttcatattctttgggcaggatgctgtagctgtaattgggattccagtttagatccgccgccagaacctgttgcacattcttagcattgattcgggtcatgtagatgttttcgactgttcctccgcgattcatggcacttttcagtctcagtaccgtagaagttccttctgcatccagattgtatcctaatatattacggatacttcctgaagtctcacttccgcaagtgatgaggccggcgcctttgcgggctatacagttacgtatcacaattttttcggtaggacggttcacccgcaggccatctgcgtctcgtccggatttgatgcagatattatcgtcattgcaatctatgtcgcaattttcaactaatacatgggtggatgagtcgatatcgatgccatccgtactgggaccgtgtcctccgatattattattgattgttaatccgttgatggtgcaatggtcggaataaagaatctgacatccccagaaaccggtacgcattaaagtgaatccgcttaatgtgatatccgagctgcgttcaacgaggattccccgtacacgtttgcagtcatagtcgacaatccaacgcagtcctttcgcctcatattctttcctcatttcccaatatttatcccaaaatacctttccccgacagtccagtgtcccttctccgctgatagatgcgtttttctcatctatgatattgataactgccgctggccatgtcatttcgattcctgcaactcttgaacggaattccggataatggtgaatttgaggactggccagtaaagtcacacccttgtccaaatggaggtttactccgcttttgataaagagtgcccctgtctggtaatatcccggttggagagtgacggttcccccgccggagacggcacaactgtcgattgctttttgtatagctgttgtactgagtacagtactgtctgctaccgcacctaaagaattggcagatagggctatatgattgataggctcttgccgactaccgacactatcagcccatgataaatcaggctgttgcggaagttctccccattggaagtcttttccggtttgtttggcaggagtgcatgcgataaacagaggtactgctacacatagggcaagtatgtttttatttttcatatactatatcagtttatatacatatcagttaccatccggcttctctatctctgtaaaaggtgaattgttccagtggaaagtatccggattgtccgggtatgccggattgtatgccggatctatttttaggtgcttcgctaggttaggtacggctttcttcattccttcaatcacacattgggctatctgataggcaccgtaaggattaaaatgggtattatcggcaaaatcttgtttttgtcccggataagcccctgccggatagtgtacgaaagcacgctttgacgtttctgttcccaaagcttcataaagcgtacgggtcatttcgttgaggtcgatcaacggaacattttctttagcagccagccagcgcatggcttctggataatcttcgtgtgtgtcacggatatgtccggtggcgtcaaaactccggcgttgggtgggagtgaccagtacgggatatgctccccgcgcacgggcttcatcaataaatgttttcaggctggtcataaaagagtaataagctcctttgcctggtcctttttgcttttggtcgttatgcccgaattccatgaaaagataatctcctttctttatctggctcaatgcttttttcaaacgtcctgcggcaataaacgtattggctgattcccccgattccgcataattggcgatacaaacgtccgtaccgaaaaaatgaggtatcatttgtccccagctggcccatggctcgttgtcctggtcgactacggtactgttaccgcatagaaaaacggtaatcaccgacggatcggcaggcttgatactgatactctggcatacgggtgcatcaccgttaaattccagcgtcagtttatcgtcccagttcagtttggccttttcgcggggtttgattcgtacggattctttctcggaaatgcggggattgcgtttgttgatgataaatgtttcatctacgaattgtcccttttgggtcgcaaggttatcaatgaacagtcggcgtgactcgcctcttactgttgtcactcctgcctgtttcttgtttcccagacgaacggttacttggtagttaccgtccggtacacggacagaaaagaagaagggtgccttactgcctttttccggtgtatcggtaagatcatatccgtatccagtttcttcgctgtaacgcggtgcatccgacagttgaaaagttcggattttctcctgtgcgtttatataaggggctatcagaaacagaagccctatgaaggtagttttcatatcagtctgcttaattaattttcggttttagctcgtccggtgaatctttcgtataagatttcacatctccggctattttagtaaataatgtctgaatctgttcgggacttatgattgtattcgggtggaaagcatccgaattcatataatcaagaatcgctttatgcatctgacgggcaacaatccttttctccggttgggaagtgatgtccatgctggtcattatcagtttgccgttcaatacattagcctcgaacagcattcctattttacggctgataaaccaagtgtctatgctttgaatagtcggttggaactcagcggggaaatgcgtaaactgcataacttgcgctttgttcaatagttcccaccattgcaggttactgtgatattcagtcggaaaatcacggaaaagcgggtgataatcattcagaaaaatacctgtcgtatgtggcgggcgcatcttgaaccaagatgtattccaaaaaacgggtgtgaaatattgcttgacctccctgccgtattttattttcccggctgctgttatcaatacgtttccaccttcctgcaagatggatatcgctttctcgtccaatgtgtccgttgtgtatacgtttccttgtgtaagtttcactttgtcaggatatacccaaaagtcccaatcgttgacaatatcactgttttccaaacgtacttccagattcagtttttggggagtacggatatcgttcagtttcatgtctatgctgcccaacgagaatagattgccgataggaatatcccgtgtactaaccactccgcgagcatatatcttgccgtatttatcttttacgcaatagactgtatttgctttttgcaaagcttcttttccgaagtgggatatttcgatatctgcatggaacgtttcgttattggtgtatgtgaacttggggatacgtgccaatagaacggtcggactgcaaaaacggcggaactctgcggcattaatgtatcctttctcttcaaagaatacatccagcaatcctaccagtgccgttccctgacccgaataatcattgagagctaataattggaatcccgcatagtcgggagtacgcaatgtcttttctatctcatgcttgtaacagatcgcttgcagcttgccggaagccatcataaaatcgtgtcccatacctcccatgtagttatcattcaatatatcccgaaagatttcaaagttcttggctttgtttactccggtatatttacgtatctcgttgaagttcgggaatgcacaccattgtccggtttcatgggaaacatacggctgttttaccgtatcaattcggttacggtagtccgatgtgctttccggctgcgcaccggtccagctgagtccgcgcgcaccggcttttacatgatattggttatggggctgccattgccagctgttgcctacggaagctcctgtatatacgtggcgtgggtcggttgctttccaataatcaacgaatttgcttacccatggcacccagcgtccggaaggctcatttccacacgccaacatgcaataagaggcatagtttccatactgcttggtcaaggcaatcgtttcgtccatcagatacttgtcgataggctggccgttgcccagtctcggaccgtgattaggccagcttggaccttccggctgcaaataaaaaccgacaaggtccgcagcaataaatgcggcttccggcggacagaaagagtggaaacgcatatgattcagcccgtagttgcggcaaatgcggaatacccgttcccatgaagctacatccataggagcgtagccggtaagcggaaaatcacaattctctactgtgccgcgaagcattgttttccgaccgttcacatagaaccatttacctttgatggtaaattcgcgcataccgaattgtacttctttgacttctctctctttgccacaggtcagtgtcgctgtcagtttatagagtgccggatcaaattcgtcccaagtcagaaaaccttctcccatcggtagttccattttgattttgttatctccggaacgtactgagatattctgttgtacagtagggacggaatgttttttatccgagttgaaactttcagcggataattgtaacgttgctttggcagaggctggtgcgtacagactgattcgcactgtggctttccgttctttcaagtccggatatatctgtatgtcgctaaaatgaactttaggagtggtctgtaactctatgcgtcctacgataccattccaattgccctgagtctggtcggtaatactatgagaatccggtcctacgttgatatccttgatacggttatcaatgcggatggtaatccgacaagattttcccggagcaacggcggcagttaggtcataaacgtgcggcacacagaggctattctgcattcctatctcccggttatttacccaaacggtggtttctatatgaggacgttctaaaaataaaatgatcctgtcacctttccaatcggatggtatggttacgtttttctgataccaggccacacctacataatgtttgtccggagtcaggaagaatggtagttttacttgcccttccattctgtatttctccatataaggattaaaatagtaggaactgtcgtataaacttcctgtccattgcgtgtgtacggtcacttcgtcgccttttaacttctcgggcatggaaccgggcagattgatgtggtcttccaatatttttcgaaaccattgctcttttacgcctgtatcttcccggtctatttggaaattccacttaccggatagatcaagagcattgctttgacctgtaacggtcgatatcgaaagaaatgcaagaataatactgcctagaaaatgttttatcatgatacgtaagattgatatattttcgttatcttttaaattctggtgctaaagtagggctttttcgaacttcttgaaatataaagatgtacagaaacataaacaatcgtatcaaaaatgggatgtatagatgtatgtgtacaaaattgtatgaatataccaattaatctatccctttgcttttcggtatctttggaagatacggtatctttgcgaactgaatctattagtcttagaatgaaccatgaaaaatgtaattgtctggatgattttgaccgtctggtctataatgaacgttaccgccggagataccgtttatctcttttcctattttataaataacagtaaagatggcttgcatctggcttatagttatgatggactgacctggacggctttgaatggtggtcgttcctttttaactcctactgtgggcaaagataaattgatgcgcgatcctagtatttgtcaagctcccgacggaacttttcacatggtctggacttctagctggacggaccggattattggttatgcttcttcccgtgacttgattcattggagtgagcaaaaggctattcctgtgatgatgaatgaacctgccgcacataactgctgggctcccgaactgttttatgatgaatcgtcacaaacctattatatcttctgggcaactacgatccccggccgtcataaggaagtgcctaccagtgaaagtgaaaagggactgaaccaccgtatctattatgtaacgactaaggatttcaaatctttctcgaagactgccatgtttttcaatccggatttcagcgttatcgatgctgctattgtgaaagatccaaagaggaacgatctgattatggtagttaagaatgagaactctaatccgccggagaaaaacctgcgtgtgacacgtacggagaatataaggagaggatttccaaccaaagtatcggctcccatcacaggcaactattgggcggaggggcctgctcctctttttataggtgatactctttatgtgtattttgataagtatcgtgaccatcgttatggggctgtccgttccctcgatcatggagaaacgtgggaagacgtttccgatcaagtctcttttccgaaaggaatccgtcatggaacggcctttgcggtggatgcttcagttattcttgatatgatacaataaggtttccatcatttcatcgttgttttcaagggttctcagtgcgaagattaaagattttcagtgcataaaactagtatagtttatgcattcgggtagttgtcaccttataatgggacaatagtcatcttataacgggacaaatggcactttatagaatgacaaatggcactttataaggtgaccatttgtttttgagaagatggaaacttctaagatacaaaaataattagtaaaaagcaatagtcggacatgaaacttggactgtattacggatagattcgacttgttttttctgatccgggttttctgaatttatcaaaatatgtaatagaacggatatgagatgttcttttggcctgtttattccatatatgtcctattcatcccatgttcatttgtacaaaaggcagtattttttatgcttatgtacaatattgtattgttaataactgtattgttctctaagtttgcatcagtttttaggtatataatataaataatgatgcctgattaaaacttaatctaacttttgtttaacttaagtataataaaaatgatacacaatgaaaaacaagcattttctactttagttgcgatgcaaaatgaattttgtcggcaacttcttttcattccatattataatggatttaatcaacaatacatatttataaaaactttaaaatgcatggtatgaagaaaaactatgtaatgattgctattattctgttattcttagcaggatgtagtactgatgttaaggaatctgacatcaaatttgcgggagagacgggggtgaaagtctcttttagtgcagtgatcaataactcaacaggaagtacgttggcaccgactagagcaactgatacccaatgggaagttggagattctatagggatctcttgtggaaataatcaacagaacattcactacaaatacaccggtgatgcaaataatatgtttgtagcgaaaggtggagtagcagaagaaatttgggtgttaggtacacaagaatatgatgtggctgcctattgtccatttgttggtacatccggtatcagtcaaggggtagtgcaggttttgactgatagtgaaaatcaagctacggaagcaaagaggaaataccttgactttctttatgctacagcaaaagcaagtgctactcagccaaatgtgcagttgtcatttaatcacaagatgagccgcctgaaagtggagtttaaagctggtgatggagttgagctttcggatattgattgctatctcatcggtttgaaactcgaaggtacattcaatacaatgacgggggcaacaactgttaacgaaactgcaaagcctactgacatttattggggtaatgtgggagcggtagatgaatataagatgcaggctattttattaccgcaaactgtagataacaaggtgagtattcaagcacgaatggaaggtcgtttgtatgaagtagaatttcccaaattaacgaagttggatatgggcgtttcttataattatacaattacggcaaatatgtcggtggatcaaaaggagtatgtatttagtatcacgaaagagggtacgcaaataaatgattggactacggaagaagaagatattgaagccgaatccaccgcccctgatacaggagctacgacagagaatcctaattggaatgtagaagaaggggagattactgctactgaaaaacaatagtctatcttttaaacctatttatatatacattaattattcaataaaaaagaaatacgaatatgaaaatatatagttatatatcagcacttttaattgcaggtattgcaagtttctcttcttgttcacaagaggaagatgtaaaggaaatgaacggagacaactcttctagtggtttacaaatcagtgtatctgatggtggatattttgatacaactccaggtacacgtgctatagagaaaggatatgctaccgagtttaccgaaggagacgagattggtatttttggagtggacgctaatggaatagtagagaatatcaataatcggaaatgtatgatgacggcagacggtaattggaaaatagacggtgaacaaatcaaatacaacggagctgaattcaaacaaatgaagttttatgcatattatccatacgatgtcaatgtgaaatttaatgttacggagggggatccttttgctgagtatattagtgagtggacacttggtaatgatcaaagcggtgagaaatatacgaaatatgatttgatgacaagttcaagcagtgctgtggtagacaatcgttttaaaggggaaatcaactttaagatgcagcattgtatggctttagctgtattgaagatgcctaacctagtctataactttattaattcggatgtaacgatagatgattatgagttaccgataacgaatgcttctttcaaactgaataataaagaagtaactccgtattatcaaaagagtacaggtgcatatcgttttttggtaaaaccgggagaggagtttaaaatagaaggctcttatacaggagtaaaggaaatgacgtgcactgctactgctaagttaaatgaaggaactgctaaagtgtatacagttagcgatacgaataaaaaagaatatacgttgtcaataggagattattattgtgcagatggttcaattgtaagcaagggggtagatgataaagatattcctaataatgtaattggtattgtatgttatataggtaatcctcagccatctataacgcatccccaaagtggtaataccgaagacaatgatgctctaaaacgcgattatccgaattgtaaacatgggttggtattggcgttaaataatacattagataatacgaataaatttagtagttggagaactgttggtgaagcatattgtgattggtttagcaaagatgaagaatggatgggtaagttcgttgactgtaatacgggtaataatagtgcgactaaagataaatgggtggagcaatatcctgcttttatggggtataacaatacaatgttgttgacgatgtgctatgaagggaaaggacagccaaccatgtgtgatgatgcctacaagcaaattacctcttatcgtgacaatgtatctgttcctgcgaatactactccatggtatcttccatctattgcttgtttggaacaggttgctaaaaatctgagtgcagtgaacagtagcttagggaaagtagaggccgctacacaattggaatcagtcgaagcaagtgcaaaatttggtttttattggagtagtactttgcgaaatggatatacacaatgggtacacgctatgaatggtggaagttataatatagtaaactcgtatggaagtactgctgccggttatttccgtttgatgcttgcattttaaacccatacaatgttttttcaaagtaaataagggcggcgtattttgccgcctcatactcctctatcatgaaaatagaaatatatgaataagaaaaacttaataaaaggaacaactttacctgttgccctgtttttctctttcgccctgataccgactttcggcaatcaaggacaggctgtagctgctgttgacatcgttcagcaacaaggcagtattaagggaactgtggtggacgataaaggcgagccggtgattggggccaatgtccttgttgtaggtacttctgtcggtactattactgatatcgacggtgtgtttaagatcaatgcgaaagcaggggcgaagctgaaaatcacctttatcgggtataccgaacaagtggtagtagcccagaataatatgcgagtggttttatctgaagacgctaccactttacaagaggtggaaatcgtggcgtatggtgtgcagaagaaagtaacgatgacaggtgctgtggcaagtgttaagaccgaagccctgacacgtacttctatcggttctgtatctaatgtattaggaggtcagatggctggtctgactactattcaaacatccggtgaaccgggtgcagatgccgccgaggtttttattcgtggtaaagcgacgtggggagatgcgtctccattaattcaggtagatggtgtggaacgtagcatgaatgatatagatccgaatgaaattgagtctatatctatcttgaaggacgcttctgctactgctgtgttcggtgtacgcggagctaatggtgttattttgataactaccaagcgcggtagagaaggaaaggcacacatctcttttagtacttctgcttctatacaaatgcctactaaaatggtggaaactgccaactcttatgaatatgcaatgttttataatcaaatgatggccaatgatacacctgcgggggaaaaacctgtcaagacattctcggatggagttattcagaaattccgggatggttctgatcctatccgttttccaagtatcaattggattgattatatcatgggagacgctactctgcagagccagcataatctgaatatttccggaggtacggataaggtacgttattttatctcagcaggtgcttatacgcaaggcggacttttcaatgagtttagtttgccttatggtatcagttatcaatatcgccgtttcaattaccgaagtaatttagatatagatgtaacgaaaaccactactatttcgttcaatgtggcaggaaacgttaattcttctgagaagccacgcactagtcaagggtcatccggaatggttaaaaatatctattattctactccgtttaggagtgccggctttgtaaatgataaattggtatatactactactgactcacagtccgatgggttgaacttgccttttgtcggtgatgcagatccattcacttattatgggggtggggcagcacatagtatcaacaactcgttgaacgccgaccttattttgaatcagaaattggattttatcactaaaggactttcattcaaattgaaaggttcatacaatagctcatttaccattaataagaatttgtcgggtggtacggaaatgacttatacaccggtattgcagagtgatggaagtgtaggactacgaccgatagacggtagtaagtatactaatgtgagctatggaattactcggggaaaatcacgtaactggtatatggaagccgcattgaattataatcattcgtttggtgatcataatataggggcattggtgctttataatcagtctaaagaatattatcctaaagaatattcagatgttccgcgaggatatgtcggtttggtaggacgtgtaacttatgactggaaaaaccgttatatggtagaagctaacatgggttataatggttcggagaactttgctgcgggcaatcgttttgctctctttccggcagcttccgtaggatgggtagcgagtgaagaaaagttttgggaatctgtcaaaccggtaataagctttctgaaactacgcgccagtttcggtttagtaggtaacgataaaatcggtggctctcgttttatgtatactgctaatccttatcatgttaatttgaacggatatgtaagtaactctggttatggaactggtaatcttgctcaattacaggctgcctatggatatcttttcggtcagggaggacagacttctactgtgagtttaggagcacatgagtgggcgattaacaatgcgaatgtgacatgggaaaaagcgtttaaacagaactatggtgttgatatcaactttttaaacgatcgtttatctgctacaatagaatactataaggaacaccggtgggacattcttctgcaagacggaacagctccgagtatgttaggttttgctcaacctttctccaatttaggtgaggtaaataactggggatgggaactttcgttgaaatggaacgataagattggaaaagatttccgttattgggcgggtataaacctttcttataatcaaaatgaaatcatcgagcgtaaagaagctcctcaggagtacgactatctgtaccagaaaggacatcgtatcggttcacgtaagcaatatgctttctggcgttattatgatgaacagacaccggcactgtatgaacaaacattccatcgtccgtttcctgctcattcggttgttctgcaagatggggatgctgtgtatgtcgatttgaatggtgatcgaaaaatcgatgaaaatgatatgggctatgattacggatttacggatgatccggaatacatggtaggtatgaatctcggattttcttggaagaatctggaagtgaatacgcaatggaccggtgcatggaatgtgagtcgaatgatttcggatgtattccgtcggccttttttatctagttccggtaatgttgcgggtggtttgcttgcctatcacttgacgaatacatggacaaaagagaatccgtcgcaagatgcgaaatatccacgtgctacatgggagaacgctgataacaactatgcggaatcaactctttacgaacaggattccaaatatttgcgtctcaagacccttactattgcttataattttcagttccctctgatgaagaagttggggatgagtacttgtcagctatcgtttagcggttataatttgtggactcttacaccttatttatggggagacccggaagcaagagctagtaatgcaccttcgtacccattgacaaagacatatacattggggctgaaactgggattctaaaaacagatttaaagattgattattatgaaacaaaaatataaatggtttatcggagcaatgatagcaggagtgcttggtatgggagcgacttcttgcgtagacgagattaaattcggtaacagctttctcgaaaaagcaccgggtggatctgctactcaagatactatatttaatagtgtcacttatacccggcagtttctgaacacctgttatagccgccaatattatggtttaccttacgtaaattcttctgttgacgactttccggattcttctaatccttatacaggaaagtttgatgcattgactgattgttggcaacttcactattcgggaactacaatttataacagttattatagtggtacacatactgctaattacggtgttcgtggggatattttcggatatactcgtgaaggtgtttggcagactgtgcggtggtgctggttactgttggagaacgtagacagagtacctggtatgggagaagatgaaaaagtgcagatgaaagcagaagcaaaatgccttattgctgctcgctattttgatatgttccgccactatggcgggttaccgctcatttattcatcgtttacgggaacagagacaaactaccaatttccgcgcgccacggtggaagaaaccgtgaactatatggataaaatgctggaggaggctattggctccggtggcctgaaatggtcgtatgaaggagctgattttaattccgatggtggtcattggacattagcaggggctatggcattgagatgtaagctatggcagtttgctgcttctcctttgttcaatgatactcaaggatatgccggtggacgtagtgaggcggagcaacaacatttggtgtggtatggaagtaaacgccccgatttgtggaataaatgtcttgaatattgcaggcagtttttcaacgccatagaggcaaatggcttctatgagttgcggaaagcagcaggtgacaatcctactcctactgaatatcggtatgcttaccggatgggatatatccttctggatagtcctgaggtcttgcattccgtacgtgtagcgggctatgaatgtccgggtgggtcctctacttatatatggcgtacttggtgtaataatggacgtaactcttatactcccacccaagagtatgttgaaatgtttccttgggcggatggaacaccttttgactggaataaggcagatacagaaggtaagttgaacgatatgtttttgactggcgagtttgttaatggagaaaatactctttccaatctcatactgactcgtgatccacggttatacgaatctgttattgtgaacaatatacctcgaaatttgggatggtcttctcctaaaatgagtgattacccatgggaattgtgggtgggaggtacagatgcaaagacggctcctgcattggaaaatatgcgttttgctaccggatatgataatatgaaatattatttgagcgatagtgattatgaacgccaacctattcattgggtatatcttcgtttgtctgatctctttttgacgtatgcagaggctttattacaagccgataataatttcacagatgctctttattgggtgaatgaagtacgtaagcgcgttggtttaggtaaactggaagattgcctcccgaataaaaatctgacgagtgataaagatgctttattggaggaaatacttcgcgaacgtgcctgtgaattaggtatggaagacagtcgatattttgacttgattcgttacaaacgtgcagatcgctttgaaaagaaactgcatgggctattaatttatcgcttggatgaggcgggtaaccgtatagagaaaccttggagagatggaacagatgcgtttggtaaaaatgccatgcagcctacgagattcgaatatcagaaatttgaattgcataacagagcacgtgtttggtggacgcagggattcgatccgaaatggtatctgtctccgtttcctcagaatgaaatcaacaaaggatacggtttgattcaaaatcccggctggtgatgagaaacatgagtaaaattgattttagaacagtgatatgaaaaataataaaatgctggtactggctctgttggcatctttgggtatgccgataggagcacagaatatggataataaaggaagagtgtctggagattccgtcactgtagatgtaggggctaaccggacgttcagtcgtcatgaatcgactgcggcagtctctaccgtttataatgaagaatttgataaaagggcgtcaaagaatatctctaactctcttttcggacagggactaggattaacagccttacagaatgcgggtaacttttccagtacggaacctactttttacgtacgtggtttacaaagcctatctagcagttcaccgttagttttggtagacgggttggaacgtgatatgagccttgtgtcaccggaagaggtagaatcggtctctatattgaaagatgccgctgcagtggcgttatatggttataaaggtattaatggagctattctgataacaaccaaacggggaaaatatcattcgagggaaataaagtttacttacgatcatgtaatcaatttccaatcacgtcgtcctgattttgtaaatgcggctacttatgccgaagctgtgaacgaggcacgaggttacgaaggattagacgtacgttatactcctctcgaaattcatgcgttccgttatggaagagtgaagggactaggtgatcgtatcaatgtgcaattgccttatttttatccgaatgtggattggattgatgaaacattccgtgatatgggagtttctaataaatataatattgagtttacaggaggtggcagtaaattccgttactatgctatgttggggttgatgacagacaaagggtttgttgccaatgctaatatgaatgacggttattctacacaagacaaatattctagtgctaacttacgcacaaatttggatattgacttgacgagtactaccaaactcaaattaaatcttctcggctcattgtctgaatcaagtcgtccgggaacctctagtacggatttgtgggatatggtttattcgattccttccgcagcctttcctatactatcagatgatggttcgtggggaggaagttccacttggtcaggtacgatgaatccggtggcgcaatcgcaaggagcagcttatagtaagggacatacacgtagcttgctggcagatttgactttatcccaagatttgtccggattagtgaaggggctaggtgtgagttttcgtttggcgtatgacaactactcttccatctgggaagatcatagcaagacgtatgcttataggggatatatacctagctggcaggattcaagcgccggtggtccgttgtacacagttgttacaggtggaaaacccagtgagatggcaaccggtgccgatacaaacgattgggcgcgtcagttcaatttctccggaggttttgattataatcgttcgttcggcaaacatgatgtttattcgcagttgaaatgggagtatgaatttcgtgacacttatggagtgaataccagtatatatcgtcaaaatatatcgtggtatactcactatggcttcaataagcgttattatgtagatctggcattggtcggatcggcctcaaatctattggctccaggacataaatgggctttctcaccaactgtttctgcagcttgggtgctttcggaagaagactttatgaaagaggtttcttgggttgatcttttaaagttacgtgcttcgtttggtgttattaatgctgattatctaccgaaagacggtgacaactcagtgtataactattgggaacaaatctatacgacaacgggtacacgctatctgtttgatgtcggttatggatccaattttggaactacttacatgaatcggttggctacaataaattcgacacatgagaaagcttataaatataatgtgggggtggatgcgacactgttcaaaggattgaatttgacggtagaaggatattatcaacgtcgaaaagatatttgggtagaccctagcggtcaatactcaacagtacttggtatggattctccttatgaaaatgctggtattgtggatagttggggcactgagttcggtttggattatacgaagcgatggggtgactggactgttaatgccggaggaaactttgcttttaaccggaatgagattaaggaacagagagaagaaccgcgtttatatgataatttgaaacggacaggacaccggttgaatcaagtatatggcttggtagcggaaggaattttcagagatgaagcagagatcgcgagtagcccggcacagaacttcagtacagtagttcccggtgatatcaaatataagaatgtaaatggagatgaagtgattgatgcaaacgatgtgaccgctattggatatagtacggctgctccggaaatttattattctttccatttgggagcagaatggaaggggattggattagatgctatgtttcagggaacaggaaactattctgccgtcttgaatacaaagagtatgttttggccgttgattaacaatacatcactttccacgcactattatgaaaatcgctggactccggagaacttgaatgcaaaatatccgcgtctgagttcgcagagtaatgccaataattatcagactaatacgatctggcttgccgaccgttcattcttgaaattgcgcaatgtggaggtttattataaattccctcaacgtctgatgaagcgaacaaaaatattaggtagtgccaaattgtatgtacggggagtggatttgctttgttttgatcatatcgacgtggcagatccggaatcttacggtgcgacaaatccattgaccaagagtgtggtagtaggtgttaagataggattttaatcattaaaaacgaggtaaagaatgaaactgaataatttgatatatggtgttctgaccatcttcgctttttcttcttgtgcggaccagatggaatattcggaatacaatccttatgatgcgggttatgtaaagcgtactttttatgatgtaggaggattggtatctaacatttaccagtcgctcgactctgatttcggaaattatagtggtgctattcttggttctgctacggatgaatcacaatattcctatacaggtaatgctattgagactttttacaatggggcatggagtccggtaaatgcacaaagcagtatgtggacttcctgttataaagcaattgctaattgtaacaattatctggaggaatttaccggactgacattctcggagtatgaacaaatttctgactatgaagctgaaatgtatcgctataataactatcagtatgaagtccgtttcctgcgggcgtatttctactttaatttggtaagacaatatggggatgtaccatttaccgaccatgtattgtcaaccactgaggtgaatacgctaacacgtaaacctgcccaagaggtattcgactggattattaaagaatgtgacgagataaaagatctgataataccggattataataacctgggggctttggtaccttccggtgaatcggcggaaacagggcgtgccaacaagcgtactgtactagcattgaaagcgcgtacggctctgtatgctgcaagtccgttattcaattctcatcaggaagggagtcaagggtacaaggagttgtggtatcgcgcagccaaggccaataaggaattgatcgagacttgcgaagatgccggtatgagactgatagatgactacgagaatttatgggatgcaaaaagttatagtattgcaatcgatgaactcattttcggttgtcgtgccatacgtgctaccaattcttttgagaaatataattttcctgtcggactggagaactgtcgaggtggaaactgccctacacagacattggtggatgcctatgagttgaaggacagtggtgaaaggcctgataaaaaagcggattatgataaaaataaaccttattacgaaggacgtgatcctcgatttgagaaaactattgctaagaatggtgatacaaaatggccgaattggaatgaaactgcgttggaaacctatcagggaggtgcaaatgcggaacccctgagcggagggacacctacaggttattatttgaaaaaatattgccaaacaagtattaatactacgacagcgaaacctacgacggataatcatacatggattatatatcgtttgggtgagttctacctgaattacgcagaagcgttattcaaatatttaggtactgcttatgctaccaataatgagttccctattcctgccaatgagatggtgagcaaaactcgtcggcgtacaaaggtaaatatgcctaaatttcccgcaggtctggataataagttatggtgggagaaataccagaatgagcgtatggtagagttagcattcgagggacatcgtttttgggatgtgcgccgttggaaggaaggagacaaacatttcagcagtattgatgaaatgaaaatatataagagtggggattcgtattcatataggcgtgttactgtgaatagacaatgggatgataagatgtatttctttcctattccgcaaagtgagaaagcaaagaatcctaatttgacacagaatccggggtggtagaggttaccccggaattgaaaaatgattgtttaatattaaaagcagaatatgaagaagttattatatatactaggactgtttggattattaacatttggagcatgttcggatactgaaccgatagtggatgaggaaccggatttcaataataatattgtggaagaaccattgaaagacttgcctacggagattattacgggaagccgtgcaatgtgggtgagttatgaccctatgtcggatactaatggacataatgcaacaggaatatcttctgcgttagttagttggagaatgttattgacagatccggaagatgtaggtttcgatatttataagtcggaggatgggagcgaagaagttaagttgaatgaagaagcgataacgaagactacttgttgggtggatgagaatattgatcccacaaagactaattattatcgggtgacattggccggtcaagaagaaacattgtgcgactatacgtatacttctgacatggcaacaaaattttatcgggaaattgtactaagaagtgatgtacctgatgcagcattgacgtatgctcctgatgatatacaattgggtgaattggatggagatggagaattggaaatcgtagtcaagagagagccgtatgatggagctaatcaaggaggatggcacaatggaaccactcttttggaggcttacaaaatggatggtacctttttatggcgtatagatttaggactaaacattcgttccggttcacattatacctcttatattttatatgatttcgatggagatggtttgtgtgaaattgcattccgttcatccgaaggtactaaattccctaacggaagaattattactgatgccaatgggttcgtgaatgattatcgtttaagagatacgaacggtgtgggatggtattccggaaaaagtttgtattctactgccggactagtgttggaaggtcctgagtatatttctatctgtcgtggctttgacggttgtgaaattacccgaactcccaatatacctcgtggccgtgaggatgagtcaaaagtagcacgtgcccaatattgggattcttattggggagatgattatggaaatcgtatggaccgtttctttatcggagcagcctatctggatggtatacctgatgagaagactggtgtaagaaaaagcaatccaagcctgattatttctcgaggtatttataaaaactggcaagtatgggcacttgatttgcaaagtaaccagttagtgaatcgttggaaatttgatactgctgatcatagcgaaaaatggttggcaatgtgttcgcacgctttccgtgttgcagatttggatggtgatggaaaagatgagatactgtatggttcggcggcgattgatgataatgggaaagaattatggtgtaccggaaacggacatggtgactgtctgtatgtgggtaaattcattcaaaatcgtagcggattacaaatagttgctagctttgaagaagaggatacttatagcgtgcaggggcttggatatgcttgtcaagtaattgatgcgagggacggcagcctgataaccgggcacggagcgggtaagaatggtgatgtgggacgttgtattgttggcgatgtagatccggacagtccgggatttgagtattattcatctttacagtccggtatgtatagttgtaatggtggtggagttgtttctaccaattacccgacaggtatcggtagcggggtgatgtataatgctgctatctattggagcgggcaaggaacacgggaaatgtatgatcgtgcttgtattgtaagttataaagataatccggatgtaaataaaacgaataagagccgtttagtgtattttggtcattatggtagtaatgatggaaatcatgggaccaaatataatccttgttattacggagatttcttgggagattatcgtgaagaggttatcttaggctctagtgattatcgttctatttatattttctctacaaatcatccgactactcaccgacttcgccatctgatgacagatcataattatgatatgtctcaagctatgcagaatatgggatataatcaaggtactaacctaggatattatgtcggtgcagaaacaatgaaataaaacataaaaaatccctcgatataatgtggctcttacgtatatcgagggatttttatgttttatttcttcaaataatccttcaacggacaattaaccattttcaatccttccgcaatactttcggcattcatgtgtgctccttttaaagaagtatgcgtatggtcgtgattgtaataagcggctgtcttttcgataccttttttttccagtttgtcggcactgattttattcaaatcaataaaataggctccggtagcttctgctgcttcacgtgtccattttccaaaagaatcggtgttgcgttctatctttccgtctttccatttgttgcgtggagtgtggctcaatacgataggtattgctcctttttcctgagcatccatgatgaatttgcgaagataccagccaaaagtatatactacctgatatttgccggtcttttccatcagaaagactttactttcctctccggaaccacgtagttctgcacgggcttttcctgtattgatagctcctgcgtcgttgtgtccgaactgaatgagtacaaaatcaccgggctgcaaagcttcgtatactttatcccaacgtccttcatccaagaaagtgcgggcgctacgtcctgccatagcacagttctcgacggatattttgtcaaggttgaactcatcggctattacgctgccccatccccacataccatttttgtcgttatctttatttttcaccgtgctgtcgccgatggtgaataataccggtcgtccttttttccggctggaaccggtctttgtgtcttgcgagacaggctttaggtaattggcaagttccagtccctcgtaggctcgtataccgtcagcggcagattcggcattgacctttgctccgaatgcactggtatgaatacggtcgatatagaacatatacttcactttgtttttaccgaacttttcaaatttgcgggctgaaatgtcattcagatcaataaaaggtacgttctgttcttctgctatttgctttgcccatagaccgaatgttttattgacacgtttgatgatagtactgtctttatcttcataggcgtaacgtggagtaagggagaacaaaatgggatgtccgcctttggctttgacatcacggatgaaacgacgcatatattctccgtatgtatatacagtttctttcactccggtttctttgattgtcacgttcaggctgtctgtgcctactcccggaatagaggcacgggcacgaccgctgtcataaggaccattgtcgttatggccaagttctatgataacccagtctccgggacgtacccctttgatgacatccggccaaagacggttataaaaagtacggctgctggttcctcccaatgcgtgattctctactgtgatcttgtccggatcgaagtagtcgcccgcataaaatccccatccccattgtccgttgtttccgtttcccaatgtacctgtacgcatggtggagttaccgaccaggaataataccggattatcgcctttccggctggaaccggctatcggtctggctgtacgtgccttgttcagactatccaatgtgttgtcgattacttgattgacatctttcatcggagcaaccactttattttgtgcttgcgcctgcaaactgcctgtgacggctgtcagccaacataaataataaaataacttgtttctcatgatttattttttatagataattggtgcaaaagtacgatgtgttcttcttcttttcaatataaattcattcatatttattcaatattgtgcatagtacagtctgaatgaggttatatcacaatttctatataattacgtacaatattctattttaataaaaagctatggcctgtacctttgtgtgttgtttttttagtacttttgcctgtctaattcattattaatctgaaaatctattatgataaacagacatatcttattcttcatcttatctatcggtcttgtgctgaacatttacggggcgactgaacttcgctctacacaaatgagaacaagtgatggtttgcccaacaattctattcgctatatatatcaggatactaaaggattcttatggctggcaaccttgaatggactgagccgttatgatggtaattcgtttctgacattccgcccgcaagccggagataaagtatcgttgtctgataaccgtatttttgaccttacagaagacaaggatggctttctatggatttctacgacaccggaattgatcagttgctatgacctgcagcgtgcacgtttcgttgattatacaggttgcggagatttgaggcagaactattcgactatattcgtagcgaacaatggtgatgtgtggttatggcattccggaaatggttgtcggagaatcgttcataaggataacggagagatgacatcgactgtgtttaaaacagaacggggcaatatgccggacaatagagtgcggtttgtcagtgagggtgcggatggacggatatggattgggacacagagcggattagtatccgtttctaacggtcagtacaggattgaagaccggttgattcattttgctttttctcagtcctataagaatgatatgtattttctgacggaagagggagatgtctattgctatcaggctactacgcaaaagatgaaaaaatgtgcttctattgcttctattgcgggaaaaacatcacctaccgggaattttctgttgaaggaccaatgggtgatccttactactaccggagtgtatatgtatgatttcagtaccggagaaatagctgcggattcccgcctgaatatcaaacatggcaaattaacaatggacaatcgtggtgattactggatttttaatcacacagggtgtcttacctatatcacagccgatagtggaaaaataaaggaattccggttgattccccaagacaagttgagctatatcgattttgagcgttatcatattgtgcacgattcgcgtggcattatctggatatctacgtatggtaatggtctctttgcctatgatacggctgaggataaattggaacattttctggccaatataaacgataaaagtcatatcgcttcagatttcctgctttatgtgatggaggatcgttccggtggaatctgggtaagttcggagtattccggattatcccatatctctgttttgaacgaaggtacttctcgtatttatccggaatctcccgatttgttcgaccgttcgaataccattcgtatgctgactaagacatccgacggagatatctggtttggtacgcgtaggggaggactgtataccattgactcggattttcattcgaagataacaaatcagtattttcattccaacatttatgccattactgaggataaagaagggaaaatgtggatggggactcgtggaaacggattaaagatagcggattcatggtatgtcaatgatccttcgaatccgactacattatccgctaatgatgtcttttcgatctatcgtgaccggaaagaccggatgtgggtaggtactttcgggggaggacttgatttggctgaaccgactgcggacgggggatataaattcaggcacttttttcaggaaaggttgggcctgcggatggttcgtgtgatagaagaagacgagaacggtatggtttgggtgggaaccagcgagggaatatgcattttccatcctgactcattgattgccgatgccgataattatcatttgttcagctacacgaacggtaaattctgtagtaatgagattaaatgtatctatcgggacgataaggggcgtatgtggattggtacgtcggggtcgggattgaatctttgtgaaccacaagaaaactatgatttgctgaaatatgagaattacggaacagacgaagggttggtaaacgatgttatccaatccattctcggagataaaaacggtgacttatgggtggctaccgagtatggtatttcgaagtttaatccggttactcattcttctgataattattatttctcttcttatactttaggaaatgtatatagtgagaacagtgcttgtgtgggaaaagacggcaagttgctttttggaacaaactatggaatgattgtcattgatccggagaagatacaaaacagtgattctttttctccggttgttttcactaatttgtatgtgaatggaatccagatgaatcccgaaatggaggattcgcctttgcaacagtcactggcttattcggacgagatttctttgaaatattatcaaagctccattctgatagacttctcaacactggactattcggatagcggacgtacgaaatatatgtattggctggagaattatgataaaggatggagtgctccgtcttctcttaatttcgcatcttttaagtatctcaatccgggaacctatctgttgcatgtaaaatcttgcaatggctcgggaatatggaatgaaaatgagactactttgaagattgttgtggttcctccgttttggaagactaattgggcggtattcggttatattctggtattggttatagccctgtatcttgccttccgtattatccataatttcaatagcttacgcaaccgtatcaatatagaaaagcaactgacggaatacaagcttgtgttttttacaaacatatctcatgagttccgtacccctctgacattgattcacggggctttggaaaagatacagcgtgtgactgatattccgcgtgagttggtacatccgttaaagacaatggataagagtactcaacgtatgctgcgccttattaatcagttgcttgagttccggaaaatgcagaataataaactggctctttcccttgaagagacggatgtaatttctttcctctacgagatatttctgagtttcggtgatgtggcggaacaaaaagcgatggattttcgattccagccttccgtcccttcttacaaaatgtttattgataagggcaacttggataaggtgacttataatttgctttccaacgcatttaaatatactccttctaagggtattattatcctgtctgtaaatgtggatgaggtgaagaagattttgcagattcaggtttcagatacgggagtcggtattccgaaagagaagcagaatgagttattcaaacgttttatgcaaagtaatttctccggtgacagtattggagtaggtttgcatttgagccatgaactggtacaggtacataaggggactattgagtatagagataacgaaggtggcggttctgtgtttacggtgtgtattccgacagataagacagtttatgaagagaaagattttctggttgccggtaatgtgctgttgcaagaagcggatagctggaatcaccatttggaacaattgccggaagaactgcccggacaggataaaatgacgactcctttgaataaacggaaaatcttgattattgaggatgataatgatatccgtcaattcctacaggaagagattggcgtgtattttgaggtggaagtggctgccgatggaatttccggattcgaaaaagcgactacgtatgatgcggacttgataatctgtgatgtgctaatgccgggaatgacaggatttgagttgacaaagaagctgaaaacggattttgcaaccagtcatataccgataattttgttgacggcattgaattctgcggaaaaacacttggaaggtattgaggccggcgccgatgcatacattgcgaaacctttcagcatcaaactattgttggcacgggtattccgtttgatagaacagcgtgataaactgaaagagaaattctccagtgagaagggagtgcgcactacgatttgtgctaccgaccgggataaagagtttgccaaaaggttggatattgtgatggagcgtaatctgtcccgaccggagttctctgtggatgagtttgcgcaatttatgaaattggggcggacggtattttatagaaaattacgtggcttgacaggttattcccctaatgaatatctacgtgtagtacgtatgaagaaagctgccgagctattatcgtcggatgaacggttgacggtttcggaagtggcttatcgggtagggattaatagtccgttctatttcagtaaatgttttaaggagcattttggtgtagcgccttctgtgtatcagcgcggagtagacggagatgctgtaccggaggaagagctaccagaagagaaatccggtgaacaagaagaaaatagaccggaaaactaataggaatgaacgattttatatgaattattaaagaagaatgtacaaaagtgcattcttctgttattttagtccattcctatttacggtggatgtgataactttgcaatgtacaagtttaatcaaaaaagtaatatcgaagatgaaattgattgttgcatttatcacactttgctgctgcttgcaggttttgggacaagataagttccctgatggtaaactgattcctgactggttcaggaataatgagagcgtgaatataaattcgctcggtaagcagtataggataacagattatggggtagttaatgacagtgcaaaactacaaaccgaacagatacagaatgtgattgaccgggcggcgaagaatggtgggggagtcattgtaattcctaaagggacttttctaagcggttcgcttttctttaaaccgaagacgcatttgtatcttgaagaaaatgccgtattgaaaggaagtgatgatgcgggtgatttccgaattcagcttacccgcatggaaggacaaacggtaaagtattatacagctttgattaatgcagacggcattgacggttttactatctctggaaaaggtatgctcaatggcaatggtttccgttattggaaagcgttttggttgcgtagggagtggaatccgaactgtacgaatatggatgagcagcgtccccgtatcatttatttgtctaactgcaagaatgttcagatagaaggaatcagtattgccaattctccgttttggactactcattactataaatgcagttacgtgaaactattgaatcttcatataacatctccccgcaagccgatggaggccccgagtacggacgctgttgatctggatgtctgtaacaatgtgttgataaagaattgttatatgtcagtgtgcgatgatgcggtggcattaaagggaggcaaaggtccttgggcggacaaagatgtcaataatggcggcaactatgatattgttattgaagattgccgatatggttattgtcacagtgctttgacctgcgggagtgagtcaatacataaccgcaatgtaatattccgtcgcagtacgatggatcaggcacgtattcttctgcatttaaagatgcgtcccgatactccgcagaaatacgaatatatcttggtggaagatataaaaggaaatgccggagattttatctatgtggcaccgtggactcaattctataatttaggagaccggaaagatatccctatctcatattctaataatattactatgcgtaatatcgatctggattgtactactttcttcaatgtgaaaaagtctgaccaatatcggttgtccgatttttgttttgaggatctggatatccgggcgaagaaaggccagtttgataaggatattgttgaccgttttgtagttaagaatgtaaaggtcaattcgcaagaggtacgctaacggggtggatggaaattcaaaagtaaaacgctgattaacgcaaattatcgcagaaataatgttataagtcgttgattaataactgaaataatacgataatttgcgttaatcctgcgttttttatcaccctccttcttgtttatttaaaataaactttgattgcttctccgaaaggattaaaatcgaatatgaatttatcgccaattttatgaactgccagttttttctttccttgtctggctgtcatctttctgacaccttctttttgaatgaccattgtaagcggttctgtgaaaatctctttatccagatccagttgcggggttatgatgagtcctttcttttgttggcgaatgtccaggcgcgtatgtttctgttcttcggtataagctgccacttctcggaaagtacctacccagatcttatcttccatagcttttactttgtcccaatgatcccataaacgttgtggattcgggaaggcatcgtaaccatacgtcaaaccatgtgtcatacccactccccaatcatttgtggcaattaatgtcgccacccatttttccaagtctcgtggagtggattttcttcctatggaacgttgtttggtccttgttcctacccggttctgtacggcaattcgtttgccttcttcttttttgttattattgggataaaagaaagtacggggcatgacgccggtattggctaatatggcactatcattctttactatatcttcccggatttcctctaagggaaaacgggagaaattcttatgtgcccatccgtgatttgtgatttcatgacctttgtcggacatttcttttaactgtgtccaggtcactcgtgtggtatctgtgatgtgtttgttgtctttgttgactttggcgccattcacacagaaagttccccgaaatccccgtttctccagttggggagcagccaatgtatattgttctgctaatccgtcatcaaaggtataactgatggcacaagctttgtctcctttatatcgggcgacgtaaatgctatctgaactgaaagcatagtttgaaaagagtcctaaagtaaaaaggtaaaaaagaaatttcttcatgatatttgagtttattatattaactatgcaaaagtagggaatatgatttagcatttctatggatatatgtgcggatttcatgaaaaatagtacatgaggaagttgtaagtgtattattttatatgtattcggtagaatttatatagggatagatgattttccggtttatctttgttgggtgaatgataattatatggatcatccgtacaattatttaagaataatactaagaaaacaatctaagatgaaaaattttattctattatcctttttagtactgcaagcagtgttagtctttgcgcaagaacagccgcgtgtatcgcaattatttaattttgactggaagtttcgggccggtgatttgaaagaagctcaattggtaacttatgatgatgatgatgattggcgtgtgctggatttgcctcatgatttccagatagagcaaacgtgggatgagtccgccggaggggcacgtggctttaaagctatggggacaggttggtatcgtaaacattttaaggcaaatcctgcatggaagggtaaacgtgtcttgcttgactttgaaggcattatgcttgttggagatgtttgggtaaatggcaggaaggtagggagtaccgattatggttatcttggttttgaaacggatattactgatttgcttaaatatgatgaggataatgtagtggctgtctgggcctcaacgggcaaaaaagacggatcgcgttggtatacgggcggtggtttgtttcgggatgttcatttggtcatcaagaatcccattgccattgcaagacatggcgtatttgtctcaactcctaaaatcacggagcaaagggcggaagtcagtgtacaagtagagttggaaggaattcgcaataaaagtctggatattgaaatcaatgcccgaatattggctcctgacggaaaaacggttgccggtacgagagggaaggctcctcaaaaatcgaaattacaaacagttgaggtttctcttccgatagtaacggtagacagtcccgggttatggtcttgtgagacccctaatctttatactgctgaagtttctttggtgcaggatggtaaagttattgattgtgtgacggagacattcggcattcgtacgttagagttctctcctgatttcggatttaaactgaacggcaaaaaattgttcctaaaaggtatttccaaccatcatgatttgggagctgtaggagttgccgcttttgacagagctatcgagcggcagtttcagctaatgaagcggttcggttataatcacattcgttcgtctcacaacccttattccgagtcgttcttgaaactggctgataaatatggtattttggtagtggatgagctgattgataaatggagcgacaatagctattggggtggtagagtgcctttcacacaactatggtatcagatgattcccgaatggatcaaacgcgaccgcaatcatccgtctgttatattatggagtttgggaaatgaattgcagatgcgggaagacttagccggatttcctaccggtgattggggtgtcaccacttaccgtatcttcgatgtgcttgtcaaacgttatgataagactcgtaaaacgactgtggctatgtttccggcacgtgccggagctatcggaaagaatgaaccggaatttaacaccaaagtatatcctcccgagctggcaactgtaacagaagtgtcaagtttcaattatcgttatctgaactatgcccaatatctggaaaagtgtccgcacatgaccgtatatcagagcgaagctacaacgaatgagcttgctgctcctttctttggcatggatcatgataagatggtgggactcgcctattggggagctatcgagtattggggggaatcgaacggatggccgaagaaaggctggaacttttctttcttcaatcattgtctggaaccttatccgcaagcctatctgataaagagtgctttctgcgaagagcctttggtgcatatcggagtgatggataatggtaaggaagccattgaatggaatgatattatggtgggaagtttatctttggcttctcattggaactgggcaacgggcagtatgcagaacttatatacatataccaacgctgatgaagtggaattgctggttaatggcaaatctatggggatacgtaagaatgaccggacggatatcacccggcgcaatatcatttattgggaaaacataccatacggtaaaggaggaaatatcatagcagttgcccggaataacggaaaagaggtggcacgtcataggttggaaacgaccggtaaggcgactgctttgaaaatggtggtagagaatccggaggattggaaagcggatgggatggacttacaatatgtaaaggtatatgcggtggataataaaggaagggtagtacctgatactaaagacgaggttacttttaaggtttcgggggctgcaaggctgattgctgtggacaatggggatcattttacagatgagttatttaccggaaatacgaagaagttgcataaaggattcatcatggcgatcttacgttcggaccgttccggtggcgaggtagtaataactgcatcctccaaaggattgaaggatgcagtaaagaagttggttacaaagtagttatcggaatcagtttcacacctccattgaggcctgaaggaaggacttcccaactgtcgtatttattctttttgtagttgagtcctacaaagttgatttctttaaacttgcgccagggaacgttttgtctgtccaattctgcaatacggttagcgggaagattggtcacctcaatctcaatcagattcttgcccggttgcagatatttgccgacctttaaccggaaaggtgcggcccagacagttcccgcttctttaccgttaatgcgtatgcgagcactttcccgcaaatctcccagatcgagaatccaatcatcagcgttcagcgcaggcagaactgtctcaagactgtataaccctgtgcccatattgatttttgcgtttggatggttgatttccgtccatgaagtcgggctatcgatagcgaaagttccttcgatagcgggggtactttgtacaaaacgcaacgtccagtcatggtcgaggctgaggctgacaggttgctcttggatatatttccatgcttgagtctcaaccggatgatcgaatgtttgaataatcacactttcgccggactgtaattgcagatatacttgtaactttccgtcctttatccgggtttgcgcttttcctttttctccggtcatcggatcaaacagcatggctgttggttcattaacactgagagtaatccaattatctactcctttgtcttgcaaagaagagatgaaataatggtgtccggtgctgtgttggcggcggatatattgcagaccaaagttcgtcttcatctcttcaggcattaccttacatttacctaatgtcgcagcataatccgtaccggttatgatatgtccttttccgaatgaactgctaatgctttggttaaaatcgctgatgtcgggaagttgtttttgaacttttgtgaaagcatttctgcgactttccagattaccgaatccgggaacatctttaggataattctccatgaatacaattgttgctccttgttttgccaatgagactagatgtgccaatactttctccggcatatattttacagcgggcacgataattgctttatagttactgcctccttctgtacggagatttcctccctcgtagcgggtattctggaggtacttgtccgaaatatagtctacatcgtaaccattggaggttatctggtggatggtttttataaacttcggagcacgcttggccatttggtggatgtcgaataagagaagccgtcccggttgttcttcccacatatcatataccggaagataaacaaggaagtcattatcaggcttacccatttgcaggaaactctggcaacgggtgatgtattggaaaaaagccggggcgtcacgccagatgctattggtcggtgacatattgatagtggcgtaaaataaccagcccggccattccgcctctttgggagaatagggggtgccgtgaaaaaacatatggttcactccggagacaaacatcagatccatatccggtttacattgagacagtgaagtccggaaatgttccgtcaaccaggtaaacgtctcactggatgtatatggctttcctgtgatatgggcagcggaagaggcatatttcagcattgaaatgtccgaatcgttcttgcgggtaagtgaatcctggcgtaatcctttgatatggaattgggaaagtccgaaaccttcacattccggaatatctacggaggcatatacatcaatcagattggcgggtgaaccatgcccttgattacgcgtgatacttccatgcttatgtgcccatgcagtccattgccgggtaaagttctcaatcagtaagtcggagatcgtctcccggtaatccgttatgatgcgtgtcgttatttccggtcgtttttcatccagaaactcggggaagtaattttctaatttgtatcctcttcggcgggcgaactcttccaatagggcaggtgtccaatcggcttggtacacttcatacgaatcattgaagaatgttttggggtaagtgaccttatctctttgaaaagccctgtcgaatttgtcaagataacgtttaacgcttcccttatccaagtggttcattacataaccttctcctccgggagcggcacgctttactttttgctgtgtctttcctatatataatgcaataattcgccattctcctttgggagctttccatgtgagccggtaatcttttacttttgaggtaatatccagtttctgtccctgtgcattgtaggccataactttattcaactttgcaacctttgcttgtttagggtcttttacctccagattgagaatgttttcttcccctccttctatcttgtattcctgaaatatggctttggtggcagcgtcctccaacgtaacttccggtcctccgaaaggccagccggttccggtattcatatcaatctgcataccgtttctatttgcttctgcctgggtatgctttaacatagccgtccattcgggtgacaggaatttcagttctttgtcgtccattccttgtaccccgtagattggagtcacttccaatgttcccaacccggctttagcatattcatcgatgttgtaagtcagattgggaatatcgactgtgtttcccatccaccaccatctgctgccgggacgcgcttctgtttggactgtcggccaatcttgtgccgctaaggttccgctgacaagcaggagacctatcaatagtgtatttttcttcatgtttttatatatgtatcattagctttgtgaggctgtttcttttcacgttgctaaattacggcattctttccttaaaaaaatgcatatttgtactaatacatagaattatgtacaaatgtacattgtttcgtacgattaatccatctacttttgcggcatgaagtttaattaatcattttgaatacacatgaaaaataatttagtactcttattctttcttgcgttgacggtttctgtcagtgcccaatctttgcccgaccgaaaggaaacgctggaagtcatgaaaaaagtgaacggttactttatgaaaaagtatgccgattacacgattcccagtttttacggccgtgtacgtccgagcaatatctggacacgaggtgtttattatgaaggactgatgtcgctccattctatctatccgcgcgaggattattatgaatatgcttatgattgggcagctttccataaatggggaatgcgtaatggcaacactacccgcaatgccgatgaccattgctgcggacaaacctatatcgatttatataatatctgtccccaaccggagatgattaagaatatcaaactatccattgatatggtggtaaatactccgcaagtcaatgactggtggtggattgacgccgtacagatggcaatgcctatttttgccaaattcggaaaaatgaccggagagcagaaatattatgataagatgtgggatatgtattactatacacgcagccagcatgacgaaacaggtatgttcaatcagaaggatggcttgtggtggcgcgatcaggattttaaccctccttataaggaaccgaacggtgaagactgctattggagtcgtggcaacggatgggtatatgccgctttggtacgtgtgctgaacgaaatcccgtcagacgagctgcatcgtcaggattatataaatgatttccttaccatgagtaaggcattgaagaaatgccagcgtgaagatggtttctggaatgtcagcctgcatgatcctaccaacttcggtggaaaagaaacttccggaacagctctttttgtatatggaatggcttggggagtgcgtaatggcttgttggaccgtagtgaatatctgcccattcttttgaaagcatggaatgctatggtaaaagacgctgttcatccgaacggattcttgggttatgttcaagggacgggtaaagagccgaaagacggacaaccggtgacttataagagtgtgcctgattttgaagattacggtgtaggttgtttcctgcttgccggaacggaagtgtataaactgaaataagcattctttaagtaataaagaaaccaactgtattttattgaaacggttgaaaacaattcatcggaaaagatgcattggctttcaaccgtttttgtatatatgtagaagaaccaggcttttgggggacaggaaaagccgtgaatggataatcctccctgtattaacgtataattttccattatccgattacttgattcccgctatctttgcgataattgagagaacgcgatgaaatgttcaactttaaataattcagatataatgaaaaagattgcattattgctaaatgttttactggttgcaacgatatgtgttgcccaaaagcagacctataagttcgattttagttcggataagaaagtaaaggaggggtatttgaaggttacgcctcagactttgtttaacaatgaacaaggctatgggtatgatttgcaacccgcatgggatggcaaaagtaacaaacctttcttcttttcggtgaatgttcctgatggaaattataaagtgacagtggtcataggcagtaagaatgaaccctccagcactacggtacgtggtgagtcgcgccgtttgtttatagagaacctgtctaccaagaaaggggaattgaaaacagagacgtttacaattaataagcgtaatattaaaatatccgggaaagagagagtacgtatcaaatcccgtgagaagaataaacttaattgggatgataaactgacactggaatttaacggagaatctccccgtttgaactctttaataatagaacctgtggagaacgttccgaccgtttatctttgtggcaattcaacggttgtagactacgacaatgaaccttggggagcttggggacaaatgattccccgtttcttcacggataaagtgtgtatagccaatcatgccgaatccggtttgtccgctaatacttttatcagtggcaaccgtttgaaaaaaatcatgtcccagattaaaaaaggagattatcttctcgttgaattcggtcataatgatcaaaagcagaagcaaccgggaacaggggcttacttttcttttgtctataatctgaaaatatttattgatgaggcccgtgctaagggagccaatccggtgctggtcactcctacttgtcgccgtcgttttgacaaagaaggaaaatctgtaaatacacatggggaatatccggacgctattcgttgggtagcacaaaaggagaatgttcctttgatagagcttaatgggatgacaaccatgctttgtgatgctttaggagttgacggctccatgaaattatatgttcactatccggcaggaacttttcccggacaaacgagagagttcaaggataattctcatttcagcacgtatggcgcttatgagactgcgaagtgtgtggtggaaggaatgaaaaaggcaaaattggatattgtcaattatttgagagcagattataaaggattcaaccctgcccaaccggataaatttgaaaccttcaaatggaatttatgtccatttacggagatagaaaaaccggacggcaattaaaggggaagcaatggatgattaccaagtcatttgcgtacaatcgtccattgtgcacttcgataagtaggcttacatttgcaaaaaacaatcggaaaataataacttaaaaatgaagacatcaatgaaaaacatgtatctggctgtcgctatggcagtatcattggcttttacagcttgtagtgatgatgaatcgggaaaagcggaccgtgcttataatccaatcgagattttgggaactatcaatgatgcgactgatgttcagaatacccgtgctgtcggctcaaactggggagctgacgaccgtatcggagtcactgtggacggaccgacgagtggtaatgcagtcgatacttatatcaatattcagtatcgtaaagacaatggcaatgcattccgtgttgtgaacgaaggttctgtggataacaatatccgtttgaagggtgatggcgcatacacattggcggcgtattatccttatcagggagagaacggtgctttgccgggagaagaaggagtgataacaaagaaaataagcggagcggaacagtctgtcgataaacaacctcagattgacttccttttcgcagaggctaccgaagtatatgcggattctcccgtaacatttaattttacacatcggatggctaaaatcattcttcgtttcgcagcaaagaatggtgctacattgaatgatatgactgtacatctgaaaagtctgcaactggaaggtacatttgatgtgaataccggagaggcggttgctaaagaaggagctactcctgattctgagttgacagtggatgtagccaaaccgtcggaaggggaaatgaatgtttccatcatcctgttcccgcaagaaatgactgaaagtgtgttgttggaagtcagaatgaataatgagacttatactgaatatgttcctgcacaaaatctgttggccggtcatgcatatccttacaatgtgacatttgaaaatcccgccatgactattaagactgctgaaattgccgattgggttgaggaagatgaaaaggatgtgacagcgtcagtgacagagtgaataaagcatgataaggattcaaaaaaagaacggtatgaaaagaaataaattagccctttcttgcttattgatggtaacaggtttcttcggagcgtgtaccgatatggcagaagatgactttcagaataataagtatccggtagaattgatggcggaaaaggcggatatgacctttacccgtgctattggagaaaagacctcttggaatggtggagaggaaatatctctttatgatggcgttacgcagaaattatatgaggtttcggcttccaaggaaatgacagccaagaataacgatcctctttattggtacacaactacggaggaagagactttatttgcctggtatccggcttcggagacattgctgaccggatggactgtaccggaagatcagactactgaagaggcgtacaatcaggcggatttcctttatgcgtatgaaaagatgaaattccgtagcgatcggaaacttactttccgtcatggaacggttaagttgattattaatgtaaaaggagatgacgatacggtatcagagacagatttggaaggtgcggtatttactgtaagaactgtgacaaaagcaactgtttccgaagggaagatcagccctgcagagggtgtggagacttccgtgatgcatccgtttgtatcggaggttagaaaagattatgtcgcttcttatcagatgttgacggttcctcaggatatgtcaggtaaattgttttttcaggtagagttgaaagatgggagaaagtttgcccatacaccgggcaatggtgaaggaattttggaaagcggacaccagtatacatataatgtaggagtaggaaaaccgggactcgtggtggaagtagagaagaattcagcgtcatgggatggtgatgatgaatcagtggaaggaactgatgatgcagagtaatattcaaaactaagaatcggatatgaaacaatataaatttatacaaaagctgttgttggcagtgttggcattgggttgtgcaagctgctcacaggatgaagaaacacaagtaaatcagcaaaatctggttgtattgaatgtggctgatacagggttggtaagtagtgaatcgcagacgcgcacggttgacgacggatttgtgactaccttcacgcagggtgatcaattaggactgttcgcagtgaaggatggtgtgattatggatgaaataaataatatgctgctcacttacaatggttctagttggtcgggtaagccgatattatatgatgaaagcttggaaggcgtagtattttatgcgtattatccttatcaagcagatatgacgggtaaaactgatttgcagggagaggatttctttgctcctcttgtagatagttggaatttgactaatgcacaaagtgaccagaaagagtacgcaaaacaggatttaatgacttcgggtaagacggagctaattggtgaaaatggaaattattcattgagttttcaattatcgcatcgtatgagtctggttgtggtgaagttgccttctacacattatctatttacggatgcagagggaacggtacttccggaagaaactccttatattgcgaaaccgaatccggcgagtatttcgtttgagataggagaggagaaaatattgccttattatgatgcagctaaggatgagtatcgcttgttgagaaaaccgtcgtctgcagaaacgattacagggtattataatggaaagaaatgttcactagtgacagaaggtaaaatggaacaaggcaaatataaacgcttcgttgttgatggtggtcatcaggaaaagaaacatcatttgcaggtgggtgatttttattatgcagatggtaacattgtctctgtgacagatgaaaatcctccggtcaaaggatgtattggtgtggtttattatgtgggaaaaacttttccttctgaattatatgagggtgaatatggagatgtgactaaagatgcattgaaacgtgactatcctgcatgtaatcatgcttttgttgttgctttgactgatggagaagatgaacgtatttattgggagacggaaaagaaaagtatagagtttggtaaatggtttgaaacattatctttgcagagttcttttttcaatgtgcaaatagcagattatggaatttcaagtaagtttgaaaaaatgcttggatataataacataaaggtaatagaaactatagtaaaacaagcacctggatctgaatatattaatattggaagtttacagggatatcgtgataattgtttactacctgaaatgacgacaaactggtttattccttctattcaggaattggctatactttataaaaataaggatatagtgaatcagaagctagaaataatgcagcaaaaggaaatggattttgtacttaatgataaacaactaggttattggtcaagtactgaatttaacaaccaaatgatgtatgcatacaatagtaaagtaacagaaaaaagtatcaaggaagctagagcctataagtctactagaacggcatatcttcgttttacttttgctttttgaatgaattaatataagaaaatgatgaaaaaagtatttgtatcaatagctttagctgctgtagcattaggcagtcaggctcaaatcgttaagaatgacctattgaaaggttataaagaaggtgatgttttggagaaaacagtttataatgataaaagagcgcctatcaacgtagatacttggtgtggtggttttacttctaaaccggttgaaggatcggtaagccctacgataggaaaggcgttgacttatgagggatatagtgaagcggggccatctatcactttgggttttccgcaaggtgtgaaaggctctcgtgtcagcgtatattcattggttgaatccggaaaagtatattctaaaggtacatattatattgcctgtctggcgaatttctctaaagtcggaacaaacttggccgacttcttggctgccagtgccagttatgtaggtggtggaaatcgtggtcaggtatatgtgagacgcgaaggaaatgataaaatcaaatttgcagtaggattgttgaaagaacgtgctgaagctccgatggcttatgattataataaaactcatttattggtcttgaaggtagactatacgaagaatgaagtttcattatttgtagatccggaattgggacagagcgagccaaaagcagatatagtagttactggtgaagaaggtgctttgaaagcaggtctgaagtctgtcgcactcagaaaccgtaatgggtttaaaggaaatatcggtaatttccgctttgccaaagactgggctggtgccataggaaaataaaagaagattcatttcttataagaatggggaaagctgtatgtaaggacagttttccccattcttatttcttcagtgcaacaaaattgtctttattttaagttttatacggggaaaaacaaaaatgtcacatcgcttataatcagatacttaatgatgaaaatgcccctaaattaaagtaagtttacagaaaacataaggtcgttttcgctctttttggaaataaaattgcactttctggataacagtctgttcatcagcctgttacttctatattattctgcttgtttacgattagtctgttgctgttgggcaaccgtgatgatgcacaagtctgacttaatggttacacttgtgtattattgaggttgctcaagtgtaatatcttaattctattaggagactttattagtattacggtatgcaatgattagtttgtgcgggagaagtgcttacctcgtctatatgtttccgataaagcatacggtctttacgttccaaagctaaggggaattgatacaagtaaaccttatataataaagaaaaatataataataaagaaaagtcctccgatccgtagaaccagaccggaggacttttcttatcaaccttttaataaatgaatgccggtattgtatcgtctaattatatcctttattttgttcatatagcccttcttttaccttcatttgcgagtcgggtatcggatagatatatgagtcttttgtaaccaatttatatagttcgtatgtttccggtttgctaatcacgccgttctcgtccgagccattaaacttaaacatttcctgcaatacctctacataacggttttggcgtacgaggtcatgccagcggatgccttcggaagccagttcaagacggcgttgccagtctacaatttcggcaaattcttcgggagtaacatgatcgggtacggttgggacaccggcacgttcgcaaatatcatcgaccaatgattttgctttatcggtaggtcctacaatttcggcatacatcaacattacatcttcaagacggattatcggataattgatagggaaataggtacggtctgcaatctgtgcatcaatatcttcgtaacctagcatcttgcgtttcatcttatgttcaaagaacttctggaagaaaggaccgcccgtataaggcacaccgtcgtcatccacgaaatcatccgtgtaaatcgtgctcggacaacgtatatccaaagacaccccttccgtatccattaatttgaaacgtcctgccagtctggcttcacaccatattctattaccggacatttccagttttgtatacgaatcattcacttgcggaaccgagttgaacaccatcggattaccatagtttttggaagctatgtattgaatttcaaaaatatggtatttgttatcattgtcgctgatccacactttctgccattcgtcacccgtttgtgcccaatatttattattggcgcgggcatagtctatcacctcactgaatagctgttccgccaatgctttcttggattcgtcttgcacgggatatcctgccattgtcagataaacacgtcccagcaacgatttggcagcggctaaggtggcgcgtccggcagaagcattgtttccctgataattcaagggagtgtctaccagctttctcactgcatcttccagatcggggacaattgcggtctcgtaaacatcgacttgttttgactgtttgatggtcattgcttcattcaccgatacaggttccaatacgatggggatatgtccgaagtaacgaaccaggtcgaagtaagccaatgcccggaggaatttggcttcaccgataaactgattctttatcttttcgtcggagaaagtaacaccgtccgttttgctgaggaacatattggcacgcgctacgatttcatacaaatcattccatgcgaaagaattgccgtcataataacttaatc

SEQ ID NO: 11751 - DNA, 43376 bp, Unknown
  gut microbiota DNA sequence
gtggctttggaacagttggagatccatgctccggcagtaattgatttgttgcatcagttgaacgataccggttgttgcgagttcctttgcgaaccttattcacacggtctgtcctcacttgctaacgaggattgtttccgtgaggaggtgattcgccaacgtaataagatgaaacagatgtttggcaaagaaccgaaagtgttccgtaattccagtttgatttactcggacgatattggtggattggtggcttctatgggcttcaaaggaatgttgacggaaggtgctaagcatatattgggatggaagagtccgcattatgtatatcactgcaatcaggctcccagtctcaaacttctgttgagagattttaagttgtcggatgatatcagtttgcgtttctccaactcggattgggcggaatatcctctgtttgccgataagtatatcagttggattgatgcgttgccacaggaagaacaggttatcaatatctttatggagttgagtgcgcttggtatggctcagccgttatcttccaatattcttgaattcctgaaagctttgccggaatgtgcaaaagcgaaaggtattactttctctacaccgaccgaaattgtgacgaaactgaaatctgtatctcagcttgacgttgcctatcctatgtcatgggtggatgaggaaagagataccagttgctggttaggtaatgtcatgcaacgtgaggctttcaacaaattgtatagtgtggcggaacgcgttcatctgagtgatgaccggcgtatcaagcaggactgggattatttgcaggcaagcaacaacttccgtttcatgacgacgaagaatacgggtatctggctgaatcgcggtatttatgactctccttatgatgcgttcacgaactatatgaatatcttggccgatttcatcaaacgggtggatgcattgtatcctgccgatgtggatagcgaagaacttaattctttgctgactacgatcaagaatcagggagatgaaattaccggactagagaagatggttgagaaattgcaggcaaaggtggctaaggaaactgctgctaaaaaaacgactgcaaagtcggcaacaacaaagaaggtcgctgttaaaaagactgaaactgaaccgaaaaagacagccggaagacctaagaaaacgactggaaagtaagaagaggtaaattcttgttatacacaaagccgcggacaggatgcgattccgtccgcggctttgtaatgtgcttttatggggaatactctatggctatacagaaacagcgcaggttgcattaatgcaacctgcgctgtttctgtaagttcttttatagtgttctatttattgaagtttgtagaaataacttcaagttttagtttgtatttatcttgttcatcctcggataaagtgggatctgttgcattagctcccccttttaaacgtgcataaccgggttttaaatcgtgttgtatgctgattacattggacgaagttccataattactgtttgcagaagagtctttagttacaagtaccggaataagtacaaatttgttccagtcttctcctttatctttatcagccagacagttgtttaccatctgcgtgatattgttgaatgtgtatgcggtgagatttcctgtagaagatgaataatcaaacagggatgattttataccatcactcagttcattgtttttgaagaaatcgtctttgtattttttacgtatcaacaggacacttcgcggaacggacattccgaatttcttgtcgcttgttgcttcattgtagataggaatgcttaatttaacggcattcagcgtatcacttccaagtgtgttcgatatttcttcaataggaagtgttacctctgtgaatattcctgcgggactttttaagtaagtacagtcttttcggtcaatgcactcttctattttcgtaccattttccaatttgtttgcttgaataacttcacgtgtggatgtgaaagagcggccggcatatactacggaatccttccctaaggatgtgcgcaatttggcacctgttatactgtctctggcgtgttccagaaatgctacatccatttgtacagcgttaacgtagagaatagtaccgtctccgtaatcgctttcgacatataatccgggaaatatatcttgaaatttcttatacaaatctttcgtacgtccttcttttaataattccttgcccaactcttccgttcttgccttatctaacgtgattttgacataaggagtgtaggttgaaagattacgtatagaatcactgacggataaatcgactgccgtgtaagattttctacctaataaacttgtctctttatcataatagagatcggggtcgatattggtatagtaagcattaggatctttgtaccaatattcattggtaccttccttttttttgtccaattcatacatactcaagcggcaggcagtcaaagaatctccgaagtaactgtcataccaaagataaatattgatctgacagttgccgatagaagtctctccgtctttaatagtagtgtagtttttgtgtacgctttcttctacattgttgaagtctgctatcatctttccagtaccactattgtaatctcctttgaaggcttcagggaaagtcataccttccgggcagttaagctggactaaaaagcctgcttgataagtcccgaatatttcatctgtaaacttacccacatacccgatatttgttttggcataaacttctccaacgggaatagattgggttgttacatcaaatgtcgttagttttccattaatattctggtcacttcccggaaacattcccagtcctaatccggctgtgttatcatcacagttccaaaaagtgattgccagtaaagctattaaggcatattttgctttcatgattgtcgtatcttgaattttttattcttctttgttattgtcggcagcggcttcccatacctgatcgtagaattcattacaggcgtctgcatagttttccggattttggtaatcaagtaccagcttgcctgattggcgggcatattcaataatagattcgtccactttttcactgttttgtattactccatcggaataatcaacagctagtttgcagagagcagcataatctaccggttctttcaaatcacccaagtcttttcttgtgatacctttcaacatcaatttagttgcaaagtcatcgctaagtgtatttttaaagtcgtcttcataaaccgagaatactactttagcgtcacggaaggaaggctcgtctttgtaggctttcttaatataaagaggagccaaagcagtcatccagccgtgacagtgaattacatccggacaccagcgtaacttcttcaccgtttccagtacgccgcgtgcatagaagatagcgcggctgtcgttatcatcatattccacaccgttttcgtctgctgtctgcaaacggttctggaaataatcatcattatcgatgaaatatacctgcatacgtgcagattggatggaagcgacttttataatcaggggatggtcagtatcgtcaataatcagattcataccggaaaggcgaatcacttcgtgcaactggtttctgcgttcattgatgtttccccatttgggcataaaggttctgatttcacggcctttttcttggatcgcctgtggaaggtttctacctatattggccatttcggattctgaaacgtaaggtgtaatctcttgagtaataaataaaactttattcgcctttgtcataataacaatagttctctataatattgtgcaaagatacgaaaaaaaagacacattaaataagatattctttctttatgtggcaaatattagtttattttgcagagtttttgcaaacgagtaaaacataaaccaatagacgaaaatgaaagtagtgcacactatcaaggacttacaggccgaattgtcggcactgaaagtccagggtaaaaaggtaggattggttcctacaatgggtgctttgcatgcgggacacgcatctctggtaaagcgcagcgtaagtgagaatggtgtaactgtagtgagtgtctttgtgaatcccacacagtttaacgataaaaacgatttagagaaatatccgcgtacgttggaggctgattgcagcttgttggaagaatgtggggcagcattggtctttgctccttcggtgagcgagatgtacccggaaccggatacccgtcagttcagttatgctccgttggatactgtgatggaaggagcgttccgtccgggacatttcaatggcgtttgccagattgtcagcaagctgtttgacgcagtgcagccggatagggcttatttcggtgagaaggatttccagcagttggcgattatccgtgagatggttcggcaattaaattattctttggagattgtgggttgcccgatcgtacgtgaagaagacgggttggcattgagtagccgtaacaaacgtttgtctgcagaagaacgtgaaaatgctttaaatatttcccgcacattatttaaaagtcgtaactttgcggccactcatacggtaagtgagacgcaaaagatggtggaagatgcgattgaagctgcaccgggcttgcgtttggagtactttgagattgtagacggaaatacattgcagaagataaatgattgggaaaatacttcttatgcggtagggtgtatcaccgtattctgcggggaagtacgactgattgataacattaaatataaagaataactaaaaagacgaaaccttatgatgattgaagtgttgaagtcgaaaattcattgcgcgcgcgtcacggaagctaatttaaactacatgggtagcatcacgattgatgaggatttgctggacgctgcaaacatgattgcgggtgagaaagtgtatattgccgataacaataacggtgagcgctttgaaacctacattatcaaaggtgaacgcggttcgggcaagatttgtctgaatggtgctgcggcacgtaaggtgcaaccggatgatattgttattatcatgtcttacgcactgatggattttgaagaagccaagtcgtttaaaccgacagttattttcccagatcctgagacaaaccaagtggtaaagtaggaaagtatctttgatatttgaataataaggaaagccccgtctacatcaagtaaacggggctttccttattctatttttattatgctgaagcaagcgtcggcggttagttaccggcatttgcttttagttgctcattcatggcagcagcagccttgcggccgtctcccatggcgagaatgaccgtagctccaccgcgcacgatgtcaccgcctgcataaatcatgggaatggaagattccatattgtcattaacggcaatcgttcctttgcgtcctaattccagccctttgatagaactcggaacaatcgggttgggagatacacctacactgacgatggccagatcgatgtctattgtttctgttgctccgggaatgggtacaggactgcgacgtccggaagcatccggttcacctaattccatcttttgcaggactacctgttttacgcatccctgttcgtcggctatgtattcgatgggattatggagtgtcaggaattctactccctcttctttggcatgttttacctcctcgatacgtgcgggcatttcttcttccgaacggcggtagataatcatggcacgttcggcacccagacgcttggcggtacgaacagaatccatagctgtgtttccgccaccgataaccgctacattcttgccgaaagctaccggagtgtcggattcttcactggctgcgtccatcagattgacacgggtgagatattcgttggaagacatgatgttgatcgagttctctccgggaatattcataaagttcggcagtcccgcaccggaagcgacaaatatacctttgaaaccttctgccttcaaatcctccacgctgattgtttttcctacgatgcagtccttgataaagttaacccccatcttcacaaggttgtctatttctacatctacaatcttgttgggcagacggaattcgggaataccgtatttcaatacaccaccgatttcatgtaatgcctcaaatacagttacatcatagccaaacttagccatatcaccggcaaatgccagtccggcaggtccggaaccgattactgctattttgataccgttcttattagcgatgacaggtactgaaatttgtccgctttcgcgttcgtaatcagcggcaaagcgttccaaataaccgatagcgaccggcttctcattcattttcagatgaatacattttgattcacactgtttctcctgcgggcaaacacgaccgcaaacagccggaagcgcacttgtctctttcaaggttttggctgcttcgaggaactctccgcgctcgatatttttgatgaaacgaggaatatcgatacctaccggacagccttcggtacatcccggattagcacagtcaagacaacgtttggcttctgtaactgcctgttctgccgtcaaaccttgatttacctcttctttgcggctgtgtgaacggtattccgggtcaagttcattcatctctacacgaggaatcgctgtacgctctttgggtttcattgatttgcgcaactcctgtctccaggctgcattacggctgttttcgtctatttctttagtggcttcacattctgactccagcttgtgcatttcttcgcgttcgatattcttgaatgcgcccatacgtttcagcatttcgtcaaaattaacctggtgaccgtcaaattcgggaccgtctacacaaacgaattttgtttttcctcctacggtgatacggcaagcgccgcacatacctgttccgtccaccatgatggtgtttagtgaaacatcggtcggaatctcatattttttggttagcaagcaaacgaatttcatcatgattgcaggaccgatggcgaagcatttatccactttctcgcgtttgataacttcttccacaccttccgtcaccaaacctttgcgaccgtatgaaccgtcgtccgtcatgatgattacttcgtcggaactttcacgcatttctttctccaggatgataaggtctttgttacgtcccgccaatacggtaatcacacgatttccggcagctttcaaagcctgtacgatggggagcatcggagcaacacctacaccaccaccggcacaaactactgttccgaacttctctatgtgtgtagtctgtcccaacggacctactacatccgtaatgtaatcaccctcgttcagctcacaaagacgggttgaagaaagcccgacttcctgtactactaaggtaatagtgcctttctttacgtcagaaccggctatagtcagaggcatacgttctcccttttcgcctacacgcacgatgacgaagtgtccggccttacgagatttagcaatcagaggagcttcaatctcaaatttgaatactttctcagaaaagcgttctttgctaatgattttgttcattatctaattattttgttggttttattacgtaactgctatcagaatgttataaatttcggcaaagatacagcttatttacgaaaaacaaaaagaaaagccactcttttgatgagtggctctttatatacttgctcttttattagtctatcatgtcaaagccgcaatatggaaccagtactttcgggattctgataccttccggagtctggttgttttcgagcaaagcggcaacgatacgggggagtgccaatgccgaaccgttcaatgtatggcaaagctcggttttcttgtccgcgttacggtagcggcatttcaggcggttggcctgataagtatcaaaattggatacggaacttacttccaaccagcgtttctgtgcttccgaatatacttcaaagtcgaagcagagcgcagcggtgaaactcatgtcgccaccgcaaaggcgaagtatgcggtacggaagttccagtttctgcaacaaaccttctacgtggtcaagcatttcctgatgagactgcttagagtgttccggcttgtcgatacggactaattctactttggagaattcgtgcaggcggttcaggccacgcacatctttgccgtatgaacctgcttcgcgacggaaacattgagtgtatgcgcagttcataatcggtagctgtttctcttccagaattacgtcacgatagatgtttgtcacagggacttctgctgtcgggatcagatataaatcgtctacttcgcagtgatacatttgtccttctttgtcgggaagttgtcctgtgccgtaaccggaagcagcgttgacaactgtcggcggcatgatttcggtatatccggacttgcgtgcttcgtccaggaagaagttgataagggcacgttgaagttgtgcgcctttacctttgtatacagggaaacctgcacctgtgatttttacacccagatcgaaatcaatcaggtcgtattttttagccaattcccaatgaggaagcgcatctttaggaagttctgtttccatgccccccatcttttctacgacattgtcttctgctcctacaccttcaggtacactgtcataaggaacattggggatcgtgtagagcacgttctgcatttctgttgcagcttgtgtcatgacagcatccaattctttgttaccttctttcagttcggcaacgcgggcacgtgcagattcagcctcttctttcttgccttctttcatcagttgtccgatagtacgcgaaagcgagttgacctctgccaggtttttatctaattgattttgtgtagtacgtctcttgtcgtttaaagcaatcacttggtcgattgtctcttttgcatttttgaaatgcttcttttccagtccgcggataaccgcctctgtgttttctgtaatttgtttaatggtaagcatatctatacttttaatgaactttcgtttaatggatgcaaagataaagaaaaaacaaagaaccaagcaatgaaaactgacataaaaaagaaaggagatgcaatcacttggattacatctccttctcttgaatattttctgtaatgcaattacgcttcagttgcaggaacaacagaaacatatcttctgtcttctttgcctaccttgaaactaactgtaccatctaccaaagcgaaaagagtgtggtctttacccattccgatgttttcacccggatggaattcagtacctctttgacgaacgatgatgttgcctgctttgcaagcttcgccaccaaatatcttaacgcctaatctcttacttgctgattcgcggccgttcttagaactaccgacaccttttttatgtgccatttcttcttactttttaaattgattaagctactacttctgtgattgttaactcagtgaactgttgacggtgaccgttcaattttctgtaaccttttcttcttttcttgtggaaaacaagtactttgtcacctttaaccaagtttgatacaacctggcaaacaactttagcgccttctacgataggggcacctactgttacgtttccgtctttgtctaccaaaagaactttttcaaattctactgttgaaccgttttctgcaccttcgatgtggtgaacgaacaacttctgaccagcttctgctttaaactgctgaccgttaatttctacaattgcgtacatcttatatataatgtataagttagctccggcgggtggtctttaatcacttagagaactctttgtcgaacccgttgcggaataatcgggcacaaaagtactatttttattcatacccggcaaatatttcttttatttttttgctatcggactaactcttcaagatttctcatgatgattttgtgtggataagcttgcagttcttctgcggtagtcattccgttgagtactccggcaaagtccactccggcgttgcaggcagtctccgcatcaacggtgctgtctccgatgtacaaagtctcttgaggtgcactacccaaatgttccaaagcaaatcgtactccttccggtgaaggtttggcggctttcacatcttctccgcccaccacaatatccagaaaatcttcgggcatatacttttccaaaaagcttactattctaaaacgatatttagtagagataatgccgatacgggcgccttgttttttcagcgctgtcaatgtcgataatgtgtcgggaaaaagacaggtattcacgttcatgtgtatatctgcttcctgcctgtattcctgtcggaaggctgcaagttgtgccgggtcggtcactccggtcagaatgctgaaagattcttcgagtgttttaccgatagtacgtttgatagcttcatcagtgactgtcaaatattggtgacgggtaagtacgattctgaagcatttaacgatgccgcgtgacgaatcggccagggtatagtcgaaatcaaataaataggttttataattcatagaggaactttggggtttgattgttagcggattctgcctccgctaatccaatgtctgttatagtaatcttcacttagcctgctgactattactcctttacttgtgctggcatgaatgaactttccattcttcaggtagatgccgacatgggctacttttcttttagagcggttgctggtaaaaaagagcaggtctccttctttcaggtttcgtttggctatcttgttgctcctgcttttcagggcctccgtgttgcgtggcacttgaatgcggtatactttacgatatatctgataaaccatgccggaacagtcagtacctctctttgagtctccacctccacgatagggagttcctatccaattggccgcttccagatagagcttgtggttatcttccatattgatgtccacccctaataggatagaagcccgtgccaatgcctgataatccagacgtggagcggaggtgcggcaggaactgagcatggcagtcagccctactagaataagtatcagtttgaattttgttttcatcgtttattcttaaatagtaaatttcctcattctttcacattaaaataatcttccagctctttttcggctgaattgtccttgttggttatatcgcggatgattaccccatattccagcagagctattcgaggacatacatctaccgtatgattcaggttatgactggagattatgactgttgcccggtattcttcgttatattttttcagcagatgtttgatgacagactgagaactgggatcgaggaaattgaacggttcatccaatatcaataattgcggatgatgaagcatggcggagatgataccgattttctgtttgttgccggcggagtaattacggatcagtttcttgtgtccgatcacttctccgttcatgaagcgttcgaaagtaaccaggcgttcgtccacctcctccttttttaatccgtacatctttccgatgaagtagaaatattcttcaggagtaagatagtcaatcaaaaaaccgtcatctataaatgcgcctgtaaagcttttccagtcttcgctttggcttacgtcaatgtcattgatcgctactttcccgttgtccgcttttaataggtcgagcattaatcggaaaagtgttgtctttccggcaccgttgtttcctaccaagccgagcatatcaccttgattgatttcatagtgttctatatctaccgcaaccttttcaccgaaattctttctaagtctgtcaatggcaatcatgactttctatgtttatatgggttaatgattcatgaactttttattggcggctgtctctgaaaccttccatattttcatatctccgctccatgaagcgatgatatacattcttgatccataacggagaagtcaggacaaaaccaatcccgattaccaacaggatggtgtaagtaatcgtttcacctaaaaacgtatttaataggctgtataaaataagcgggacaccgaatgctccaaagttgactaacatctgtatcgcactgttggtttggcggcttgttactttttcgttgagggggactgtctgcttattgtaaacagccagttggaaaaaacagaaataaataaagccgatggtatagaaaaaccaggcgaaagcacctaacagagtcagtttgtgcatgatgatggcgggaatcatcaataggaaaggaatgatttcgcctatactataaatgtagtatttagctttaagcaaacttctgattgattctttgcgagacatcaatccgtcgatgtaattaccctcgaatgacattatttgtgataggatgatcattccgaaagcggcaaaattgtaaacgcagataaaggaggtcatgacgttaccgtcatagacactcgaaaaactgagcagggtggagaaggctataattacgatggtgatactgcgcagtgagcccttacaacggcggttgcgtaggagcatttttagttctagtctcatgtactcgccaacttctccgtaacgttcgaagaatttgtattcggaaacatgcttgatccgggtatcatctactttagataattcggcatagataagtccggacataatcttgcggttgatcagccatagaaggatgatgaccagtatcgtgccgagaaaatagaggatgtccccttgaatatatccgtctcccagatccatgaaaaaatagaagagcggactgtcttggggaattaaaagaaggcaccctgttccaccgtaaaaaacgatgggtaacagaatccaccaaatacgttcattgataagtgtccggcaaagcaaataccagtaattgttagcgataatcagaagtaaaatgcctatgagataggtaatgactccaatggtaccaaagaatttggtaatggtgatgaaagaaaaagggacaaataggaataaccagaacaggttgaacagactaagtccggaacggataagaagaaagtcgatgacgcgattccgtttaaccggcagcaggaggtagggctttacctcctgtgtcggtgtcttttggaacggaacacgcaacaggaaatcgagtgccaggataaaaatcaaaactacgccgttcataacgtgatatggttcccgattgggaaccatatctgaaaaaccgaacgcgaacgtcgtaccgaagaatatcaggtaaccggcccagaatgcgcccatgacataaccgagtattttagctactttgttcttttcatacatcggatgccgtttggcggcgagccttccatgtttgcgtaattcgttgaatatcatcattctgttgatatgctagagaattttatttggcttcttccggcatagtcattacaacttgaatttcgttgttctgtttcagcagcctagcgaggaagtcttgtacttcttttgctgtaatgctgttgactatcttttcgtaatcttttgtattgtcgatacctgtatagaagtattcgtccagattattaagccagtaaccgttttctttctgtgcatctttatatttcttcaacatatactctttgatcttctgcatatgttcggcagacggaccttcttttgccatcttgttcaattgttctacgacaacagcagacaatttatctttcttggcagggtctgtttggaatataatctgaagaatgagttcttctttcggatattttccgagacttccgttacagcttactccataagttccaccctctttttcgcggatctctgctgtataaaccatatctagagcctggtcaaggaagctgagcaggatattgttgcgtagatcgtatttgcaagtgccgctatataagaacatgatggtagccatcggagtttcctgtttcttggcaaactcattcttgtattttcccttgcggatatacatcttgttatctttgaaagtctctttgcggttgatagtcggcaggcttcccagatacttggcaatcattggttttattttttccaaatccacatttcctaccaggtagaaagtaaagtcgctggcatctttgtaacggtctttgtacatatcaataatgcggtcatagttgattttgtctaccatgttttctttcatcttgatagcacgcggatgattgttgtataatgcgcttgtaatcgtgtcgctgaaagcactcatcggattggcgtccgcattctgaagttcagctttcagtcggttcttataagattcaaaagcttcattatccttgcgtggagaagtgaatgtcaggtaagtaagctgcatcattgtttcgaaatctttcggagaacagctacctgaaatcgtttctgtcgtattgccgataccagctcctacggatgcgcgtttaccggcaagagccttgcttaaatctactttgctgaagtttccgataccgcctactaaagctactccgttcaattgggcaatatcgatgatttcatcgttcgggaatacactggttccaccgaggcttacacctttcattacaatctgatcagctttgaagtcagtcggtttcacatatacggtcacaccgttggaaagtactaacttggtagacccataaatttctccggctttttcggatacgatttttccacctttaagatcttcggagattaacggttcattagaaactttgtcttcatacggcttcaagtcgaatgacttcatttgtttcaataaagcggtgatttcgtctttagtaggatattttactccttctttttccggaccggccaacagaaccacttgattgttgtctgtgataagttgttgcatcatcttattgatggcttctaccggaatattcggagccatttgcttggtgagcatatactcgaattcaattcccggaatcggttccttatcaaggaagttgtttacatattcgttaacgtatgaaccgctttttgtcttttcacgttcattgtaagcagattctacgccttgcatataattggcacgtgcgcgttcgtattcagtagcggtgaatccgaaacggcgtgcgcgttcagcttcttccaatacggttttcattgccaggtcgataccgtctaccttgcttctcgcatccagactgaatgcttcttttgttttggcaaggaaaaattctccatatcctgcacttgcgttggtgaaaggagggttggctgtctggcgaagttcattcaaacggttgttcaacatagtcatagccatgctgagcatgtattggctagcgtaatagctaattgtattttttaaagaatccggggtagcttcatgtttgaagaagatgtttacagaaggattcttcacctctttatcagttccgatataaataagcggttcctggttgtctgataccggatagtagatacgttcggcaggatttacaggagccttcacatcttcgaatacttttttcaatttggcttccatctcttccgcattgatatcaccgacaatgacgattccctgtaggtccggacgataccatttggcataataatcgcggatggcctgataagggaagttattgattacgtcaatgcttccgatgggcatacagtcagcatatttggaatccggatatagcgtgggctgtgcatctgtcatgatgcggagtataccactgttacggcttctccattcttcacggatcacaccacgctctttgtcgatttccttgtcggcaaggttgatggcatttgaccagtcatgaaggatgagcagacaagagtctactacattggggttttctgtaggaacgttactgatattgtaaacagtctggtccacactggtatatgcgttcaggtttgttccgaatttgataccttttgtttcgcaccaaggcacaatgcccaatccggtttcatcgccgggaaaattctttgttccgttgaatgccatgtgttccaggaaatgggcaagaccacgttgttgcggctcttcaagtattgaacccactttctgtgcgatgtagaattctacacgcttctccggaagtgcgttatggcgaatgtaataagtcagtccgttgtctaacttgccaatacggacatttttgtccacaggcagttgttgcatcggttgtgcaagtacggactggaaattgcagcatatcagaagaactgcaataaataatccacgtaataaatgtttcatgttctatttaatttaaataaatgtttctgagtaatttgtcgcagtgtttgacgtgaaatcacaaattgacagcaaaatagttattttatagcttctcttatgcggaccagcttggtcaacagaccttccaaaaggtccagtctgagcatattggcaccatcacttttggctatggcaggattctcgtgtgtctcgataaatagtccgtccgctcctacggctatacctgctttggcaacggtttctatcagttgcggcataccaccggtaacgccactggtctggttgggttgttgcaaagagtgggtgacatccagaatgaccggatatccgaatgactgcatttcagggataccacgatagtctactactaaatcctggtaaccgaaagtcgtaccgcgttcggtcaacatcacgtttttgttgccaacttccaccactttgtcggcggcaaactgcatagccaaaggagaaaggaactgcccttttttgatgttaattgtctttcctgttttagctgctgcgaccaataagtctgtctgacggcagagaaaagccggtatttggagaatatccacatattcggctgccatttcggcctcgtctgcactatggatatccgttacggtaggaaccccgaacgtgtcgcgtaccttttgtagtatttttagtgccttctcgtcaccgatacccatgaatgagtcaagccgcgaacggttggctttgcggtaagagcctttgaatacgtatggaatttgcaatgtttcggtgatttttactactcgttcggcaatgcgcattgccatctcttctccttctatcacacacggaccggccaataggaaaaagttaccggcaggattgttcttaagttctatcattttgttatttaatgaattacaggttgtcaatcaatattagttcggaataataagcgttgttttttccggaagtactcccacctctaaaggaaagtgcttgggaagcagacggccatctaaatctacggatgcgttttgtgcccgaagtacttttacctttttggtacggtagcttttcactaccttatgatttaagattcttccttgaatcaacatccatagtccggaaataatctgtagaaattccggacgatagattacggaaacgtccaaccatccattgtagggtacggcacttggcgtttgtccccatccccatgcactacccacacatacggtcatgatacgtccgcggatatgctcgtcgttgatgcgtaaatgcattctgtatagttttcgttcgaatatcaaagaaaacagggctgcaacgtatgacaggaactttactccccagaaacgtttggtctggtcggtgatctttacgattcgtgcacccaatccgatattgacggcattgaggaaataacggcgatggtgttctttgccgtcatagaagttgcagtagcctacgtctattttcttcagccgatgattgatgatgcaatccactgccggtttgtattcagtgctgagtccccaatatttagcgaagtcgtttccgattccgttcggaatcaggccaagtgcgatattttctttgtcttcggcgtcggatagcataataccgttgatggcgtcattcaatgctccatcaccgcctacaacgacaatagtacgataaccattgttggctagaatctttgcgagacgttctactgaaccgaaaccttcggattgtacatagtcataatcaacacctttgttgtccatgtactccttgatctctttccagcgcttttttacctttcgggtaccagctttcgggttgtaaatcacaccccatttgttcggttctacactcatattcgtattcctatcctactgtattaaaatctcactttaataaccgacaaagatactaaatctctttcagtttttcttttacaaaagctatcttttcttccattggaagtgtcgcattcacccaatgaatgttaaatcctcttctttccatgcctctgaaccaagtcatttgccgcttggcaaactggtggatggctatttccaaaccgttgaacatctcttcatagctcaacttgcctatgacgtacaatgtcaggtatttgtattccaacccgtaatagatcaaatcatccggtgaaatgccttgttcaatcaaacgtcgtacttcatctaccattccttcttccaaccgttgtttcaatcggcgggtaatcttctcgcgacgtagctcccggtcgatatctactccgataataaggctgttcagtgccggaaactcgcgttcgggaaccggatggatggcgtaatattcctcgatttctatggcgcgaatggcacgctttactgtatccacatcggtagagttatgcaatattttgtagcggcttaatatttctgtcagttcctcaagggaatgattcgccaagcgggtacgcagttccggattttccggtacgggcattagtttgtatcctttcagtatggattccagatacatacctgttcctccacataaaacggggagacggcctttttgtttaattgattcgtaagaaataaggaaatcgcgttgatattcaaatacattatatttatatccgggctcgacaatatcaatcagatgatagggaatcgtatatccgtttattgtatagtcggcaaggtctttccctgtgccaagatccattcccttgtatatctggcgggagtcggcactgataatttctgtgttgagttcataggccaaagcagcagcaaaaggagtcttgcctgatgcggtaggtccgagtatggtgattaaatcatagtccggcatagcttcattctttatatatccgcaaaattacgaaataaatttaacctatcctgtatacaattacttttttatgaagattagagcttgggaaatttgcagaaaagggaggaatacgtattttactttaaagcgaactatatagcgtttgaacaggaatttaaatctgattatatgataaaactatacttcttgtctttttttatttctctgctactatgtttttttattcagtttttattgtcaatctgtcaggataacaattaatccgctgattatcagtgaaaatatagctgacaatagaaactgataataggctgacaataggagatgagacttttattgtcagcctgctttttgtctctttcccaggtgaattgtttgataaatacgtggttatgcgcttttgaaatactggaagaataaggctaagctgacggtaaagtggtgttgaaatgccggtattattcagttagggtgtctttatctttaactctccacgaccgtgacgacttctctccacagccgtggtagcttctcttcacagccgtgagaagatctctccacggccgtggtgaattaacaatgtcggtgttttaatggaacaataccggtatggtagaacaaagataaaggcaccttaacacagtagtgcttgcttgatagggcaaggataccctaatataaaagctattgaggagcttgaactgctatcaattgttgattgtttgaactatccggcatacctttccgtttttatccactccctctatgattatatcttccggtgcggtactgtccggagtataatattcaatggttgcttttccttctgcattcagttgcagtgctggattccaataaatcgtacttcttaaatccgaacgctgcgcatttttcttttcaggagtatcgtaagtgggttgatagaattcgacagaatcgctgtagcctagcggagtgtatgtaataatgcctcgcgcgggtcttgcaggaagatctttgccctctttcagtgtgataacaatggcgcctgccgcaccacgagaacctaatatggcagcgtccgctccacgaagaaggctcagactggacatatcgctagtctgtatcatagtcaggatatcattgtcgtcttcatacacaacgtcatcaataacaatgacgggttgttcgggattgttccggatatgtatctcattgccgtttgtcacactgactcccggaagtctgctgactgcatcgaaggctgtctgtgcaccataattctccaatttatccccttcgatagtgtaagtgttgatacctcctgtgtatatactctccgaaccgggctttttacgacttcccgtgacaagtacttctttcaggttatacaccctcatacctccttccatatagtattggtcacgtgtgttgagcaaatagtcttccataaaggttgctgcttcattacggaaaggtgactttggggaggttgccggatatttaggagtatcgatttctatgtctactccggcaaatccccttttggtacgtgcctgtacgaggaaagttgtactatctttgaatgatgtattcacgataaattctcctttttcgtccgtagtagtggtagcaacaatcttttgtttgggagctaagacgcagataggaccttttttcacattacctccaaagaaccctttgattcgtccactgatcgtttgccccttttctatgtagttggctagattcaaagaaggtggagttactacatttttgatatgatgtctgcgccacccgtgtgtcatcattaagaagtccagggtacgtagagttctgagatcttggtggagaaaataatatccgggattttccacataacctttcagatcggaagtcaggagaaggtttgatacgatattatctgcaagggaatccggccggatacttctccgatcggtaatgctgatagaaaaacttccttctataggattgccgttatgatctttagctgcgatttgcagagataccttttctctttttccgtatgtcggtttgtcgggaaggatttgccactgatgtggattacggtcggggatgaaaaccaaccgctcactaagcgcattgccctgttggtcgataagcataaaatgagtgatgccgacatgaaacagactgtcattcattcttccgaaaggcctgttcgcattgattggttgcagaatagctaatttgccacgagtatgtgctattaagaataacctttcaggccattcggttgtacttgttttctgaatttcataacgtatttcctttttgtggtgcgtcatagagagggtaattccttgctgttcgacagcgggaagattgaatcgcttgctgataccatcaccggatttggcaattacatagtaggaatttccatcacttggatttaaggtgaaaactcccatgccatcgtgctcggaacgaaaaacggtcaaggtgtctccttgtgagttgaacaggaaaccttctatttcttttgacagaccgtccgctccctgcgctttgaaagctatattctggtgggggacagctaataatgcaccgccttccgggaagaatttgatatcaaaatcttttgtgaatgaaggcaggtagaaggttttcttatagatgtattggggatcgtcaaattctactatgatctgtcgggtggcggcaagttttaaatccggcagggaaatagaaataagaccattctcgtctgtcttcctttttcctttgtcttccactttgccattttcgatataacggtaacgaatcgttgtattgttgaacgtttcctgagtattgctggtaaattttattttagcggtgtaatgtgtttcatcttcctgttgatattcaatggtggaaacgattgtattatcaatcgaattaccgatcttcagattgtgagaataaaagaattccggttcttggttaagcatccaattactgtatcctcgcaggtaataatcgcctgcagggagcgtgggaggaagtgagaaggcattatggaatcctaaggaatctctgcggatctttctccgttctatgatcgagtcggaacgattgacaagttctgtaatgatgaagttactttgtgtattatcctgatgtgtgacagcatttaccaaataccctttaaaccatattttctcccctgctccatagaaaggtttatccaggtgcagatatagtttctcctgaggtactttttccaacagattaaaatgggctatgatggtatcttgcatgttttgtgcagatacggttatcgatactgaggaaatacacaacagcattccgatgaggaatgccattgaactttgattgatagaaaacgtagtcttgcttttcatactgtgtgctttacatttacgacttatgtgtccaaatggaaaaaatcttctttctgactgtgagtatattgattacagatacaacgaggaataacagaattcccatactgacggctacccataatgaacctgtttccaattgcgggaaaagtaattggatactgttgaggtaatagccacgtaaccagtaaactagtccgatggataggacaagtacgacaatatttaaacctaccgtgagtaattgataaggcaatgccactctgttgggactataaccgattaataataagctttccaattttgtggtgtttttctgtaataacaagaagatacttagcattaatatatagaatgagagaatgctgataaataaacctactcccaatactattcctacaatgaggcggagaaaataagtggtctttcctgcatctagttttccgtcttctgtttcatatccctttttctggaagtaaccggcaatggaagagtcggcagggttgttgacttctatgattagtcgcgaaggttgtgcctctgcacccggagcgaagttttcattagcccatttcataaatgattgcggcacgagaatggtgttcagacgattggaaaagccgacaatgtttcctttgtattgttctacccgtccgttgcctcgcatcattatgtccatttggataaggctcatcaatccttccgagagcttgggcagattgcggctttgggcaaatccgaaattatacaggttcagataattgcggggaataatgatagggattgtatgagtggattcgtcaaaatgccatttgtcgagtttgatgtcgacaaactcgtcaggaactgattcgaaaaacatatctgtggaaaggtggattcctgcttcctgcattcctaatccggctgataccttgaattgtgaaggagtgaaagctcctattgttttagtaaacggctgttttttcaggtcggtgatgtcttcggctgtgaatgtattgctttttcctgcgaaagaccccagcgtgctgatcttctttgtagctatgatgaaatcttttttcataaagctgtctccttcggtgaataccggaatcacatccttatagaattgcacactaagcaatacaatcatcattccgaataggttggccaagaagaaaccggccagctggccgatactgatatgttggcggaggagtttccagacaagagcagacattttatttacgattttacagattacaattaacggttcgaaagagtgtgatagtattttcttatgagacagccggtcatagttggaagatgtggtcgtaaggtaaatcaatatgcttaccaatggaagttgcgatgactccggctccttgcctttcaacttcggctgtgataatttctcccatgatacggctgttctcattgtccagatggctgatcggctcatccaggaaaagaaaatcgaacggttggcagagtgcacggataaaagcaacgcgttgctgctgtccgaaagatagtttaccgacttttacattgattttatctgcaatacccaactgctcgaagtatgcgagaacttccttcttctttttatatccggtaaggttgtttttcagttgtacgttttcgagagcggtaagttcggtaaagatgcgcaagtcttgaaaaagcatactcaatgaatgttttctcaagtctacccattgtttcacggagtatgctttgatatttgtttcatcgaaattgataatcccttgataatcgtttcgatagccatagatgtaactgcacaacgaggacttaccggtgccggaagctgcttcaatcagatacatttttccttttcggaagaaaagatcctgatgccatatatccgagactatcgaattacggtcagcaaacacttggggaagtgtttgctgtaagtgaatactattcataccgtttgtttacagattatatgccggcaaattgcttggcaaagtcaacgatttgtttaagagcattgacatctttatctttcaggcaaaggtcgatttcgctggtttcaccttctgaactgatagatagataagatactttgttggctaattcaaggtaagtctttacttccttgcctccgaaacctgttatcattttaacaacgggcaggtcgagtatcgcttcggcattgatagccataaatacggttttacccttcatgtcagaagcataaggagtatctttgatggacttgtctactgctttgccgacatttttgtagagtaactcatcattcgtcgcatacatttgtttgtccttgattccatagaatatattcatgctttttgttttgtagacatattcatcttttccaagttccagaatgtcttcacctcttttcagtcccaacgactgcttgttcttataaagagtttcaagcgcatttccatttttgacatcagcgtataccataaaggtcggagcgctgctcatcgtgaaattgataaggcctccggaaacatctccattgaatgaactgaataattctttcacttcgtcggctttggcaatggataccgtgttgcggaattctttattttcgcttagcagattataaagtccttctcctttcactcctatattgcaaaacattagtgtggaagcagggaaatatttgacaaaagtattgttggctttcccgaaagattccatttgctttttcagtaaagcttttacagcgtcgttctcggtatagttctctgtcttgagggcaatcttgcctttctcaaaattcaatcctcccacaagagtaatatcttctggttttacttcggcaggtagccccatgcttacttgattgcggtaattggaaggaatggctgtcatggatgcgaagaaattaatgtcgtttttctgcttttccattttctggaaagctccggattttgcgatactgttctctgctgtctgtttcattagagtaacaatgccttcttgggctttttcggtctgggaagctccgtttacgtcgatgatcatcacagtgaggttattgaatacaagcaaatctccgtttgttgtcgtaaaactgtatccatcggcttcgctcaccggctggcagatctgttcttttgccattacatccaatgaagcatgcaaattgtcttcgttgctcacttttcctacgatagtggggtatgggaaagaagaggaagagaatacatagaccggagattccacgtcaattcccgattcactggggtttttcataatcttctccaattgttggaaagtagcggcgttcattccactcttcagtgcttccaatattttttgtttggcagcttcattttctttatcgtccaatccggctttgcttgcgagggatttgaggttgatagaagcaactaccgaagcatcagccggtatcacatttgtgtactctgatgtcttggagcatgctgccagaaaaacaatcagtactgccagtaccgagagtcgtgaaatcattttctttaccatacttatgttatttaaaagttgtataatcatctattcagtcgattgctgtgttattggttttgaagattcaatatatgacaggctgccaaagcggctgtctccgtacgaagccgtgatttgcccagactgattgggacaaatccttgttcaatggctttctttacttcctcttcgctgaagtctccttcgggacctatcaggacaagcgcgtcttctccgggtttgagaatgtttttcaataaaggtttgtcgccttcatagcaatgtgcgataaacttctgtcctttgaactcacgggtaatgaacttgtcaaaatcggtcatttcattcagcttcggcaatcgtgctttgagtgattgtttgatggccgatatgagaatcttttcgattcgttcggtcttgataaccttacgttccgagaaacggcagttgaggaaggttaattcgtcaaaacctatctcggtggctttttctgcaaaccattcgttacggtccatattctttgttggtgccatgccaatgtgaagatgacaaggccagagcggctcctgaaatacggtttctttgatagccaccagacaacgcttgttggtcgctgccgtaatctctgctttgtagaagttccctttaccatccgtaagggtgatttcatctccgatattcaaccgtaaaacacggatgcaatgttgtgcttcctcatcgggcagttcgttacttttctgtatatcgggagtataaaaaacgtgcataatgttaattactgattattgtttcttgaattaatctggtcccgtatccgggcagccagctcgtagttttcctctttaatggcctgttgcaatgcttcttcatccgatattccctcatcatttatctgtccggaacgagttctttcttctcccgacaggtgcaggcattcttgttcaagaatggattcatagataagaatcgggcaatcagcacgtacagccaatgctatcgcatccgaagtacgtgcgtcgattcgtataatctcgttgtcttttttaagataaatataggagtagaaaataccgtctttggctttataaatcaatacacgtatcaagcttgcccctagtacggtgaggcttgtaatgaataaatcgtgtgtcaacggacggggagttttcactcctttcaggtataaagcggtggcttgggcttctgccggaccgatgatgataggcaattgccgctcaccgtccacttcgcctaacagcatggcaaatgcgcctatctgtgcctgactgtttgtaatatttataacttgtaattctacctttttatccattgttttttcttacttaattagttttgactttctcgctggtgtttgtatttgaatactaaagcaaacaaaacacctataacgagtgcataagctgcaaatatcagccaaatatctgtccactcgcggcttaccagcctgccatcggcatatacggagaatgcgtccaccacagcgccgctggcatatccgccgataatcgctcccaatccgttggtcatcataaagaacagtccttgtgcgctggcacgaatggaagaattggtttcttgttcaacaaacaatgaaccggaaatgttgaagaaatcaaaggccataccgtaaacaatcatagaaaggatgagcatccaaagtccggaacccggatctccgaacccgaacagtccaaaccggaacacccaagcgaacatactgatcagcattacctgtttgattccgaaatgtctcaggaagaaggggatagcgagaatgaataatgtctcggacatttgtgatatggataacaatataaccgaatgtttcactccaaaagagtcggcaaattccggaatgccggcaaaactactcaggaagagatctccataagtgttggtgatctgtagtgcagcccccaagagcatggagaataggaagaaaatagccattttctttcttttgaacaacaccaatgcatccagtccgaaagctgaaagccatgatttgttttcagatttggtaggtcggcaagccggtagggtgaatgaataaaggccgagcaatagcgcggaagcaccacctacataaagctgcgcgctcgaattcttgaaaccggtaaggtctaccgcccacatggcacagataaaaccgatagttccccatacacggataggagggaagtctttgatcagatcgcatttatattgttctaatgcattgtatgaaacagtattggcgagtgatagggtaggcatatataccagcagattaagtaacatcgcccaatacatatgatcgtagtccgttgctgtagaggcgtagaaaaggcaagcggctcctatgatatggcaaagtccgtataaccgttctgcattaaaccatttatcggctatgataccgatgataccgggcattactaaagaagcgattcccatagtggcgaaaatggcaccgatctgtcctccttcgaagtggagttctctgcccatataaccacctaatgatattaaccatgacccccatacaaagaattgcaggaagttcataataatcaaacgaacttttatactcatgactttttaaatttgtgtttctctttctcgttgatagttgataatagatgcaaatataatattttcattggataggtgaactagtaatcggagaaaaaggtacaaaaaaaagaaggctatctatcccaggtagcttattttgctctataactttctgaatatcaaatgcaaactaaggtagctgagtcgaaaaatcgcatattagcctacatgaatacaattaataatcaaattttcgcaaagacggatgtatatagtttacaacttctaaaaggttagaaatgaattatttttgaaaatcccccccctatacagagcaaatttccttccttgccacttctgcaaaaaaactacataatctattaatattgagcatttcatctctatgtaatagttttatggtgaaagtccaatagctgtactatacctcgaaaatagactgtacaatcaaacgtaatcaatcataataacatcacaacttcctgtcgaaagcaggtatgatgtaattggtgatcctaccctagctgacgcaatactggacagaattgtacactctgcacacaagattgaacttactggagattctgtaagaaaaataaatgccaaaaagaagtaacatctgtggtagataattataactaaaactgacccgggttaaaatgcatttttcttttcataaatccaatgttttttttgatggatcaattgggaatataatagtgggtcaacgggctttatattttccagggggcatatctattttgaaggacaaattcatgaagtgacacgctccatcagcggttaccgtaaaccatcaacagccatttattaggaagagtgttccgatgccaatatcagtgtgacacaggtggtaaattactccctgttcggtacttactatctgggtgataagatcagtcataatggggttttctatacctgtcttttggagaatggatacaagttcaacgacatacgtatcccgctagtcaatggctggaaggaaatagaaacgccatcatggcagcccgtggaatatccattatggagcgtggtcgaatatagcggagagttttacacgttgacgacacttgacagctttgacagcaacctcgacccaatagtttccgacaattggggtgccgtcgcagattatgatccggcatacaacacatatgaactttcggatcacgagtatgtagtctacaaaggacgggtgttcagtccagaaacagacgtaaacgcagatattccacaagcaggacaacattttgtgttacatgacccacgtaattctaaccttaagaggcacatggtaagactggctgtttatgaacttacaaaactcatagctcccaataatgtaagtgttgtacggatacgggattatgaggacagcatgaaatggcttaacgatacggtccgcttgcggctcagcccacaaattctccgtaagcttgatgaaatcaaaaagccagttaccgattggcaactggctacattgcagactgactataatccgcatcgcaatccatggtttatatgaaatctttaacattcatgcatcttgcagatgatgctgtggattgtatggaaccatagtcccggatattatttattttcctgcaaggtacagatactgaccctgttccagtcaggttcagagaacatatcccctatgccttgtccttccgcagtaatgcgtgaggcggctatccggtatttcttcgtaagaatggatttgactgactccgcacgggcacgggctattctttcgttcacctcgatacttccttccggtgaagagtatcctttgatcacaaccttggattcaggatgcctgttcatataggaggcaatccgttccacattggggagttgtgagacgtcaaccttggaactaccctggcggaaagttacaatagactccagtgtcttggctttttcaataacagtttcaatgaccggtttcttgttctgacattcagccagctgcttctggagcatgtccgcacggccaactgcttcctctgtctgtttacggctgtccgaaagttggccacgcagactgtttacacttgcattcaggttgtccacctctgtctgattatattcctttacgagggtggcatggtgcctgccggaacttccctttatataataagtaatccctgcgagcagttcaacacgtgcattattggcattgaaacggctcttgtgtcggttaaagtcaccttccatatcatataccaatgatggtttcagactgattgcccacgctttttccttccctatattaaagttgaagtccattcccagccgtgtaccccaggaattatcatcccccgtaccgttgacgtagccatgaagccagcctactccaactacggcttccatttcaaatgtccggggtgttccaggataaccaccgaaaagattcatcatattaaacttgcttaaaagctcaacattcgaagcgtcaaaagccgttttactactgcttgtattgatataccccatgactgaagtccccaggctcagaactggtgttatccgttttgataattcaatgcccatagcagggcgggagttcttccaaaaagagcagtgtgtcatcggagtggtcacgccaccattaattccgacagaccagttgtccgtaaatttaatacctttcaataatgtctgtccatttgcagccagggcagatgctccaagcatacataaaatcaagatgttttttttcatcaattctagtttttaattaaacataggggaattatcccgttttatcagtatatctattcgttttaaaaataaagacaagatatcaattatatccatagtcatttcaaatgtctgaatatagttcctgtattctttatgtattttacacaaaaaggtagcggaacagcatacaagtttccttatcttccagaattttcctctcttttaaattcttgtacaactgctcaacagatttcattcctataccgggtattcggcacagcgcatcaaatccgttatattttataaagcgtaaaagatcctcaagctgatagatattgtattttctaagcgcacgtaacaccctgaaatttatatccaaatttcctaaaggtgtaatcaacaggtctacacattccgacggaatatcctgttcccttacaactatcactacattcttgaaattctgtccgccacactcttgggaatgtgtcaggagtgccgcataattccggcatctgatatatacacggtccaactcttgtttccattcagaataaggtttccattccaaatgaacctgcctgctcgcttttttatacatatatgccagattcctgggggcaacacctgttttcttggaaactgtctgtacatctatcccggtagaaagagagtaaaaaacatcccgcatctgagagtcctttatcacttctgccatttccttgacaacctctctgtagactggtatacagatcttcggcaactccacacaggaaagccctgactgctcacagaccagaccggtatttaaatatttcatagtttctccgttaaaatgtaattataaaaatccgttcatttcttatttttttctctcaatagggtgggaggcatcccgtacattctgcggcaatatgccgtaaaatgggaaggtgaactgaaacctaacctgtcggatatttcctgaaaggaaaactccggatcacaaatcatttccaacatttgttccgcccttttcttctgcatccatttataaggactttccccgaaacaggagtggaacttccggctgaaggagcgttcggaaacatagtataaatcagcgaattccttgacagagttcactttcttatagttttccatgacaaatttctcaaaacgttgtctgatgccggtcgatgcggaaaagaacgctgtcagttctttctttgtataaaagcccttcaacaccaaaagcagttcctgctgcttcagcaaatgcatatgtttacaaagcaaccttgcctccagatacattccgacagaatccagcacttcagcaagaggcttcctgacgggaagaataaaattatcagccgttcggtcctcccctctggcagacaacgagcccaaaaacaatttgtcacatacactcatgttcctgtcccaaaataaaagcatacatttcgaaccggttatagacttcatccgggttcctatgttttgtggaatgaacaccatctggttctgtaaaattcgtaaacctttatatttacccagatcaaaaatcacatcaccttcaatcataaaaagagtacacgacgacttgctattatcaatccggtatacctcatccttctccagttgctgacaagtaaatcctacatccgaattcatctggtaattcagacaggataaatgttcattcagatatagtaatttcatatttcttattttttattacaacaaaaatcaagacatagctgtttttgtgaaaacagacaatttctcaactaaaacagacaaattaaatacacaaaacatatactggtcaatcaatcggtctttgataggtcattgggacataaagagttttggaggttataagaccatgcatttttatgactgactaccatccgatggtataccgattcctaaaacagtattcataaaatatgtctctgagttaccaaacgctcgtgtaaaagtgatatgaaacaaagttctcacaatatttatttcgtgaatatatgactataaaaagacaccaaaatatgatacgttacagaaaaatacaacaagattttttactccgtgcaagcaaaagctcacacggagtatgacttattctggcaaatactttttgtagtcttcctgcacatccggatcaatgaccggacgtacggaataggtcatgcaacgcctgtaaacagcgcttgtattggaagtaggcgcccaaccggcaggacctccagtggaattaagcagataacgccctgcatgagtatcgcttctggcttgtgccacggcgaaaatgacttcattacccccagacttgccatctgtaaaactgccgtcataaatacttccaggcagcggtgtgttaaggccggaacgacttgcataataatatgcgtatctcaaagtcacggcctctttctgtgacataatccggaatccgtaaggagaagggtcaaatacggttttcccgcctacatcctccggactccctgtctgggaaggccggttccatggatacaggaacacccaacggtctttgaaataactaaccagcccatgcgggaaacattcatactgccagaaactttgatgagagacgatagcgtttggatgttcgatgctctgtttcatcgtaagagcagcccctctcgcctgctgagcatctgtttttccataatccacatcatttcctctctgttcccaaaggaaatcaaatagcttgccactgccgtcataaaagtttttattgacacgaacatcatgtgccgggaacgggtctttcctgccccattgatattgcataccaaattccctatatgcatctgcactatactgtgattggaccctttcgtacgctcccaacagatgcgacatcaattgaaccgttttcggaccatcacctccctgactcgcaacatccaagactgtcggatagttgtcaacaatccagatatgccaggaccagagtgtcggattccccttgatcctgccagatttaatttctatcaacacatttcccggagtctgccctggcttgacataaatatatgatcccggaccggaacctccctgttcggacaattcactgagtcccgctttttctatatcattatgtccgccagcctctttaatgtccgtccacacgatattgactctccaatcatcatctgcatccaacttattcaacataaaatcctctttgctaccgggaagtccctgcttaccactcaaaacagcgtcatggtccagaagctttttgtaatactcataggcagtatttacccgggaaacaggaataaagatcccttgctttgctcccgctttaagcatatatgtattcgcttcaggctgtacaattccggaaaccagctccaactcaaattctctttccggaaaaagaccatcaggggaataaatcttgaatttcgccttaccggagtaaagacgcggagacgtcatatcgtcaacagctatgaaaggcacaggttttccagaaagggaaggatccttctcatagaaaagcgtaaagtcttctatcacattaccagcattgttgtcagacaaagccgaaaccaactcaattttgtattcgctgttggctttgacataatattgcttctgtttgccatccatcagatagatactgttattggataccagcaatgactgatgcaggaatttgtcaaaaaaggggatagcattatattctttctgcaagaggctgagtttccccgacgcacttctaccggtttccgcatgtgtgacggtgaaagtataagtggtattgaaattatcgaaatactccgtatttcctgtaatgtcgggagccgtcaccgtgtacttccatattcccccggcaagttgacccgctttctctatcttgaatggattggcggcttcagcatggaatacgggttccaaatcatgcggttctgtctttacatagaaagtaaccctggcacctgcctcttccgccgtaagcgtccgcccgtctttcgttatcaccttatccgcctgcccatagctctcgccatactgattgacctcaataaactccagcggtcggctgcaggcctcgtccgcaaaaatctgtaaggtgacattgatatccttagactgctcaaagccaagaaaccatttcatacgccccgccttcacataagcggctttcaacgtattctgagcatcttccggcttttccggccaccttcgggatgcatccacatgctctgtgaccgtaaaggtcacggttttctcatccgtcggtgcggtcttatccggatccgaaggttttatagaataactgatccatgcaggcagtccctctaccgtaaatccttccggccaggaagtctgcactttcgccgtcaggctgcctccctccctataaaaagtgaaatggtcggcactgacccccagcatatattgcccatcatacaatacatcagacatagtggactcgttccataccacaacattgtacataatgttggcggccggtcctttcctagcatcctcttccgtatcgaatcccggaccacctacagccttgatattcaccagataacggtagttacgcagcaagggaaggtactcgtatgtcgcatcagcctcggctccggtacgtttcaggtagtctatccggaagaaagtttccttgtcaggacggctcttatctgcaccggtcagtccgacaatgatataaggacgtttcaagtaattttccgtattattctcaggaagagtctctccgttggctccttgcgtggcagccgtcggcacattgaccgcctccggaacatatacctcacgtaacaagattttctcatccactatggaagatgttttatcaatctttcctgtcacagccggagcaggatcaggaatagaaggctgtttcgcctttctattggcctcatcccagtaaatcccgttctcgaacggagagacccgtcccgtcgtattggtattataaaaaaatactttagtcagcgttatcccttcaatccctccggctttctcgtcgaatgtagaagccccttccgatatgttgctcaagttaagtcccacatccacacgtgccacggcacggaccagatagacagttccaagtttgggaacggcaccggcactgtgatccaccctgactgggtccgaggcaccccacatcggcaactccccgtctttccatatccccttgtccggcatggagaaagtgaaaagttgcatgacttcctcccgtgtctttccagtcagtccgtctgcgtctgtattagctgaccgggtgacattggccagcatcacgaatgtactggtatcgcctgaaggagtatttttcgccaacaaggtcatggtacccttgtctttcttgtcagccggattaccggaaggaatataggaggtcactttggcctcatatgaaaacttgttgtccttgtcaaacacaagtaccctaatcctctccgctgccgtggaattctccccctccggtgtaagggaccgtgtcaggggatttcgaagcccaagtccttcgacagacatgctgacagacgtccagccttccctgacaggcatttctgtcccgccgtttccatacttatcgaagggatcactgcacccttgcacgagagggattcccatagatatcgccagaaaagcgactatcaaagtgtaatgtttgattctcatatgtatctattctttaaactgtttttcttcgtgatggcatgactgaccataccttagttaccaggggatagccacctccgtatcctcccattcgtccacaactatgtcatattccatatttccgggtcctttcagtgtggcgaagacacggtaaaccgtattacgccggatgttgtaataacccttatcattctcggaaagatccggattatagagttcgatcctatacggcttatcgggggttcccatccgataatcgacggataagaccaaggtcagcgccccctctttccctttcccgtagactcccggagccacatagatgtagctaggtgtcttacccatatatggaagcagtctttctttgcatttggtcacaaaagcggattctccggacccctcgttggcaccgtcatggaaactggctctttccggtaataataggggagtccccgcataatctactcctctcatatccggattacccccaccagttgccgtatattccccggcggaaggcaggacagaataaccgctgacctcattattcagagagagttttgtcactttggaaagaggtaacaaaggagacagataattccccctgtcatcaactgttgtaagtatgaactcaatacgggcatgcatacgttccagaagtatgcagggagaaagggtaatcctattattactaactacattatccggaacatggaagttacactgcccagtcatgggaagatacttccggttttctcctttcagatcgtcagatgtgaaaatttcggtcttttccattaattgcttcggatcaggaattgtatgtccattcctgattttttccaatccggattcacaattaaccaacaaaacaaaattataatcgcctcccatcaactccaggtccaaggctatattggattcgcctgtattcactctacccatctctctcatctcaaaatgctcaatgccggttatacccgccaacgggttggttgttccttgggaataatagaaaataactttttccggagagctctccatattcttaaaagcgaagagaagaacatgtttaacagttttctcatattcctctgcaccgatatagttctctttccactctccggatgaacgtacagacgcctttgtcatctgagaaataccggttcctccattcatttccgccacaatccggatgggaatacccgaaactgacttttctaactcttccgtatcagacgaacatccggtcaattgtacaattgatacacaggccaccatcaacagctttatcacaattccgtatttcattatctatcatttttataataataccaattcctttctaatattacacgaatcattagttttaaaatctgtctgattatcagttttccaattctatggggcgggaaacgacattccaatccagaacggtcgcttgtatcagcatccatgtttccttttcgtacttgagtttcagggttatgggaaaatcatggtcacattccaggctatacggcggttcgcccgcatctccccggaacatgaggatgtcatcaaccagattagcggtataaagaatctccccggttgtcttgtcaatcagagatacgaacgcatttcttccctcttccagtttcatcagcgtgaaatccgctttcaatgccccttcagcgtcatgtatggcttcggtcgcgtattcaaaacgttcacaaagggcgatccggccgttgaaatcatacacaccgttgtcatcttctatcctgatgatgaattcctcgtctatggggaaaggggaacctatggaactgattgtgaagtgtacccggtatgtcaattcctgcatattgaaagccacccgttcatacacgcttcccatatccttccggttctccagtgatatggaggcgagaccgacatacagaggcccgggggctgaggaaatccgtccgtttttcaaccgcagtgacacctgcatttcctgtctggtagtaacgccttcctgaaaatctgaaaaatcataggcctccaggtcactgccaccccatgcgacaaacgtgagtttccccgtatgccgcaatgtggcggacaaagaataatctgccgaaaggactgccttcttgtcagaaaattcgcccaccagcagatcatcatcatcaaagacaaatacccggacttctctgatatctgacggatatccaggaaattgttcgcaaggggtctgtctatagaactggaaataaacaccttgcggacaaccacccaagttatcaaataccgcagaattacatcctataagacagtaaaccagcaacatgataaatgcgatgtaatgtacacttctgattctcatttgatatagtttatgttggggttatttaacagtttgaaaccaaactgtttgttgattggagaaagaagaggaaaaattcctcttccctctcacagctatgtaagaaattgcaggctgaatttatcagcaatctaatattaaaattactccaaaacgacatcacgtgaaacgaggttccattggagcactttagcctcgacacgcatataggtttcttctttctcgatatccggattttctggatttgtcggttcaataggatctgtcggtttcggcagatatggatcttttggatcggaaggatcccatggcatgcccaatccttggaaagccttgattgtcaacagataggtgttgttacggcgtgtgtcagcgttcacaatcgattttccatcagctgtaacagtctgacggttccacaacgcacggtatgcacattttccgttcatgtaagtataagctccttgatccggatttaactggcttttctttgcggcttccttgctagcatagataagaccgtctttttccccccggaaaaatgttgtccctttttgaaaattagtctctttgaccaatttgccgtcttcaagtttccatacttcattcggagtataagtggtatagaccttggcatagggcagacggtagtaaccgaaattcttgtttttagcagtgaatgcatccttttttacggaattttccagaaaataaatgcctgctcctgttttagcttcagaggcgcttgctgcagcatttttagcagcatacataccaagatcatcctgctgtggattgtcttttgacagaagattccccaaacggattaaattttctttagctgaaccttccggttctttggccatctcaaaatcggtatatccatcaatggctgatgcaaagccctcgtaaaggccgtcggcatctccaattgtacgctttcccgcatggttacggaaaagatatgtctttgtggcaccgttgatggcagtatacgtgatgtcggtaagatcaacctttccttttccatccgcggttgtttctttcaatgcagcatccttcgcgaccagtccttgtgccacgacacgctccacatcaaaggagaatacattttgagcctcacttgtacccgttttggctgcgttctcggtgatgccgggagcaatggttttctgctcggctttcgaagtcatgacaaacttgttgtctgtggcaagagcggcaatatcttttactgcggtagctgtactgccatgcgtcttgtccggggctgttgcaatatcggcggaaagggtccccttgttaaacaacagcgccatggattgaggaccgggattcgtcttccatggagcaaccttgaatgtaccggctgtttgcgtttcccaaaacttgcctgtttcatcagctgccgttcctaacgtccatgtttgaggcaggacatttgagagaagctgtaattccgtaagcttactctcttccgttcttcctccataatcttcctgtttgtcattcaccgctctggttgagacatccttcatagaggaaatatacattcctgcaaatgttgttccctcgcccggattgtttacctgagggacatcctcattattacaagctgtcatgcccagacttaaggctgcaactcccgctaaaaataaattgtttgctttcataacttaaactgtttagtaaataaataatttaattattaatacattaaatgcttgctatttatccgttaatcctgtcatggaaagtccagaagttttcattcccgggactccatgtctttttccagtaattcctccgccttccgccagtctcctttcatactatgggcaattgccataggataaacagaacggctgtcactctttactgtgtccaatatcatcagagccttatccgcatccttttcatactttaaaagcgcattggcatagttgagtgccgccagcggatcaagtgcaaactgttcataagccttcttgtatatgtttaccggattttttccctgttcgacatactgttgcgccaacctacacatctcatactggctcaggcatccgggaacggtaataaacatttcctccaattcgtcatccgtataggaacgaacatcaaatcccatgtgaaaaacggtacggcgcaaagtgggataaactgtggaaagcaactccgcataaacctttccctcatctaaagagcgtatagccgcttcacgggccacatccgtatgatgcctcttaatagcggataaaatttcatccttatatgccaaagaagatacatttataatattttccaagcctttccagtcttcacccaccccttctatttcgtatatggaggctttcttgagctgcgggtacttactcagtacataataagaaagcgtatgagtacgacgttccgccaaatgtttattatagctaaactcaccttccggagaagcgtatcccatgatatgtacctcacgaagcctagcccctttgatccgaagccctttggatacaaaatcatccagacgggctaattcttcctgatttttaccaaatccaagaagaagtccatgctgtgcggatttgaaagtgaccttacagtcaaattcttcttcataacattttatctccaccttttccggagtataaaaaatgtatttatagtcttccgggccaaaaaggtctatcccggttaccggtatattcaactggctcacacctttaccgcactcggcacatccatacacctcttcacgaagaaagagatggccggaagccatccaacgttcaaaaggcaatgcttccttgacggagattccaggttccctcaaatctttggaactgcgaatatccttcacaggaagtaatgtacccgggttaccacccagtctttccttacgggcaacaactttgtatcttttctttccggaaatacacaaaggcgagaaagcagtcctgatattgccgtcagaagataccagagaaggatagatataaacaatttcctgtgtcctcaaccgattgatagattctactatattgaaagaaacggtaaacattttcccttccgggctacgtccagttttcacatctgtatattccaaacgaggattcccctttctgacaaccttatcctccacctgtcctaccaccggcaaacagtatacatatcccagcacagagagtattcctatataatattgtattggtttcattgattctgtttttaatgtttatatatgcaaagcatcatttatttaattatatagataatcgaaacggcaagctttgtaggtcccagataatcagctttccccttaccatcctttttcccacaagaagtacatctgaacctgtcatatttaacacgcgcatagcccagtcctaaggatgcctctacactgaatctgctggacagtatccagtggtagcccgtactaatacccccaccgtaaaaatacccctcataacggtaatctttcatttctttggagtggttttgaataataaaaggaatatttatgcctcccacattcatctgccctccatgggcatgaaggccaagaaaccagccattgaatgtttcacaggtccaatatcttatctccggctgtacaagccagtgactccatttctttgttttgtaaccgtttgccgtggcatcattttcataaaaaaagaaattcataccgatttgggtatccaaggtccatttcttccccagagaaaactctacagaaagattgggtgtcagcagggcatcatagacaaggttgttttttagcacaaccttctgtgagaaagactgcaagctgaacagcagaaagaaaaaaaagcatatttttttcatattgtcgctgattgtttttgagataaaaatacttgttttatgatgttaattatgatgctgcaaaattaaaaatgagcaatcgtatttttattatatacattagacatagaattatgtaaaacagtctttttgtttatacaaggtagccagacagatattctttttaatattatcataaattcgaaaagaagttatcattcttatccccatgtccgcatcatcctcaaaaccggcataatagttcagattgaaaaatggttatgctcgccttgtacccaaaagaacagcgtgaactcatttttctgccgtaacagctggagaa

SEQ ID NO: 11752 - DNA, 24394 bp, Unknown
  gut microbiota DNA sequence
aaacaggattcaagtataaaacccgaatcctgaagttttctatttacacaaaattgtggacagtgccccaatctgtatcagaaggaattggacaggctatcggtacgtttgttggtgaggttgccgggcctgctttaaaagcatttaaaggtgagtaacattaagggcggcttatccgcccttttttacggattttacaaaaatccgctattggtaactagatatatattcggtacgtgacaccccctactttgtaggcctcgcagaggtcactacgattgaactaagtgcggcttccgtccgctttaaaatattatattatgaacatatcttgtataaatcctaaagtgatttatcaccctcatagtaggcaactactttctaaataccgttattatacggatggtatgaatacttatcattcttcaattgcacattataaaccctgtgatatttctcatgagacagcagataactataaaatcctcaatccctctactggtgaagtctttcccctttttctcgtcgtacgttgtaatcactgtgtactgtgtcgtaaacgtagagttagtcaatgggcttatcgttgcatctgtgaacagcgtacaagcaaaggccttgatttcttcctcacgttaacttataatcctaaacattatcccgatttaggactgtataaaagagatgtacaattatttatgaaaagattacgtagagatattgaacgaaaagtaggaaaagatattaatttgcgttatatttgttgcggtgaatatggtaagacaaccaaaagaggacactatcaccttaatttattcaacattcctaaagagtatgctaataatacgcattctatgttaaaacgtattgaacgtaattggtccatacctacaggaaaatataatttggatggttctcctattgttgagcctttaggatttgcttactgcttacccctgtccaaaggtggtatagagtatatattaaaatacatgttaaaacctcaaactattacagaagatggaaaagaacaaccttttttcacttattcgcaaggtattgggcgagattttattaagtctgctgtacctttgtataataatactattgacttctccaatttggtgtttcattctgtttctgatgttcgaagaatccctatagaagaatcttgctatgatgtattacgtggtaaatctgtgactcgatttcatacggattatactaaaagctatcattatccgtgtgaaagtcgcttattgactccatttttccgaaagtattacaagcttgctttgtccgctttcaattatgcccgtgacatgtataataacctgccacaacagaactattttgtaccttttacacttccaaaagaatttattcaagtaactaaaaccttaaacacttttcatttatatgactcaaactactatgataaggaacatttagctcaagaacatttctttagattcaatccttttttaactcctgatgcagctcgttcacgttatgataaaatctatgaagtaggattaatgtatatgcgtaatatgttattagagtatgacaaatttgccaatcatttaaacgaaagattgctaaaggtaaaggaacaaagacaaattattctgaatgcccgtttatcagaactaactccccttaatcttgatgcacttgtagaacaacaaaataaaatcattcgtaattatgacagaaaagatatcttctaaaagtactcaatatatggcaaatctaattatgatatttgacaatttcggtgaatctcaaagtttaacgttgaatcttggtatattttcttctcctactgctgccgaaaactatcgtaaacgtatccagagtaataatacaactattacaactgtattagaagtatttcctattcgttagtattcattaatatttttttcttcttttttattgtatataatattgattattcctccaatatagtttctttttttgcttctgttcgatcatccgttaataacaagcaatggcgtatcggaatgaaatatcatctttctggcaatactaggattaaataatcgagcaaatatatttcttttatatgaagtcaatgtaattatatctatttggttatccttgatatattggtcaagccctttcaataaattattattcatcacaacgtcataatggatttctagacctgggtattgtttatggaaatattcttttattcctgcaagttttatttcattccacgtatctttagattccgtaagatgtatcaaaaagacagaaaaatggaacgatttccaagtgttaaagaatgcctcaaaagctattaaatctctttgatcaaaattagttataaaagcaatccgtttgacttcactaaattgtttaaatggagtattttctggaatagctaatactggaacacggcttctatcaatgacctcagcggttacactaccgatcaaatcaatatctttttggttttttccacgagttcccatgatgataacaataggacgttcttcctttgcatatctgagaatctcttcttcaggaatgccttctcgtaaaatacaactatatttgatatccggaaattcccctgaaactattttttcttttattttagctgataaggtgttgagatcagaatgaactctatgaataatagtttttacagtctcttcatctccaacttggtaattgaagacatcaccatacggcaatgaggacgcatatattggtgtaaaataaacgtgtaataagataacttctgcgttctcagtttttgctaagttaaaagcaaattcacatgctttcatcgagtaattagagaaatcgacaggaattaaaatcttatttgatttattctctgttttaggttccttctctcccactatactttcagataaccaagtagaactttcagttatttttagtgcacgtggtaaatcactttctttgattcgtaaacgaacccccgaagaaacgactggttgtatttgattaacattatgaatgtatgtttcaataccttcattttcgaggacattctttaatatctgagcttttgtatatgtcagaatggctagagttactaatttatcttccataaatgtatattttataaggtgaacaaataagaaatcccaattgttttattcaattgggattcggtttgttatattttaaacttgcacagattcggtagcctgttctttttgcatactcagatttaattcatctaaaatttttaaagcccgatcaagaacggtcgtatcatctatcattacaagcccaccatccggaccgggctcaagatgtattccgacactttttccctccttgaaattatgacctccgaagaagtttcgcacggtatctacgtgtaaaccaagttcgtctgctattctatgcatgctaccgctgggcaatgaatctttaatcttacgaagttcattaaatgttattgttctcatgtctcgtaaatttaatggttaatactatgtgatctttatcacgctataaacttaagcaaaaaaaaagataaaacaaattatttgcttatctttttttcttaatttataaaatctattattcttgtttatatagcttcaatggcagaagctggtacccatccaacttttccatcttctaatcgaatttctttccattctttcatcgaattatctttaatacttacttttctcccttcatgaagaataaataagctagtaccactttcgcttggagtactacgaacagtaacacttggattcatcactattgcttcgtttctgattactaaatgctctttttgttcagaagcaaacagattggcacatatagtaatgattaaaaagatgattcctgagatgaatccagtttttttccataatatctgctttgaaaagacgaatgaatagagagctacaattaataaaatgaaagagataattcctaatgtagcccaagcatctacgctcatactatttatcaacgacttgatccatgaaacaaaaaagacctcaggaatagcttccaccttgtctattgtttttgcacgagctacttcaaggttagcccgaatatcactattgccgggttgtagcagtaaggcacgttcgtaattaagaacagctttggctatttctcctatcttatagtagctatttcctaaattatagtacacttcagccgcttctccatttttgagcagtgcttcgtagatttgaatggctgcggtataatcttcttttatatatgcagaatctccttccgtttttgtaacattggccaatgtgttattggaaaacatagtggtacttgctgcatggatggaatccccttcattcacttgcttggaatcaacattcaatgaatcctgcccaaaacaagtgattgatattaacgttaatataaaaaataatatttttttcatgacataatctcttctaggttaatgtttaattgaattctccattttgcttattacctctattgaagatgaataaaccttgtccatagcttgattttcgtctcccggagcgaaacgggcaaattcacaatcatttagtgcatttaagaaatccttgattaattcctcgcttactccgtgatttctcaatttttcttctatattgtccttggacaaacgagatacaggaatatttaatttgtcactaatatatccccataaagctttcaatacttcatcataaaaagcatcttttttattttcagaaagcagttttcctgctaatttcatacgtttggtagccactttgttggcttttttggttcgtactttagcgacattcgcattttcagcagcttgcttgcgatagatgataaagaatattataaaggcaagagccggaataatatagaaaagccaataagacatggagccgtagaagaaacttcctttaggttggaaagttacttcattctgtttgatgtaacgaatatctttacctaatacttttaagtcttccttgttggtaaagttcgcaattacctggtcggcatttcctgcacctttttcaatattcactacatattcttccgttttcagagttttgtatgatttggaacgaatgtcaaaatagctaaaagatacccctggaatcttatatgtgccggcatgtctagggatagctaaatattcaattactctgttacctgtaagtccttcccgagttaatctaacttgattgtctactttaggatcatatacttcaaaatcttccgggaattttatttccggattagaaattaacttcaaatttcctgtaccggaaatcactaacttaatagtgatagcatcattggtttttaattctttactattgatagaagaagaaactgtaaactctcctactccccctgagaaatcagccggtttaccagccggaagcggacttacatttattgctatcttaggggtagcaatagattttttaatttctataacgttacttcctccattaaagaatgcatcaaaagggtcatccgattgtactggtttgcctatagtcatttggaattgtgccggatctatgtacaattttccggattgttgagggaatagcacgaactgacgatagacagttgtataataattacgtccacgataatgttccggagtccatctggcatttgttgtcatttcaatctcttgtgaatgaaaacctttgaaatcgggtaactttgcattattcaattgcaaattagactctctggtataaattttataagtcaagacaaatgcctcctgctcaaatacattcgttttactagccgtcgcagtaataaatagatcttgatcggatacactcgtaccggaagaggaatgggcggaagaacctccttgtccaccattgctgttctggtcttgtggtaaaaccttgatttttacggagtttgataccatttggttaccatcggccacaattgaagcaccgccaattgtgtattcaccggcagtattggccatcaatatatacgtaaatgtaatactactcgtagatgttacgttgccatttacaatctgagtactactttgttgtgaacggcttggtcccatcaacacatcaaatcctttgattgatggggctcggaaatcttttactttttgtgtagttacggtataagatagtctgaattgatcgcctactactactgcgtcaggagcagaagcagtaaaagacactttatcggcaaatgcctgagtgctatatgctatcaatgctatcaatatgataatcagtttcttcattgcttatgaaatttatatcgtcaactttatattaccaatctttttccaaacgaccaccttgcataacctgctgttgcttctttactttatcctgtacgtctttctcatcttgcatcacagaattaagcaattgttcagcgttttcttttgacatctgattcttttgtttctcagattttggaggttgttgttgatccttcttttggtcttgcttctgatcgttctgtttatctttgttctggtcttgcttttgatcttgcttttgctgatctttattttgatcctgattttgatcctgattctgtttattttgttgttggtctttcaacattttttgtgcaagagccaaattataccgggtctcatcgtcagcaggattattacgtaaagacatcttataagcatccacagcctttgcataatctttactggcttgaagaagtacgcccatgttatgatatatttgagccaacttcatcttatccttctcaatattgctggccgatacatattgttccatagcttcctgcattttctgttgttgtgagagtgtattccctaaattatacatagatactgtagatttaggattcacctccaaagctttccgataattcacttcggcatccacaaacacactgtcattaaacaggcgatttcctttgcggatatagtcacgttctgctttctgagccgatacaaaggcggctgacagcagaaacacagcgaatagaatatatttactttttaacatgcgcataactacttcttattagaaaacagatgaacgttcttaaataaaggattcttgcgatctaaaattaatatttccgctaataacaataatagaataatccaggcaatagcttggaactgttcattaaactccgtatataccttagattccacatcagattttgccatcttattgacttcctgattgattgctttttgagctgagttagaattatctactcgtacatagataccttttccttctttggcaatctcctgacacattgtttcatttaagcgggtaacaatcacattaccctcacggtcacgccgataatcgttggtaccttctgctgggataggagcaccatcgggcatacctactcccaacacattaacttggatacctttttcagcagcagcttttgccgcttcaacagcaccaccttcatgattttcaccgtcagtaattacgataatggcgcgtcctactccttcttgtggagtaaagctacgtgcagccaaattaatcgcttctccaatagccgtaccttgcttggatatcaatgaaggattgatagattccagaaacattttagcggaaatgtaatcactggtaatcggtagttgagtgaaagcgtcaccggcaaatacaatcattcccactttatcattgtcaagttcatccaccaatctggatatcagtcttttggctttctccaaacggctgggttgtacatcctgagcgagcatagaatttgaaatatccagtgcaatgatgacttccacgcctttacgttttactgtttccagtttggaaccaaactgaggacgtgctaataatactgaaaacaaaccgatagcggcaaaaagtatccagaattttacatccgggcgatatttggatacatcgggcattaactgcgccaataaaaccggatctccaaaacgtcggatattctttcttctcttgtagttggaatacaagtagaaagctgctaaaaatggtaatagcagcaataggtataaatatgtaggttctccaaatcgaaacatctttcttaactattttacgattgactaatttacggttgaccaccttatggaatcttcttcagtatggaattacgcaataatacctccaatagaacacaaaggaaagcagctagtgcgaaccaatgatattcctcatcccgtttgctatactcttttacattcagcttagtcttttccagcttatcaatttcttcgtacacctctttcagtttcgaattacttgtagcccggaagtaattaccgtccgtagtacctgcaatttgcgtcaatgttttctcatcaatttcaacaggcatactaacatattgtacagtatttcctaccggataaggataaggcgccattccattcgtaccaaccccgatggtatacacacgaattccaaagctttttgctatttcagcagctgtcataggagaaatatcacctttattgttagtaccgtctgtcagcaaaataatgactttagattttgctttactgtctttcagtcgagttacagcatttgctattcccatacctacggcagtaccatcttcaataagaccgcatttgatattgtgaatcatatctagcaatacagcatgatccacagtcaacgggcattgagtaaaactctcaccggcaaataaagtaatacctatattatcattagggcgtccgttgataaactctgccgctacatctttggctgcttccaatctattgggctttaaatcttcggccaacatactggtagaaacgtcaacagccagcattatatcaataccttctatttcgctgttctgccacttattggttgtttgcggtcgtgcgaggaccagaattaccaatgttaacgcaaaaagacgtaaaagaaaaggagcatgcaacaaatagttcttataacttttaggtgtatgcgcatatacccgagcgtccgaaatctgaagagtagcttcacttttcctttgcttcaagatataccatacaatataaggtataagtagtaatagcaaaaacagatattctatattggcaaaaaccattttatttatgatttaacagtttacttttagtattcaagttactcattctttacacaaaaagattgtatatctgcatacctatatatataaagacaccaatcaatgccgcagacaaaagtgcaattccgcaaatcaacattactttaacgcgtaaagaacgtttttcaataatcgtaatttccgttggttgcggtttctgattttcctcttccggttgttttgtttcattgataaagtcaattgcattaattaagtttgcatcattttcgttcatctgaggatcatgcttggcaaacttcactaaatcggcagtctgaaacagttcttttaggtcagatatagcttctttatccttcaattccaataacttatcaataatttccgatgatgtcatttccaatgcattaaatccgaaacgatcctttatatacgtgcgaagagcatcagtcaattccgtatagtattccttcgatcttcccttctgccatactttctcgattttgatacgttctatctctttcattgcagcttgatgtggcggcaatttcggttctacttttatcttacggataataggtttattatcacgtatacgaacaatgagatagatcagcaaaccgagtaaaggtaaagctaagaatgagcaggaaattaaaccgtaccagtcttcccatgcaaaaggagctttcattacaggtttctgtccgaagaattgatcagggtgtaatgtgtcgaccggtattgagtagactttcagtgctaaagcttttgacttatactctttgccatctacagtaacaggtattggcggcaggtaatacaaagccgagtcaaaagaagtgataacatattcctgtgtgattaacattcgctggcggtcattcaaaaattgcgtatccggtttgactgtttctataatttccacaccttttactaaagtatcagtataagcagggaaaatagcatgttgtttagcatccatagccacttgcaactgcacttttgcctgttcaccgatcagtatttgcaatgaatctatcttcgcctctaccgtaacagattgtgcagctactttatcaatggataatagacctaataatgctatcagaataatatttctactcatctttgatttcattaatttcgtttggcaaataagttcaacaatgcctttacgtaatcctcatcggttctgacagaaaccgaatccacattacttttcgtaaatgtgtcgttcagttccgtctgcttttgaatccaccaatcgtgatgcgcgcggcgtacagcttttgatgaagtatcaatccactgctcatgtccggtttccgcatcttttattcgcatgagacccacaggaggaagatcactcactctccggtcataaacctgtaatgctactacgtcatgtttccggttggcaatagtcagagcattcttaaaactttcctgatcaatgaagtcggatagaataaaagcagtgcaacgtcttttcattacattcgtcagatattccaatgcaagacggatattagtacgacggctttccggttgaaagtcaatcaattcacgaatgatatatagaatatgtttacgtccctttttaggaggaataaacttctctatccggtctgaaaagaaaatcactccaattttatcattattctgaatagcagagaaagcaagggtggcagcaatttccgtcaccatatctttcttcaactgtttgacggtaccgaactccaaacttccggaaacatcaaccattaacataactgtcagttcacgttcttcctcaaacacttttacgtaaggtttgttgaaacgcgcggtcacattccagtctatgtcacgtatatcatcgccgaattgatattcgcggacttccgagaatgacatacccctacccttgaaagccgaatgatactggcctgcaaagatattattagacaatcctcgtgtcttaatttcaatctgacgaactttttttagtatttcacttgtttccatttagggcacttcaaccttattcaaaatcttactgatgatttcgtccgaagtcatgttattagcttccgcttcatacgtcaatccgatacggtggcgaagaacatcatgcgcaacagcacgtacatcttccggaattacgtaaccgcggcgtttgatgaaagcgtatgtacgggcagccaatgctaaattgatagatgcacggggtgaaccaccgaaaccgatcatatctttcaattccttgaggtcatatttctccggaaagcgagtagcgaatacaatgtctacgatgtagcgttcgatcttttcatccagatatacctggcgaactactttacgtgcttcaataatttcgtcagctttcagaattggttttacgttgaacttttctccattaatattctgacgaataatcaacttttcctcttccaacttcggataatcaataacgaccttcagcataaaacggtcaacttgtgcttccggaagcggataagttccttcctgttcgataggattctgagtagccaatacgaggaagggttccggcaatgtaaatgtttctttaccgatagtaacctgacgttcctgcatggcctccaataaagcactctgtactttagccggagcacggttaatttcatcggctaatacaaaattagcgaaaataggtcctctttgaactttaaaagattcgtctttttgactgtagaccattgtacctatgacgtccgcaggcaataagtccggtgtaaactgaatgcggctatatttcgcatcaatcagagaagcaagcgttttaatagctaaagtctttgccaaaccgggtacaccttccaaaagaacatgaccatcggagagtaatccgataagcagcgattcaaccaaatgtttctgaccaacaatgatttggtccatacctgttgtaagattggtaacgaaagcactttgtctttcaatccgctcattcaactcgcggatatcaattgattcagccataaatacttaatattttattatttaaatcccattatttctatataagccctgccaatagtagcataaggctttttattttgccccaaaagtacgccatataattaacgattgcaactaatttttattaaaaaacaatgcgaagtctttagattaaggtactttcatacgcttttgtacatccataacacttcccccggccgatacaggggtaaggccgggggaatggaatttttatcacttattcttttgtaagttccggaatttttattgttgtgccgtatggtacattattcgggttcttaataacgtccggattgtgtttcacgatatacggccacatagccttggttccatagaatcgcaaggagacccttgttaaagtttcaccttctttgaccgtatatttagtcttggttccggttattttataagaggcggaatccaaatatacagatgttgaaggttgctgccggataactttattttcagttttggcaggtgtcactgcttctttcttttgagggacaaccggtgtcggagtgatagaggttttgggtgtttccggttttatatctttcacagagtcttgttcgatcgtgtcggataactgtacttccggcttgacaggctgagttgttacgggaggcatatcaagagcattcttgtcggatgacgaagagaataaatccggataataaatgaataaaacaacccctccacataataacagaacaagtatgatgatcgttattaaataaggaacaggcgatttctcttttacagaagaatcgggaatattcttttggggagtcggctgtatagcagtctgtgctacttctgccccttttgccatctcgctcttaccttcttgcgaccgcactatcgtactttccggttttagatttgccctcagaagctcttgttctataatctcctccgcagtaattatttctttcttttctacaggaactgttttcggttctacgacaacagattgtggttctatagatcgtggttctacaataggttgtatctctgtaagagacatttcttctttttcctcttccttaggctgggattgtggctcgatagattctggtatgtctgtcggaattacttcttccccgctttcctcttcttccgtttcttctataggagtgtcctctaaaacagtattctcatttaaaacaaccgtctcaaagtgtgcaaaaggcttgtttatcgtatctcttaaatttgcatccggagaaaacgagactttggtatggccttttatttgaaaacgttcaccagtgtttacattaacactttcccgactatctacatcaataagtttgaaagtacccaatcctttgatttttacagtattctcgctctctaaggcctgttctatcaaaagaaaaaactcttttacgaacgcctcagcatcctttttggtcatgctatgttttgctgccaataagtcagtaagatcttgaattgttagtctttcattcataacggggaatatatttatttaaacttatctttcaatgtattactaggtctataagataataccagttttgggggcaccaacatacgctgtttgcttgccggatttatggaaatgcgttccgcctttttctttacttcaaaagaaccgaatccctgtaccgcaatcatgttgccttcttccaactcttgcgtcatgctagccaacaaagaattgattaattcagaagtatctttgatggtatatcctagtctttccgctagctcggatgtaaattccttattattcatacatttataacctttgcatataaatcaaaatcgtccgcatctatcacttccacctgatagaactgcccaatctcaagctctttttcagaactattaatcagaacctccggatccacctccggtgagtcgaattctgttcgtccgatataataatccccctccaaccggtcaatgataattttcatttgttttccgattttagcggcgctcaattcagctgagattccttgctggatatccatcagctcatcaagtctggcttgtttaacttcttgcgggatagagtcttcgtacgcttccgcagcataagttccctcctcttcggaataggcaaaagctcccattcggtcaaaacgcactttgcgtacaaactctttcagttcttcaaagtcctcttctgtctctcccggatgtcccaccattaaagttgtccgcaggtgaatgcccggcacttctttacggaattgctcaatcagtttataagtatcctccttagtgacttgacgtcgcattaatctcaacatcttgtcactgatgtgctggagggcgatgtccatatatttgcatacattgtcgcgttcacgcataactcggaacaaatcagtaggaaaatgcgcaggataggcgtaatgaaggcggatccactctacacccggaatgtcggagatacgttcaattagttccggaagcatttgtttcttatatagatcgaccccataataagtcagctcctgtgcgatcacttgaaactcttttacgccttgagataccagataccggacctcatcaagaatttcatcaatcggtttggatatgtgacgccctgtgatgataggaatagcacaataggaacatttccggtcacacccttctgatatcttcagataagcataatgtcggggagtcgttaatgtccgttcgatatataattcatcatgatacgtctgtcctaaatcctgcaacaattccttccaattgaacttgccatagaacttatctacctgcggtatctcgattgccaattctttaaggtaacgttcggaaaggcaacccattacgaaaagctttttcaaatcaccttcttctttcctttcggcaaattccagaatcatattgatagattcctcttttgcgtcaccgataaaaccgcatgtattaataacagctatttcaccttgcggattttccgtatcatgagtcacactgtatccgacttcttccaattgacgtatcaattgttccgagtctaccagatttttagaacatcccaaagtgattatatcaattcttctttttttcatgcattctctccaaacaaagaatctacaaactcattcttacggaatacctgtaagtcttctatgccttcacctaatccgatatatttaacgggaatcttgaattgatctgatatgccgattacaactcctcccttcgctgtaccatccagttttgtaatggccattgctgtcacttccgttgcaagagtgaactgttttgcctgttcaaaagcattctgacctgtagaaccgtccaataccaatagaacctcattaggagcatcgggcactacttttcgcatcacattctttatctttgtcagctcgttcatcaaaccgactttgttgtgaagacgtccggcagtatcaataattacaatatccgcattgttggcaaccgcagaactaagtgtatcgtacgccaccgatgcagggtcggcacccattttttgcttaatgacaggcacacctactcgttctccccatatcataagctgttctactgcggcagcacggaatgtgtcggcagctcccaagtaaacggacttgcctgcttttttgaactgataagccaatttgccaattgttgtggtcttgcctactccattcactcccacaaccataatcacgtatggtttcttatcaatagctacatcaaaatcagctatatctcccgagttgttctcagtcaataaagcggctatttcatcgcgtaatatatgattcagctcttgggtattcacatatttatcttccgctgcacgtttttctatgcgcttaattatatttaaagtggtttccacacctacgtcagatgtaatcagcacttcttccagattatccaacacttcgtcatccacctttgatttaccagctacggcacgagctatcttactaaagacactctctttggttttagataatcctttatctaaagtttccttcttttccttggaaaaaaaactaaaaaatcccatatttatagatgtttgtatgatacattatgctacaaagatataacaaaggattggaaaagtaaaaaaagaagcaataaaaaatcccctcattgttatcaatgagaggattttgaatttatagcgtgtatgctatctcgattattttttgaaaaagtcttgtactttttcgttcggaaccatttgttcatcaaaaacgtatgctccggttttcggagattttaccattttgataaccttggtataagcacgaccttctttagaaccatcgtgcaaacttgctactgttttctttgccatgggttatacttctttattatttaatttctttgtgtactgttactcttttcagaatcgggttgtatttcttcaactcaagtctttctgtagtattctttctgttcttagttgtgatataacgagatgttcccggcattccactgtctttgtgttctgtacattccagaatcacctgtactctgttaccttttgctttctttgccattgtaagttttctcctctacatttagccgattactttaatgcttttccaatcacaataacctttagccacagcttcggtcagcgcagcgtccagtccttttttgttgataatacgcagcccattagcgcaaatgctaaggctgatccaacaatcttgttctacatagtagaactttttgttaaacaagttcaaatcaaaggttcttttagttcttctctttgagtgtgaaacattgttgccaatcatggctttctttccggtaatttgacaaatcttcgacatttctatcttatttttatagttttatatctatacttatttcaaacaggacgcaaagtaagtacttttatccgtataaaacaagaatttcttaaaataattcacttataagcagctatttttctttatttgagtaaatctcggagcattagcaacgcattattgccggctctttcaatattcatggctcttccgcgatttgtttcctgcttgtatgtccgaatttcgtttttataaccagcagctatccatacagtccccacaggtttctccggagtgcctcctcccggtccggctattcccgatgtggcgacagcgcagtcagttttcaatgctttcatcgcaccttttaccatttcaatcaccgtttcttcactaacggctccatacttttccaatgtctcggaagacacgtacaaaaggtccttcttcacttcattggaataagccactatgctacctttaaaatattccgaacttccagcgatagatgtcagtcgctccgcaatgcttccacctgtgcaactttctgcggtggatacggttaatttcctctttttcagtaactccccgatgatgacttccaatggggtgtcttcttcgctgaaaatgtcttcgcccaatattgtttccaattttgctttctcacggttcagaagagtttccacttctttcctgtcatgtccgcgtccggtcaatctcatacggataattcccagtttgggcagatatgccagtttgatgcaatccggtaaggcgacctcccaagcttctaatttctctgccaacacggattcggggtaatgttgtactaagaaagtctgatgcataatgacatctgtttgaaacctctcatgcagtttgggtaatacgctttcagccattacggtagtcatttcctgtggtactcccggcatagatacaagtactttgccgtctctctcgaaccagctcacagaagcacttcctaccgggttgttgattaccgtacagttcttcggaaccattgcctgacctttattcagtttattcattggtattttaccggccaatacccgtttcacgttttcgaagacttcttcgctgaatatcagttcagtattgaagtacttacaaagtgtttgtttggtaatatcatctttagtagggcccagtcctccggttactaaaacaatatttacccttttcatcgcattatcaatcgcttccaggatctcttcttctctatcgcgaaccgatacgatgcgaaggacttcaattcctatattatttaactcccgccccatccaggcggaatttgtatcgacaacctgccctatcagcagttcatcaccaatggttataagctcggcaaacatatttctcctgctttatttattatatatacctattatattataagaatatccctacttcattaagctattcttcctgcttctttctctcgttccacgtacgtggactttatgtttcgtgtatgtgaaacaaagaaatagaatagaggaaacctattaatgctgccgtcatattctcctaattctatcaagacaaacggcaaaagttaccgtatcccaatgcttatatgccgttattccgatgcaaaaacacggttattgtcacctatttcatcatcaattgtcactgttatcacctattgtcactcctattatcacctgttaagcagctatcatacaaatgattagacggaaaagtgacaatagaaaaataactttatagggtgacacgagaataagccggaagctcaatagagcagaaatctttatccagatatttgaaatatccggtaatggcaatcatagccgcgttgtcagtggtatagctgaatttaggtataaagatattccagccatacttttccgcatgttcccggaaagcattacgcaatccgttatttgcagaaactcctcctgctacagccacctcttttatcttatactctttcgcagcttttcgcagtttatccataaggatatctactaccgttgcttccaatgaagctgccagatccactttatggtgttcgataaaatcaggatcttccttcatccagtcgcgcaatgaatataaaaatgaagttttcagtccactgaaactataatccaatcccggaatatgaggtttgctgaatgtatatgctttcggatttccctggcgtgccagcttatcgataatggggccgcccggatatcctaatcccataacttttgaacatttatcgattgcttcacctgcggcgtcgtcaattgtctgaccgagaatctccatgtcattataggcctttaccaatataatctgcgaatttcctccggacactaagaggcaaaggaatggaaattgtggctgtttattttcttctccttcagctttaataaaatgagctaaaacatgacctgtcagatgattaacatcaatcataggaatcccgagagaacgagcgaatcctttagcgaaagagactccgacaagtaaggaccccattaatccgggaccacgtgtaaaagctactgcactcaactcttccttagtgactccggcacgtttcaacgcttcatgtactaccggtacgatattttgctggtgtgcccgtgaagccaattcgggtactacgccgccgtatgcttcgtgtacggcttgacttgctaccacatttgacagcagataaccatccttgataacggctgccgacgtatcatcacaggaggactcaattcctaatattattgcactcataagttatttaaactattaaacggtgcaaaagtaatcataaaactacgattcataacgaactattttatatttttgttcgcaaaataaaagtaatcgcttatcagaacgctgaaaaagactgtacgctgggtagttggtattgtactgggagtatatatcggaactattgttttgctgaacataccaaatgttcagcaagcgatgagtgcgtttgtcgccgatgaactttccgaagtgttgaagacgaaagtggtaatcggcagaatcaatatgggattattgaaccgtattatcattgatgatgtattgcttgatgaccaaagtggacaggaaatgttgaaagtcacccgtttgtctgccaagttcgacattgtgcctttttttaagggaaagatttctatcagtagtgtacagcttttcggtttcaatattaatcttcgcaaggaaacaccggatactcctcctaactttaaatttgttctggatgcttttgcttccaaagacactgtaaagaaagagagttcgcttgatttgcgtatcaattcaatattgattcgtcgtggaagaatgtcttatcatgtactttcggaagaagagactccgggaaaatttaatgccaagcatatccaacttcagaatattatagccaatatatctttgaaagcattgagcaaagattcggtcaatttgggaatcaagcgattgagccttgatgagaagatgtccggattttctttgaagaaaatgagcttgaagctggtagccaacaataaacagacaagcattgataattttgctattgaactgcccgagacttctttaaaaatggatactatccacttggtgtatgacagtttacaagcattcgagcattttgcggaggaagtgcatttctctttccgcacgttaccgtcgcagattacattaaaggacatctctccttttgtgccggttctttctcatttcaaggaaccgataacgttggacatggaagtaaaaggaactgtagaccagttgaactgttcgcatttggagattgtgtcggaggaacagcaattccgtcttagaggggatgtctcgttacaggatttatcacatccgcaggatgcgtatgtgtatggtactctttccgaactttcggccaatacccgcggggtaggctttttagtacgtaacttgaatccggattataatggagttcctcccattctcgaacgtttgggaaatattagttttcgcggagaaatttccggatatttcacagacttggtaacgtacggtcagttgcgtacaagtctgggagatgtgaaaaccgacttaaagttaagtgcggataagagcaaagggctgttcgcttactccggtgcggtgaaaacaacggacttcaagctgggggaactattagctaatgaacagttgggagaaataactttcaatctggatgtgcatggacggcatatcacaaatcagcgcccaactgtagaactgaaaggcctgattgcttcaatagattatagtagatacaggtatgaaaatatcacgctggacggagaatataagcggggtggatttaacggtaaggtagcattggacgatccgaatggttccgtctatctgaacggggatgtcaatgtcacttccaaagttcctaccttcaattttctggcggtagtacacaaggtgcgtccgcatgatcttaatcttactactaaatatgcggatgcggagttttcgttgaaattaagggccaacttcacaggtggttccatagaagagatgattggagaaatcaatgtcgatagtttggaatttacggctccggataaagagtatttcatgaagaacatgaatattcgggctacaaagaaaaatgacgaaaaccaattgaagctgacttctgagtttctgacggctgatgtagaagggaaattccaataccacaccttgcccgccagcattcttaatattatgcggaaatatattccgtctctgatattgccgcctaaaaaagaatttgaaacgcataataattttcagtttgatatacatatctataatacggatattctatctaccatctttgatattccattgacaatatatacccattctactttgaaaggatatttcaacgatcctttgcagcgtctgcgtgtagaggggtattttccccgtttgcaatataagaataactttatagaatcgggtatggttctttgtgagaatccagcggatcatattcgtgcgttagttcgtatgaccaatctgaaaaagaaaggagcggttaatctttctttggatgcgcaagccaaagatgataatgtcagtacaaccttgaattggggtaataatgcggctgtaacgtatagcggacagttggcggctgtagctaagtttctccgtacggaaggagaaaaaccgctcttaaaggcaacggtagacgtgaagcctactgatgtaatattgaatgatacgctttggaaaatacatccttcgcaagtggtagtggattcgggaaaggtggatgtgaacaatttctatttcagccatcaagaccgttatgtacgtatcaacggacgtctgtctgacaatcccgaagactcggtcaaggttgacttgaaggatatcaatatgggatatgtgtttgatattgccaatatatcggatgatgtaaattttgagggagatgctacgggaacggcatacgcgtgcggtgtgttgaagaaacctgtcatgaatactcgtttgtttataaagaatttctctctcaatcagggacgattgggagatttggatatatatggtgaatgggacaatgagaatagaggaatccggttggatgcgtttatccaggatattgctccttctccttcgcacgtcacgggtattatttatccgttgaaaccggagagcggacttgatttgaatattgaagcgaatgaattgaatttgaagttcctcgaacattatatgagaagcatcgctaatgatataaaaggacgcggaacaggtaaggtgcatttttatggcaagttcaagggattgaatctggatggtgcagtaatgacagatgcatctatgaactttgatattctgaatacccactttgccatcaaagataccattcatctggctcctggtggattgacattcaataatatacatatttccgatatggagggacatacgggaaaattaaacggatatctgcattatgaacattttaagaatctgaattatcgtttcgagatacaggctgataatatgcttgtgatgaatacgaaagaatcggcggatatgcctttctatggaactgtatatggaaccggaaatgtaatgttgtccggcaatgctgcacaagggctggaagtgaatgcggccatgacaacgaataggaatacgacctttacctatattaatggtagtgtagcgtcggctaccagtaaccagtttattaaatttgtagataaaacgccacgtcggactattcaggattctgttcaaattatctcttattatgatcagatacaacaaaaacgtcaagcagagacagaagaacaaaaaacggatatccggttgaatattttggtggatgcaactcccgatgccactatgcggattattatggacccggttgccggagattatatcagtggaaaaggaacgggaaatatccggacggaattttataataaaggagatgtcaagatgttcggtaactaccggatcaatcagggagtgtataaattcagtttgcaagaagtgatccgcaaggactttttgattaaagatggaagtacaattactttcaatggtgcgcctttggatgcaaatatggatatacaggcttcttataccgtaaattcggcttcattaaatgatttgatgccggatgcttcgtccattatacagcagcccaatgtgcgggttaattgtataatgaatttaagtggtatgctggtgcgtcctactatcaaattgggtatcgaacttccgaatgaaagagatgaggtacagacattggtacgcaattatatcagcactgaagagcagatgaatatgcagattctttatttgttgggaattggtaagttctatacggaagacgctcgtaataataatcagaactcgaatgtcatgtcatcggtgctatcctccactctgtccggtcagttgaacaatgcgctgtcgcaggtttttgagacgaataactggaatatcggaacgaatttgagtacaggagacaaaggttggacagatatggaagtggagggtattctttctggacagttgctgaataaccggttattgattaatggaaattttggttatcgggataacccgatggcgaatacgaattttgtcggtgattttgaagcagaatggctgattaatcgttcaggggatattcgtttgaaggcatacaatgaaacgaatgaccgttattatacaaaaacaaatctaaccacacaaggggtgggaattatgtataagaaggattttaataagtggagcgacctgtttttctggaataaatggaaaatacgtaataaacgggaaagggagaaatcggaaaaggacgggcagcaaccgacggatagtattataacaaaatgacatacaaatatctataatctatcactttaaatacatatagatagaaattaagcgatgacagagtcctgtaggctttatcatcgcttattttaggc

SEQ ID NO: 11753 - DNA, 817 bp, Unknown
  gut microbiota DNA sequence
tttgttggtatgaaaaaaagaaaacgggaaaggagacgaacttatgggaagtaattatattcgtttcgattgggctatgaaacgcttattgcgtaataaagccaattttgcagttctcgagggctttcttaccactcttctaaatgaaaagatagtcattcagaagttgttggaaagtgaaagcaatcaagaggacgagtttgacaagtataattgggtagatatgcttgcggagaactcaaaaggcgaatttattttgattgaagttcaaaataataatgagtatgcgtatttccaacgtatgctattcggtacttcgaaattggtcactgaatatataaatcgcggggaagggtatgataatgtaaggaaagtatatagtgtcaatattatatatttctctttagggaatggaaaggatgttgtatatcatggaaaaacagaattccgcggaatccatgagggagatgttttggaattgactcctttccaaaaacagacattcaaagtagacagtgtcagtcagctttatcccgaatattatattttgaaggtcaatgatttcaatcaagtagcccggagtccattggaggaatggatttattatatgaatacaggtgatatacctgatagtgcaacagcgccgggattggatgaggctcgtcaacgcttgaaactggataggatgactaaagaagaattaaatgcttattatcgtcatttgaataacatagtgattctacgagataatatatataccgaacgtgcagagggtcgtgcagagggacgtatggaagaaaaaagagaaatggtacat

SEQ ID NO: 11754 - DNA, 5353 bp, Unknown
  gut microbiota DNA sequence
ccgaccgtattctcggtatgggtgatatcgtatcactggtagaacgtgcgcaagaacaatatgacgaagaagaagctaaacgcttgcagaagaagattgcaaagaatcaatttgacttcaatgacttcctcagccagattgcccaaatcaagaaaatgggtaacttgaaagatcttgcctccatgattccaggagtaggaaaagcaatcaaagatatcgatattgacgataatgcgttcaaaagtatcgaagctatcatttactccatgactccggcagagcgttccaacccggaaatattgaacggttcacgtcgtacacgtatcgccaaaggtagcggaacgaccattcaggaagtcaatcgcctgctgaaacagtttgaccagactcgcaagatgatgaagatggttaccagcagcaaaatgggcaaaatgatgccgaagatgaaaagataatccaccaataaataccttgaaaatatgacactgatagatgggaaagcaatttccgaacaagtgaaacaagaaattgccgctgaggtagctgaaattgttgcacgcggtggtaaacgcccgcacttggcagctatcctcgtagggcacgacggtggcagtgaaacatacgtagccgccaaagtaaaagcctgcgaaatttgtggattcaaatcttctcttattcgttatgagagtgatgtgactgaagaagaactgctggccaaagtgcgtgagctgaatgaagacaatgatgtagacggttttatcgttcagcttccgttgccgaaacatatctccgaacagaaggtaatcgaaacaatcgactaccgtaaggacgtggacggttttcatccgatcaatgtaggtcgtatgtctatcggacttccttgctatgtatctgctactcctaatggtattcttgaattactgaaacgctatcagatagaaacttcgggtaaaaagtgcgtagttctcggacgtagtaatatcgtaggcaaaccaatggctgcattaatgatgcagaaagcatatccgggagatgcgactgttaccgtatgccacagccgcagcaaagatctggtaaaagaatgccaagaagccgatatcattatcgctgctttgggacaacctaatttcgtaaaagccggaatggtgaaagaaggcgcggtagtaatcgacgtaggtaccacccgcgtaccggattccactaaaaaatccggattcaaactgacaggtgatgttaagttcgacgaagtggcacccaaatgctcctacatcactccggtaccaggtggtgtcggaccgatgacgattgtatcgttaatgaaaaatacacttttagccggtaagaaagccatctatcaatgagatacacattgttcttggtaatcatatttctctccttgtcttgcacttcacggtcgcagacaaggagagattctattaataacaactcgcttgacacactctcggctagcaaaagttgcatacctgccgatactctccgtattctctttgtgggagaccttatgcaacaccaggggcagattaatgcagcacgaaccgctaaaggatatgactatactacctgcttcgagtatgtcaaagaggaaatagggaaagcagacctcgccatagctaatcttgaggtgaccttaggaggaaaaccatacaaaggttatcctgctttcagtgcaccggatgagtttctcaccgccatacacaatgccggatttaatgtccttgtcacagccaacaatcatagtcttgaccgtggcaaaccgggattggaacgtacgatccgcttaatcgactccttgtccattcctcacgccggaacatatataaatcccgaagaacgtgaaaagaaatatccactcattcttgaaaaaaacggattccgcattgctctactcaactatacgtatggtacgaacggcatatacgttactcctcctaacatcatcaattatattgataccgcaatcattgccaaagatatagaaacaagtaaagtaatgaaacccgatgttattatcgcctgtatgcactggggaatcgaataccagtcgttaccggataaggaacagaaattccttgcagactggttgattcgaaaaggagtaaaccatgtgatcggttcccaccctcacgttgttcagccaattgaagttcgtgaagacagtgtgacaaatgataaaaatcttgtagtttattcattgggaaattatatttccaatatgtctgcacgtcacacagatggaggacttatggtaaagatggagttggtaaaagacagcataacccgtctcaacaaatgtgagtatagtttagtatggactgcccgacctacacaatcaggaaagaaaaatcaccaattactccctgtcaacttaccgacagactccattccggtaaatgcccgtaactctctgaagatcttcgtaaatgatacgcgatccctcttcagcaagtacaatcgaggaataaaagaatatactttttacaaaaaaaagtagtagaatcttttggagattaaaagataatatctatctttgcaccgcgttagagaaacgcagatatggtggctgtagttcagttggttagagcgtcagattgtggttctgaatgtcgtgggttcgagtcccatctgccacccaagataagtccttataagttaaatacttatgagggcttttttattgatggtagtaggtatttagagactgaaatcaggctcagtagaaatttaggctcagcagattcttcgataaaaacaagttggaattcttatctcaatctgtattttattacaatacatgatgaaaattgaaattaaacttataactttgaagaaagttaatgtgatacaccatgatacagaaattcttgcaaacatataaggaggcgttcggtaatgcagttccacttcctgtcactttcggatatagccatatacctgttacagagataaataaaataccgcgttgcatgataggtagcattcgcaaagtatgtgaaggtgattcactaactctaagtgccgacaatgtactgtgcggtggaggaagcctgtacactgcctttgcccctatgcaagaaaggctgcccaaatttgtgtcagaaacggaacactacaagcagactcccgaacaaatcaagaaatacatacatcgcttagacatccacctgacggataagccttatttgaattttgtccgtatggataaactatcctctctcgatgaaatggaaggtattttgtttttcgccacacctgatatactttcgggcttgtgtacatgggctttttatgataacgatgcagatgatgctgtatgtacacggttcgcatcgggatgttgtagcattgtgacctttgccatacaagagaaccggaagaatggtcgaagttgctttatcggtatgttagatccgtccgcacgtccgttgataccgacaaatgagcttacctttgttataccaatacaccgtttccatgaaatgatgcagacgatggaacattccgctttgttccaaaaggcatattccatagtaagaaaacgaataaatggagagatagggaaatgaaaagaacttacggaacgcgaagttgccaaaaagctacagcagccgcagcagccacattaagtgaatcaacaccatacgacatcggaatacggactacgtaatcagcctcagcaatcgtttcatgtgcgagcccatccccttcactacccaccacaatagctaatttagattcagccatcaagataggatcatcaatggaaaccgaattatctgtaagtgccatagcagctgtacgaaagcccaaattactaagatcagagagagaaccgtccatccatgtccacggaatacagaaaacagctcccatagatactctgaccgcacggcgattcaacggatcacaagaattgcgcctcagcaatacagcatccatccctaatgctgccgccgaacgaaaaatagcaccaatattagtggcatcaacaacgccgtcaatcacgacaatacgccgggcctcatgacagatttcttccaccctacgtaaaataggacgatgcattgcacaaaggacaccgcgcgtcagaacataaccagtaagcttagaaagcaattccctgctaccagtatagactggtaaatcattactatatcgttctattacatcagaagcatcaccaataatatgtttatgttcacacaaaattgccaaaggctcatagccagcctctaaggcccttttgataaccttcggactttctactataaaaagccctttatcaagttcaatgtgataacgcaactgagcttcagtgagagcactgaatatctcaactccaggatgagataaagatgatatttcaataataggcataatagattatttataaattgctactttaataaccccatccaacttgttttcaaagacacggtaagcctcctcaatctcattcaacggaaatcgatgcgtaataagaggagtagtatcaattttcccttcctcaatcagtttgagaatctcggcacaatcacaaccatccactccacctgttttaaaaatcaaattcttgccatacatatcaggtaaaggaagaagctgtggtttatcatagagggctacaatcgtgacaatagcattaggacgggcacaattccaagccaaatggaaggaatcgtcactccctgccacttccaaaacaacatctgcaccaccatggtcactgttcttgagaacaaaatccttgcagttttccggttcagtcaccaacacatcaggataatgctcgcggacaaaccgaattctttcaggagacttctcacagataataatgcgttttggcttcttcagcatcacacacaacaaagtacaaatcccggtaggtccggcaccgataatcagaacagtatcttccttggtaatttccgagatgcgtgttgcccaaaaacctgttgcaagcacatcaccgacaaacaaagcttgtttatcactcactgtatccggaatacggttcaaaccttgatccgcataaggaactctgacatattccgcctgaccgccatcaattcggcaacctaaagcccaaccgccattaggatcagtacagttattcacatatccatgcttacagaaaaaacactcaccgcagaaagtttcgacattcacagtcaccctgtcaccaggcttcaccgaagtgacatcagctcctacttgttctaccacacctaccatctcatgcccgacagttattccgggcacagcacgcggcacactgccatgtttaatatgaagatcactggtgcagatgctaccaagtgttacacgcacgact

SEQ ID NO: 11755 - DNA, 2568 bp, Unknown
  gut microbiota DNA sequence
acttggggactttatactcttcggaggctaacaatgtgttgaaaggtgtggaaatcgtcgcacaaaagcctttggttaaagtggatgtggataagattgaatacaacattgaagatgatccggattcaaaatcgaacagtatattggaaatgcttcggaaagttcctctggtaacggtggatggagaggataatgtgcaggtaaacggtagcagcagtttcaagatacacgtgaatgggaaacctaacaatatgatgagtaacaatccgaaagaggtgttgaaaagtatgccggcaaatacaatcaagtatattgaggtcattacttcaccgggcgctaaatatgatgcggaggggatcggaggtattctgaatattgttacggtgggtagcggatttgaaggatatacggctacttttagaggaaatgccaataataacggggtgggtgcgggtagctatgccatgataaaacaaggaaaactgaccctctccgccaattacaactataattataacaacagcccacgtagctattccgacagttatcgggagaattatgagtcggtcgatgagaagtatctggaatcggaaagcagttccaagtcgaaaggaaattttcaatatggtaatctggaggccagttacgagatcgacacgttacgattgctgactatggcttttggaatgtatggcggtggtagcaagaacaatagcgacggaagtaccatcatgtatggatccgaccatcagagttttgcctatcggtataatacggataatcatggaaaaggctcttggtactccattaatggtaatgtagattaccaacgtacctcgaagaagaacaaggagcgaatgattaccttctcttataaaataaactcacagcctcaaacaaatgattcatataatacctacttgaatattgaaccggaagcagacaggcaggatatcatagataatctgttgttgaagaacttccattcggatggtaaaacgaatacgatggaacagactttccaggtggacttcacgactccgattggaaaattgcacacgattgaaacgggtgtcaagtatattttccgtcgtaattccagtgataacaagttttatgaggccgaaggaggaagtggggattatgtatatactgatgaccgtagtagcgagtatcggcatctgaaccatattatttcggcttatgccggatatacactgaaatataaggggcttacattcaaaccgggatttcgctatgaacaaactgtgcagcgggtaaagtatattgtaggtccgggagaggatttcaatgcgaatttcagcgatctggttccttccgtttcgttgggcataaagcttggcaagacgcaaaatttgcgtggtggatataatatgcgcatctggcgtccaggaatctggaatttgaatccttatttcgataatcagaatccgatgtttatcagccaggggaatccgaatctgaagagtgagaaaagccattcgttcgatttgtcttatagcaatttcacggcgaaattcaatgtcaacctttcgttgcgccattctttcaataataatggtatcgaaagggtcagccatttggttaccgatccgaatggagaaatctttgatggagatcataaagctcctcaaggtgctctgtacagtacttatgataatatcgggaagagtagggaaaccggtttgagcttttatgtgaactggaatgcttctcccaaaacgcggatctatattaacgggcgtggaaattacagggatttgcgaagtccttcacagaatttgcataattatgggtggaacggttccgtttatggcggaatacagcatacgttaccttggaaaatacgcttgagcctgaatggcggaggaagcacaccttatattagcttgcaaggaaaaggctcgggctacaattattatggtctggggttgagtcgttctttcctgaaagaagagcgcctgtcactgaatatctattgtaacaattttgtggagaaatacagaacgtacaacagtcatactgaagggcagaactttatgtcgagaagttcgaacaaatatccgaaccggtattatggatttagtatcagttaccggttcggggagctgaaggcgagtgtgaagaaagcagcccgaagcattaacaataacgatgtcaaaggcggaggaggcggaaacaccggtggtggaggtggccagtagaccatttccgcacaccgggattccctcttatttctgtctcacgtcttgcttgttggtgttaaaaccaagtttggttaatccggcctgtacgtcgggatggctcatgaagagtttccacaataatccggtccggtagttttcgatcatgacagcaataggaccctggtcgatagccagataacgttgcggataccaattgtccgtttcgctgaaagcatcgtagaatccgaaaggaccgaacactttatctcccatgtcatacaaatggcgcattacctgcattgaatattccggtgtatagacaatggatgaaagtgcggcggtaggggagattactcctttg

SEQ ID NO: 11756 - DNA, 430 bp, Unknown
  gut microbiota DNA sequence
tcatacatcaagtcacggattccgtcaatgatgagcaaccccacatcgggcatattttcaagcatataaccgataatctgtttccgcttatcgggtgtctgctcccttagcacgatgaaaacaaaatcgtccctgtccttgtcggtaggcagtccggcaagccgcaaaatacgctccatgaccttgtggcaatggtatttgctctgctcggtatctacatagaggattttccgtttgttcggtggcaggtatgccgaatacttcaatacctcgtcattcttcaacgctgccgcaacgatagcggaaatgttgaatgtctttttgctcttggctttacccgtggatgcactgaaattacccaacgtgccaatggtagagccgttcacccagagtatttcgggcggcacttcgtaagtgtccgtcaccttta

SEQ ID NO: 11757 - DNA, 14695 bp, Unknown
  gut microbiota DNA sequence
aaagaattcctatacatgaaagtgctttggcattgccatacatataactattgattgtcggccgggcatatttcttcctccgtccgccactgattgattcttccataccatcctgtacgtcaccctgccaatacaatccgttcttcaaacggtttgtacgttcccaacgctgatattcggtttccagatctttcttcatatccagcagatagtccttatcaccatctaccatgtaacgagccaaaacagcatctgcgttccatgaactgaacttattcattttcttcatcggtcctccatcattaccgcgataccaagtatgaataatctgatccaggtattttggatcacgtagccaacggctttcgtaaatatgatgtccgattgcacaggcaatcaggttatatttatccgaataagaacgctgaaccagaaattccgtcataccgtatccaaccggagtttccttgatatgcttgcgcaacgaccaccaacgataataatacatctcttcaaaattacgttgcgggcattcaaacaaaggaatgttgtcttccatccactccgaagcttttgcgttaggaatcgcttgaacgatattctcatcttccattccattaaaataatccgcataatggctgaaatccttatacttcaagaaagcggaagatgcatccttgtctgcggaagacgtttttacattagctatacgatattcggccatcggctcctgttcaccggcaccgggcaaatcgtatgtctggtcggccggagtatccactgtcgggaatgtacgtggtatgcctgtacggaaagctattctttcgatacttgccaccggagcatagaacatcctcagccctaccctcttgccatctacatatacttgaatattacggtcagccgttgaaaggacagcttctacatgataggtttttcctgcttcatacttcatcatattcgcaaaccgggaaccaccttttgcacgaaaaacaccatcctgtgtcagttccaaacgggagcaggcaattccattctcatccagaaattcaatctgaagcgtacctttatcattctgtccggcttgcaaatcaaaggagacattcaattctttagaagcgggaattttccgttccacttttgcatagtcaaaaggatctttatcttgcagtttcaaccattgtccatccagggaaaccggagcccaaaccggggagtaaatattccaatcagtcaattccgatattgctttcgattttgaaaagtcatcgttggcatgtgcagaggcattgagttccaccggcacaggaatgcgggagatccacatatcttccttgttcacactataagaaacccataaatcgccatctgcaggtatcccgttcccctcctgtatgccacgaggatactgaggaccgtatgatttataattaccaccgtaacgcatcggcgtgatttcgccgtgcaccagattcagcgttgtatactccagtccgtccttactcaatgagatagccaacggccaacggaattccgaaggattatataccgtcgcgtatgtgccgtcactcaaacgttgtccccagattttcgcattactattgacaaatcccttagcacggagtaccggttgttcccaagtatatcctccgtcttcgctgatagaagtgagcgcgtgcttccaaaggctggcaattcttccgtcgggaagtgtgtaacagttaaatgccttatatcctttctttaaggggataataggatcttcacggtctgcctcttctacccattgcatcatatactgcggattgtcaagaatctcttggcaggctttcacaaactcgcggtctttacttttcttgaaatacggataatcggtgttcttctcgttaaatccgtgattgtaataaataaaataaataggaccgaacgaaccgtccttttttatttcgcgtactacccgaccgataccgtttccatcgttcggatcgtctttcttatctaaggcaactccgtaatttcccattgttattaatcggccggacttggagacatagaaacctacacgttggtgcataatagcaatcagatctttggcttgcatacccggacgagattccttggtatatccgtccggaactttataaggcggaaatactatttccgggttcgtccattgatagccatcctttgatgtcatcagaaatgtttgggaaggcggtacatgttcgtccgaaggatcagccagatattgataataaaactggccgttccaataggccaacatcggttgatggttatatgtccatccattgccgttcgacggatcgggatgttcccggttggcgcgtaccaattggatattatgcactcctaccaccggcgacaactgtccgtcgtgataagtagggttcgataattctgttcctgtgtaatgaattctgtcttgcgctgcaaccgtagatgtcaaccatccggcagccaatgcaaagagaatctttgtagagttattcatgttatttagtgattatcggtgaatgattagtgattaaggcgggtatgtgtcaacaacgcttttactaccgattcgggagctttgaatattgttccgtgtttatgtccggcaggtacacttacttcactcgtcacatcggtaaaatttataaaatcttttgtgcgcatagcaccgtatatctttttctgatagacatcaaagtaaacaagatactcctctcctatcttttctacagtaggaccttctacaaacgattcggtaaatggttgcgacgcaggtgagtaaggtcctgtcagggaatcggcaaaagcgattttcagattgcgttccgggcgggtattatccttaagtaccatcacatagtcgttcttatcccgttttacaaggactgcatcaatcgaactgaatcccggatcatacaagactttcgctttagaaatagtcttaaagtctttcgtagtgatataatacaaacgatgattattgttttcctcttctattcctctctcaaaacggccgggaatgcaagaagcccatactaccatgaactgttcactatcttcatcatagaaaatctccggagcccatacattgaccgtggtcggttcttctgtcatgacaggtatcatctgttgctttgaccaatgaatcaggtctttggagtttgcatagccgaaccctagatcgcctttccagcttgtcgtccagaccagatgaaaagttccgtcgggagtacgtaccatcgaagggtcccgcaacagttgatgttgtcctaattcgggcttcagccagataccgggaatactgtcccaatgcattccgtcttcactatataaatatcttaagccctcatcagcaggttcatgaaacgaagtaaacatataatagtccttgcttcctccgcaagaaacaaaaaataaaatacctattgccgctaatgtatcttttaaccttttcattgctattataatctataaattgtatcctttatacaaaggagacgataaaaggactaatttgtactcaaatataaacgaagaatcttcatcttccgattgaattttatatacgataaaagggcgactctccgagccaccctttccgtcatcaaacaaactaaccatttttattatgggaagagaatcttataaggatcctccacgtgctttcacacgtttgtaccattcttcacgttcttttttcaagtcatacccgcgtttagccagataattattgatacgtcctttatattttccaaaagcagcgtgttttttatttgaattttcagcgtccaaagcaaattcacgagcttccaccaaccaagcgtatatttgcgctttttcttcttctttaagtgtcggaatcatgtcgaggtgggaatcgtaggtcaccttcataaccccgtaagtcattccgtccttcaccgcttctatctgcttctcgtcaaggaaaagagataaattggcgggaaatgcgaaatgggaacggtataaagccgcatctttttcattctcggctgctttcaatgcttcattcttagcctcacccgtcaatccggattcttttaccttcttgactttcgcatcgcgtatctcataaatatcgttcaattcgaaataacggttggcaatgatattccggacatcctcagcaacctgtttatctgtgagtcccaacttatctacaatcttctgagaacggttgacaatagactccacatatttcggatcacggttctctttgttcaggtcaactgctccggcggacatccaagtagagagcagtaacagagaaattatcagtatctttttcattgatattattttttagtataataatgacatttcagcaccttagtttacgttaacttcatcatttacattaacttccctttttcctccaaagtatcatagttgtttttcaagtctctccaatctactttgtgcttagtgctgataccattgatatacttttcgatattagtgtatccgtcaccggtacagtccttattggcgtcactcggatcgttcggattcaatccattcgctttttcccactcatccggcataccgtcgccatctgtatctacgtatggagtacctttgtattcgggataaccgcccatctggcgaatatctgtgatgattccttgtttgtatgaatctttcggcagacggcgatatttaaactgtccgtcttcacccattgactttggagccaatcctgtcaaatcaccgtatgcatctttcggaagtttcttttcgtaataaggaataccggttcttacttcttcgataacgcgttcgtctacaatgtcacggcaagggatatttgcacctacatgtttcaatacataatcgtatgcgtcctttgcactcataatattaatatatggcatttcgaacggttggtagcttctcatatactccgtatatccgtcggtattcggctgagtctcaatctgaataccgccgttccagttatcttttgtaatctcgggataaccttccatgatatttccgtcggcgtatacccgtccgtatactttatgatccagcttgctacgtccggcttccggttttaagatacggtgtcctacattggaatctttaggtgtggcaggtcccggcttgtagtagttattaatcatattgaacatcgctgtataatcacctccatcggaagaacggtgtacccagttgaacactatattattaacgaaattgaatataccgttccaaccgatagaagggttacggcctgagttgctagcccacagattacgggcaaacgcacagttttctcctcccaacgtacttccgaatgcatggttataagtatccaatgcttttgcggaaatagtattctgaatagttacatttacagtagggagtttcaaatctttgctttcatactgtccttcgctaggatcatacatatgacgatagaaagatatattttcatccaacccccaagtacatgaacagtggtcaatcataatatttcctaccggatttcctccgaaagagtcatcacgatgccagacctttgtctcaccgcgacggaaacgcatatgacgtacaaccacatcatgcgtatctacccagaatgattctccggcaatgcagacaccatctcccggagctgtctgtccggcgatagttacataaggagcgcgtacaatgatcggagattccaaacgaatgatacctgcaacattaaatacgataatgcgtgcacctcctgtttcacaagcctcacggaaagaaccgggaccacggtcattcagattggtaacggtaatcactttacctccacggccaccgaagctatacattccaccaccttctgcaccaggaaatgcaggaatatcagcttggggcaaatcatacggacgaccggcccaaggtatatacggacgaccttctttggcttctttcagaacgattggcaacgcttttgcccatgcttcatcagaacgcttccgttcttcagtcatcatctttttataattttctttggcttcgtctgttatctgtgggtattgtgcccatacaacgctcggagtcaacattgccgcagcaaaagctgctaaaagtacatatttcttcttcattttttattgggttttgtgaagttgttaattcaaaaatacaataataagacgaaaaagaaaaagatttgtaatcagtaatggtgattttttattagatgtgggggcagaaactattttccaacctccaatggtccgtgtagtgctatcgaaatttacaccaatattaacaaccgcccgatgatctgcctgatatgaaatactgtatcccttactgtttatctgtgcaaaagcatcatccggcgtatcgtccactttaaattcgaaaacataaaatggcattctgcatctttacaaccgcatccgcccgtcctatagcagtattcacttccacatccacattctgccccattaaacggaacaacaaatagaaaatagtctgataatgtttttcctccttattgttctgattgggtatagaagcaaagaaacttctcatacgttccaaacagctacctatattcccaacacgcaggtctttgataaaagacatcacataaaaagtattctcacgggctggcaaatgtacataagctggcataagcgattcgataaagcctttacgaacttctttattagggtatgcaagtgtataaagttcaaaatcaggatcatatcctttgatagtcaaataagcactttgatagagtacaggaatggggtcagtaataacgttggtaggtgcatcgaactgttccgcagttgctgtcgtattatccaattcacgaatatcaaattgactttgttttaatagttctatcaaaaaggtgggtgtacctgtagagaaccagaagttttcataatttttgccgacaaaagcattgaacaaactaaacggattgtaaatatcctcacatcttttactaaaatgataaccgtcatactgtaatttcaaatgagcacaagcctcttcatacgtttcttcatttgcttgggtaataatctcaatatccgttttcaattcgctacgtaattctttctcagtaattccgcatatagcactatattcatcccgcaaactgatattctgtaaattatttaactcatagaatatgctcatttggctgaatttgctgatactgaaatccatgcgtaacaccggataaacattccattccttttctagacgttccattgccaaaccattgaacagttctttttttccattgaaataagcttctaatgtggacacaagcaaactcttgccgaaacgtcgggggcggctaagaaaatatactttatttagaatgtaccaatttgtaaactaaatcagtcttatctacatagacataatttgtattacgtaaatcttcaaaattcagtacacctatcggataacgcctaacaatctcttccatcttattcctgtatattcttgtttgtaattaatcaaatagtttttatcagttactactgattctagcattttcatatggttttgttttatttggtgcgtaaatgagaaagtcaccatttcctatcatctttcaaaagaaagacttaggaagtggtgactttctcgtttatgtcacttcaaaaaaagaagtagagaaactattactcggctaacggatcaaatgttccgttactacctccgttgttcgaatcttcccaaccaatacattgctcaatacctttacaattatttaaagcactttgactgaaaccgagaaagtagtagcgaggcaagaactttatatataaggggtctttgtttgttgcataagcgtcacctttcttctccttacgaacaaaatgttcgttgtaaaattcttgaagttgagttaattggtttccttcttcatcgctgatttctttacggaagtcgatacctttcggacgttctacacctgctttcaacaagggatcactatctgtatcaccggtagtaccacctacaccatacttagtatcattaagacggaactccatattatcacgacgctgatttttattgagttcggtaaaaccgagccatgtgcaagtgttaccaccccaaccggtaagcgtccatgatgccggcgcaccatctactttatccgtaccaccatcaaaaagcatccaacgacgaagatcatcaaaacgtttgccttcgtaagccagctcaatctgacgttcatagagtacggcggacatacaagcagcctgatcggtagaaaggttttcctgcaagccacaatcgcctgagtaaccgacacgctgacgaatcagtttcagttgctctaccgcttcacccatgtgccctgcaccgcaagcggcttcggcgtagttgagcaatacttccgcataacgaatttccatccaaggagctgcagaatatgcaaaaccaccattatcataagtagcattaaatgaataaaggggctcagaaatgtcaccatcgttactacgttttcgtacatatacaccctttctatttttcaacagattatcagcgccataagcgttaccactttccggatcattcacatcttccggatcggcataccacacatagttccacaatacataatccttaccactgttatagctggggttgaacgcatccgccggaacaggatcgcctgtgtaagcccaacggaaaccaggcatggcaaaggtacggtaaaaacgcggatcacgattcatgaaaggatagtcttttatattcgcctcgtcttcgctctcattcagctttttataggtattcaaaccgcgcggacgtttaccatccttcatggggaacatatctacaaacatagccgatgcctctaaaccctgtcctgtggtattcttcggtcggatgaaacgttcccagttattattcttctttgtatcatcgtcttgcttcatattgtgcaaggtaccaaataccatctccggattctgaataacagtaaacatcttggcaaagtccgaaccattgatattattgcctgtagtataaagatggttaccgcaagcattgatatctttgatagattctttgatatattcgtaagcagcagcccaacgactctcatcgttggcacgattgaaaagcggacttgcccacaacagtaacacacgcccctttaacgccatagccgaagcagtagtaacacgaccgtagttgtcgccattccatccaccattggtggtctttgcacgtaacatatcggcagcgatatctaaatcattgcaaataaattcaatgcatgccttcgttgtagagcgaggaacgaaagaactttcaacaggatcttgtaccttagtgactataggcacaccaccataccactttaccatactataatagcaccatgcacgcaggaaatacgcctgacctaacagttcgtttttttgttcttcggtaaggctgctgccactgatgccggcaatcacatcattgcaattgcggattcgcccccataccgactcacggatgttgttactctgattatgaaaataatcgggtactttgttgctacccaaaaccgagagctcagcctgtggatttacaaataaaccaaatccactatactcttcggttgatttagaaatcccatcagctttaccggtacacgggtacttccaatttgcatccgaattgggatcaggtaaaatccaccaataaaggtcgagtacacggccactagcacctgcatagtcgttgtatacttcactagttacattatcaaaattctgcttatcctccaggaactggtcgctgcaagaagagagacctaatgctgccattaatgcagcgctaaatattattcttttcattcttttcttttcatttagcattataaaacttagaaacctacattcacaccaatagtgaactttctcagtcgaggatatgaaccgtagctacattgaggatccataaagtggtctggataaggattgtagagactcagcaagttctgacctgtgatattgaaacggcagctactcaaaccgaccttctttatccaatgcttgggcaatgcataagccaaagtgatacgattcaaacttacacgtgtgccattgactctccaaaaagaagaagtgacagcatttatatctgaatatttcaagttaggtagtgagccttctctgttttgaggcattagcaaattgccggaagcatcataaatatcattgtacacatatacattgtcgggcttccagaacgaaggcatattggtgtactcgatgcttttgccgggtttcaatgcctgaccgggaatgatactatagcctccccaactagcactaagctgagctgcgattgagatccctttccattcagcactaaggttggtagtgaatccccaaggattgctacggttagagagatgcacttggtcattatctttatctactataccatcaggagctgcataagtaccatcaggttgctgggctccacgcacatctttataaatcaacatacccggacgaacttcgtctttagtcaaccccatataatcggtaatatgatatgtattgaagtattcttcgatatcctggaagctacggaacatacccatacattgtattccccaagtaccgatgtcggaacggtctcccttagtgatttgacgatatagatattcttcttcaaagtccatcatcagtactttgttatcgctataaccggtattgataccgattttatatttgaaatccttgccgatgcggtcgcgccaagttgccgagatttcaataccatagttgtccatctcacccagattgacagcggccgattgtgtaccgacagtagtaggaacagtctgttcgatattcatcaacatttctctattccaagtataataagcgtctacattgaaagccaatcggctgttaagtgtagtaaaatcaataccaaagtttgctttatacgacttgtcccaatgcacatcacggtttaccgctgaattatatttgttaatagagatgggtttcgaagcattaatattaccggtagtaccaaatacaggacccttgcccgactcggtagagtaaatctgcatccactgccaaggagcggtattgtcacgaccggtcaaaccgaatgaaccgcgaattttcagatattctacccactttaggcgcatgaatttctcttgtgacacaatccaacccaaagacatggaaggaaaaaatccccaatagttttcaggagcgaacttggtagaagagtcactacggaacagtacctccgccaaatacttatcctgataagcatagttcacacgaccgatgtatgacaaggagccagactcagaacgggagaatacagtatttttgtcaccggtagccgaattggactgtccggtagtaaattcataaggctcattcacctttcccataagatattcactttcagcctccgaacgttcgatagagaataagccacctacggtatgctcaccgaaagagcgagagtagttcatggtaaagttcatctgataactgtccgaacgagtagtgctacgttgcaagtaagaagggcttccattagcaattgtagagagaataaaattatcttccgccaaaaagtcattataatcctgaccatccacaggagtatagaggtggttaccgctaccggtacgattgaccatgcgatagatagaatagctggatccgtattgattattcttatcagtactgatactcttgccataattaaatttcagttccaagcctttcaagacttttacaaatcccatatctaagctcaaactaccgttaacagtcatattcgaattcatgctacgattatagtcaccgttgttctgaagcactgagaaagaataagtctggtcatcattttgtacggagttggtgatacccaaagccgagataggcaatccgttcacggtttcgggaatataagtcggacgagtgagtaacaggttgtagtctttttcatcgctcgaaccgcccacttttacattcggtttgttcttcttgccataatcacccgatacagtaagattcgctttcacccacttgctaatctttacatctacaccggcacgatagttccaacgattgtactcgaggtcacctaagttaccgtcttggtcaaaatacgaaacaccggcaaagtaattggctttttctgaaccgccactgatattaacgctatgtttctgagtgaaaccggtcttccaatatttgtcgagcaagtcgaaattcagccctttcatagcttccagttcatctgcttgatagagatcagtcttcaggttaagcgaagtattggcaggatcaccggctgcccaagtgttataaagtcgtccgtaatcataggcgctcaacatcttaggacgcgaaagttcatcggtaaatccaaagctgccactataagaaatttgaggagcaccggctttaccctttttagtagttaccaaaattacaccattagccgcacgcgcaccataaacagcagctgccgcatctttcaatacagagatactttcaataaccgaaggatcgagattattgaatgcttgcgcacctagattttcacgtgtgttacctaccttgatatcatcgggatagatgtaaccgtctattacatacaaaggctcttgcgccgtgctacccacttcaccaaatgagtttgtatcacgtatatagattttagcattctcgcccggacggctttgtccgccactcacgctcataccattaaccataccgctcagtgaagaagccagccccgagtccgacaaatcctgaatatcatccatagtcacagtagcaatagcacctgtcagatgagctttcttctgcacaccataccctactactaccacctcgtcgagctgttgggcatcctctttcagtactattttcttttggctcaaatcgctgataacctgcgtagtatatccgatgaatgaaatcaccagattctttttacccgatatcgtaatagtatagtttccatcaatatcggtaatcacaccattgctagtcgaaccttccaccacaactgtggcacccattaccggctcaccggtttcatcgactacttgtccttttaccacacgctcctgcgcaaaaactgtaaacgtagctatcgaaagcattgcgcccaaacacagtctttttataaattgttttttattcattagtataaattctaatatgagtcattattctactatttcttcaggaagccaacggggatcaccaattcgcttggctatgtgttcagtactactcaaagtaaagtcgcctttcttcggatttttcatctgaggatcgctaaaggtagctgtagtatcgtatttatccttaccttccgcattattataccaataagcattattcttgtaatcatgcttcatgttagcattaccctgcatcttgttagtaatatcattattaccgcaatctacaaaaagggtattctggaaattcaaaaatacgcaagattgtccgcgataattattccaattaacaaaatccttactgtaagctatattatagaatgtagtattgaggaaattaaactcggcacccgtgcgaccggatattttatttggacgttgaccgctgatttgcataaaatgcttaccggcttgctgtgtactccacaaggtagattttactatatccatacggataatagagctcttagctgcacgtaccaatatatcattttgctgcacctgaatattacaatcactgaaacccaaataatcgatacaatactttaccttattcatatcataaaacaaataacgattcaaaccggtcacattgcatccttgcagcataataggattgcttacaacatattctcctgtcgccacctgcgatccttcatcaggagtagtgctggtgcccaacaacgtctcactctctaaattcttacaatcaatatctgcaaacttcagtttgaaaccattgttcgtaagaaacgacgcattgccggtcatcttaattttggcatgattcactttgctaccacgaatagtaacctgctgatcagcaaaatcaataacatcgtccagtgtatattcctgtccgcccacgaggtcgatagtatactcctgaccgatcttatcctcaggaataggattggctttcaaccattcgttaatgctaccgctctctatagtggcatcagaaagtgctaaagtggagtaaggtacttcagatgcaacttcagcctctttattgttatatttggcattgcctaaagtacgaatcacagccttatattgagtatccgactctactattctgctcacactgcaaccatctactatttccttttcaatacctaccacaatcggattttcattattatccacattgtaaagtgtaaattcatagccaccggcaccgtctactaccggccatgctactactagtttagtcccatccggagatagtgttatcgtaacatcatcagccttaggtgactccaaagtcgagtttgttacattcgggacaaaaacttcatcggcatcaatccctttgtcacaagctgtaaaaaaagtcagcaccccaattaaagccatgcctatactcttcctacgcaagaattttaaattgtttttcatcacgtaaaatatttaaattaatatata

SEQ ID NO: 11758 - DNA, 30446 bp, Unknown
  gut microbiota DNA sequence
gttttattcacatcattcactatatttgcattgtttatctttctatttaatgcaaaaaaggagcaaatgactacaaatttaaacagaacctttgctgccgtacaggcagcaagccgagaattggctttactgaacgatgataccatcaatcagattttaaatgcagtggccgatgcggcaattgcaaaagcaccgttcattcttgcagagaatgaaaaggatcttgcacggatgggcccaaatgatccgaagtacgaccggttgaaattgacggaagagcgtttgaaaggtatcgcagcagatacacgcaatgtagctacgctcccctctcctttaggcaaaatactgaaagagactgtgcgccccaacgggatgaagctgacaaaaatcagtgttcctttcggggtcataggaataatctatgaggcacgccccaatgtcagttttgatgtattctctctttgtctgaaaagtggaaatgcttgcatattaaaaggaggaagcgatgccgactgttccaatcgtgccatcatcagcgtgattcacgaagtactgggaagttttaatataaatccgcatatcgtagaactgttaccagccgacagggaagcaacagccgcattgctaaatgctgtaggttatgttgatctgattattcccagaggtagcagtaatttaatcaattttgtacgcaataatgccaaaataccggtcattgagacaggagcaggcatttgccacacttactttgacgagttcggagaggtaaagaaaggagcagatattatccacaatgccaagacgcgcagagtcagcgtatgcaacgcattggattgcgtcattgtgcatgagaaaagactggtcgaccttcccaaactctgcgagaagctgaaagacagccacgtaattatctatgccgacccacaagcttaccaagcattggaaggccactaccctgcagagctcttacaatctgcaacaaatgaaagtttcggaacagagttccttgattacaaaatggccgtcaaaacggtcagaagttttgaagacgcactgggacacatccaggaaaacagttccaagcatagtgaatgcatcgttacggagaacaaggagcgtgcagccttgtttatcaagatagtggatgcagcctgtgtgtacaccaatgtatctaccgccttcactgacggcgcacaattcggtttgggagcagaaataggtatcagcacgcagaagctgcacgcacgcggcccgatgggactggaagaaatcacttcttacaaatgggttatcgaaggcgacggacagacaagatggtgagaaatacaataagataataacgaataaataatagataagatgaagaaatttacttgtgtacaggacattggcaacttgaaatcggccattgaagaagcatttgagattaagaaggaccgcttcaaatatgtagaacttggaaagaacaagacattgatgatgatcttcttcaactccagtctgcgcacccgcctcagcacacagaaagccgcgcttaatctgggaatgaatgtaatggtgcttgacatcaatcaaggtgcctggaagttggaaacggaacgtggtgtaattatggacggagacaaaccggaacatttgctggaagcgatccctgtaatgggctgctattgcgatgtaatcggagtgcgttcttttgcacgcttcgaagaccgtgatttcgattatcaagagacaatcttaaatcaatttattcaatattccggtcgtccggttttctcgatggaggcagcaacccgccatccgctacaaagtttcgctgacctaatcactatcgaggaatacaagaaaacagcacgtcccaaagtagtcatgacttgggcaccgcatccccgcccattgccgcaagccgttcctaactcttttgcagaatggatgaacgccacagattacgaatttgtcatcacccatccggaaggatacgagctggatccccaattcgtgggtaacgccaaagttgagtacgaccagatgaaagcgttcgaaggagcggatttcatatatgcaaagaactgggcagcctatgcgggggataactacggacagatattgagtaaggatcgtgactggacagttagcgaccgtcaaatggcggtgaccaacaatgcttatttcatgcattgcctgccggttcgtagaaatatgattgtgacagacgacgtgattgaaagtccgcaatcaattgtcattccggaagcggccaaccgtgaaatctcggcaaccgttgttctgaagagactattggaaggattgaaataacagaaatgtcataaaggcaatctttcaatacagctattaaagagaatactcctcgacaagaaaagatagtatcaaaacgcaaattatcgcagattatttcaattatattgataggttaatcaacaactcattaaattatttctgcgataatttgcgttaatctgcgttttatcattcattatggcactctcttcttgcatcacttttctatttccttaccagcttcctgccaggaattaaatcctttatcaagctcaaagactttatatcctttcttactcaaaatagccgcggccttcttactgcgctttccactacggcagtatacagccaccggtctgtctttctgcaacaaagaatcagccatcgaagaaaaggagtcatccatcacattaatattaatcgtttttgcgatatgtccttccgagtattcggccaatgtacggacatccagacgttgcataccctcatcttgaatgagcgcatcgaaatcttccacattcattgactcaaaatctcctttctgctgacaagagaaaagagaagaaagaaagaaaagcattcccacgaccaattgattcattttaagcatatcattctatattattcagtcttacccggagtatactcaaattcgtaatcctctatcacatcggcttccttgccgtatgtataatacctgaatttaatcttaatcccatcggcaggatgttccgattccgcatattgctttaaagggacagaaatataagcacgccggttatagtattcttcatcactatccgcatcatgatataacaacatatccacagatcttgttgtttccagttctgacttatcctcaattatgccaaaagtatgtcctttcccggtactgactttcaagttaagaatcatattcaaataatcccgtccaagccaaatactgacaacctctaccgggtctttgccttccttatccttaaaggccggatcgtccttcggtttaggagtcggtgtgaggagcgactgcaaagaataaattttagccccttcctccatcgtttcatagttactcattacacgtctggaggtattcggagaaatcgtagaccccgtaagatcttgcgaaacaggtaatatgtcccccttatcgggaataagtgtccgtatcctgccatcatcacccgcttctatcgtaacaaattccatttttaccgatggataataatagtcatcatcaccacaggcagccatcaggaggagtaatccccacaaccagatcatatataactttcctattttcatcggcaggcagctaaataattaactaacggattggaatacatcaacaacaacttctcacgcaagaagtcttcatctttattcggaatgtttatcttagccaattgttggtcaatatagtttatgaaccgcagcttctcctcttccgtatagttagcagcaaacgttgtggaaccattcaaccagtcgtaagcgacataatttccggaataaatccgatagttactatgaatacgccggtcaatactagcggaaatacgggcaaacagttccggtttcggcaaagaacggtccatgcgcaacaactcgtcgttcagacaaggagcaacttgaaaatgcactcttcccttgtatccgaaaagaccggttttcatattgattaaatcgtcctgcgttgtttttttatacccttccacatctctcttcaattggaattcctgcgctttcagaaaatcacagggatcatattcgtaggatatagcaagaggggcaatattcatttccagcagacggtctaccacatcaccttcaccacccatcgccagcattttcaagacgctgtcctgtgtgcggtcgttggaatcttttgcacgtccttcacgttgggcaatccatattgattgtttcttctgcgaaatagtatgatgcatatagcgcgacattcgcgccgacgattccaacatctgcctcatagtcagtgcacgctgaacgataaatgatttattgacacgcaccaatttcttaatccacgggtaaatcagcagattatcgccgatggcaatctctacggtatccatcccttcatcaatcagcaagatggaaagaaaacccgaatcaaggataatatccctatggttcgacatataagtataggctatattatgatccggtatacgcgaatggtctaatgtcaaagaatctgtatgttcctgcgcaatcttccacaaaatgccataacagaacgcttcctgaaattcacgttttgtcttacaagcacgcatcttctgtgccagcagttcgaatggaacgttaggtataactccggcaacaaccttttgaaaagccggatcagcaatcaattcttcaaagatctgaggaagttcctcatcattgtaagaacgaatctcattaaactctgtcaggtccataacgtgattaaaatttattttcgataatatcagtcatcacatcctttatatccagtccggctgcacgcacctgctggggaataaagcttgtagcagtcattcccggagtcgtattcacttcgagaagattcagtttctcaccggcagtcacaatataatccacacggataataccggaacagcccaatatatcatagatagccgaagtcagtttctgcacgcgtccggtcagttccggggagatacgcgcaggagtgatttcatctacctgaccgttatatttagcatcgtaatcgaaaaattcattgtgggtaactacttccgtaggtgggaagacgaccgatttttccttcgtcttgtagcaaccgcaagtcagctccgtaccttccataaatgcctcaacgatcacttcttccgcttctccgaaagctttgacaacggcaggctggatttgttcttttgtcttcacttttgtaacgccaaagctcgaacctcccagactgggcttgataaaacaaggcagaccgatcttctctattacatcttcgtcggaaaccgactgtccttgacgcagcagcaacgattcggcaatacgtacgccaaaagccttcaaatactgattgcaggcaaatttatcgtatgtaatagcagccgccaatactccacaacaggaatacggaatgcgcagcatatcaaaatatccctgcagacgaccatcctcacccggtgtgccatgaatcgtaatataagcaaaatcgaacaccaccttttccgttccgttcgtaaaactaaaatcatttctgtccaccggaaccttgttgccgtccggtaattgtacttcccagcggcggccttccatctctacaatgtacaaattatacttctccttatctataaaggaataaataccctgtgcgctacgcagggaaactacgatttcagaggtatcacctcctgctacgatagcaatgttgcgtttcattctaattctctattacttatatagcctctccacttctcgataagccgggtcatgtcatccggaagttcggaagtaaaatgcatctcttcaccagtgacgggatgcacaaaccccaacgtcatagcatgcaaagcctgtcggggacaagtgtcaaagcaattatttacaaattgtttgtatttactaaaatgagtacctttcaatatctcgtgccccccatagcgctcgtcattgaacagcacatgtccgatatgtttcatgtggacacggatctgatgagtacgtcccgtctccaggatacattccacaagcgtgacgtatcccaagcgttccaacacacgataatgagtcacagcgtgtttgccaactgtcgggtcggacatcacagccatctgcattcggtctttcgggttacgggctatattcccgatgattgttccctcatcctgctccacaatcccccataccagggcgcgatatttacgtttggtagttttattaaagaattggtttcccagatttgttttggcgtccggtgtcttggcaatcaccaacaaccccgaagtatctttgtcgatccgatgaacaagtcccacgtgcggatcattcgcatcataatcgggattatctttcatatgccaggcaagcgcattgaccaaagtgccatgataatttccatgtcccggatgtactaccaatccggcaggcttattcaccaccatcaaatagggatcttcataaacgatagtaaggggaatatcttccgggataatttcattttcgtaacgcggacggtccatcatcaccgtgataacatccagcggctttactttatagctacttttcaccggcttgccgttggccataacgaatcctccttcggcagccttctgaatacggttgcgcgaagcattgacaatacgttcgaacagatatttgtcgactctgaccatcgcctgccccttatctaccaccacccggaagtgttcgtaaagttgggactcgtcaccgaccggttctatatcatccaaatcgttctccagttcatccggaagttcttcctctatcatgtgagtctgttctgttagttatccattaaaaccagctatcttcttgtgtggaagatgattctgatgtcacaggagtttctgtatccacagcaacatcggtggagtctttctccatgctccctgccccatcaccaaccatcagtgtcaaagaagctcccataggaatcttttctccggcggtcagttgtcttccctgatacttcacgccatacacccagtctttttcaccgttcactaactggacctgattcagtttgaaaccggcacttaacagtttggcttgcgcctgacgaagagagctattgtccgctacatcaggaatcatacgcaaaggaacatccagcgtgttcactgtcagatagaccgtacgaccttcttttactttctcaccggctcccggcttgagttcaagcacgataccggcagccttatccttaacgtatctcgtatcagaaaccgaacataccaatccatgattccggaacatctttgtcgcctcctccacactcatccccttcacatcgggaacaagcaccgattcaccatgatgcgtgtagacatcaatccatttcagcacgccgaataccatgactgccactatcacaatcatagcggcaatattcaaccagaaaaatttatttgttttaaaagaaaagaattctctaatagtcatacgcattgctgtttatatgcgccaaagatacgacaaaatagttgaatttataaaaaagaggtgatgaaaagtttgctataaacaaaaaggcagagattaaattccccgccttttttgtttccctgatgatagataaaagtgattaccacttctgtccgttgtactcatcagaaacagtcagtttctttctgccttttgcacggcgagcagccaatactctacgaccattagcagatgccattctctcacggaaaccgtgtttgttctttctctttctgttagagggttgaaatgttcttttcatttttgtatcttgttttatgttattattctacgtaatcgggctgcaaaaataggcactttttttaaattaaccaagagataactcatttttgctcaaaagtttttgtgttttttactgatttagattacttttgcactcgatttccgacgaaaacaattaaataacaataatataataagaagaatagcagtatgattaatgctcaagacatcaaaaacggaacctgtatccgtatggacggaaagctctatttctgtatagaattcctgcatgtaaaacctggtaaaggtaacactttcatgcgtactaaactgaaagatgtagttagcggctacgttctcgaacgtcgtttcaacatcggtgaaaaattggaagacgtacgtgtagaacgtcgtccttatcagttcttatataaagaaggagaagattatatcttcatgaatcaggaaacttttgaccagcatcctatcgctcacgacttgattaacggtgttgacttcctgcttgaaggtgcagtattggatgttgtttccgacgcttctaccgaaaccgtattgtatgcggatatgccgatcaaggtgcagatgaaggttacttatacagagccgggcatcaaaggtgacactgctaccaatacattgaaacctgctactgtagaatcaggagcaacagtacgtgttcctttattcatcaacgaaggtgaaacgatcgaaatcgatactcgcgatggttcatacgtaggacgtgtaaaagcataagttacatagaacacaataaagaaagccggaagatcaattgaacttccggctttctttattgtgttttgcacgggcattcttatttatatcccgccgctttggctattctcttcggtatttcagtattatctatcttctcaccgaacaaatgtgaaccggctccaatagcgaatacaggcacaaaaccggcagaatgtccgccactcacccagccaaccatcgcgatctcatccataacttgtttggcacaagcagccataggctcgctcttcgagtacatactctcggcaaacaccactttattcttcacaaatgacttttcaaattcgtcgtgcaacttcttttcttgttgccaagaaataggtaattgtttccagaatcccatttcattgccaagaaattctttcatatcttcccaagtcactttgttacctttggcttttctcaattcactgatacgttgagaaagtccgtcagccgaatgtttttgagattgcaatgctttcaagttcagttcatattttccggttcccaatacgataccacctgtttcgtggtcggcagtaacgactatcagtgtttctttcggatgcttcttataaaattcataagccactttgatagcgttatccatatcttttacttcattaaatacggtagctgcatcattcgcgtgacaagcccagtcaatctttccaccttccaccatgaggaagaagcctttattcttgcctttagtcaaaaagtcgatagcgctttccgtaatttgcgccaacgtcagatcattctctttgcggtcaatggcataaggcagacatgacggattagccccctcttcctgaatgagaatcattttttcagccttagctgattttgctttatagtcattgtaaccacgtgccactgtatatccagcttcttcaaagatagggaaaatgcttggagcctctttcttgtcaaaagaagttgtcggtttcaggaatccgccacctgcataaaagtcaaaatcagctttcggcaagtcaagagcaatctcataatacatattacgatccggttggtgcgcgtaaaatgcggcaggggtagcatgatcaacactgacagaagtagtgacaccgactttcttaccggctttcttcgccttttcagctacagtttgaatcgcattcttatcttcccccacagaaatagcgtgattataggttttctttcctgtagccaacgcagtacctgcagcggcagaatcggtcacggaattagttgcagagaaagtagtcgccatcgtggcaaccggaaattgagtaaacaacaaaggctcaacaccgatacgtccgttctgaagttccgcctgatacatctccgtaccattcacttggttgactcccatcccatctccaatgaaatagaatacatactttgcctgaccgttggccacaacggaaataaggacaaagaacaatgtgtagattaactttttcattctttagcaaaattattattagattagttagtaccacctacaaaggtataaaaaaaggctacttctgatgttacaaaacaaataatattataaattcatcacgtcctgttcaaaccgttccttatctccagcggccctattgcgcatccggctacggtaattatagatcgttgccaatgagtaacccaagaaatgagcaatcttattactgtctaccacccccaaacggataagagcaaaaatacgaagttcggtagtcagcagttcatcagatttcggatatatccgtccctcctctaccaacaaatcgttgaaagcggaaatgaaattcggaaaaagtttcaggaaagacttatcgaactcattataaaactcgtttcgttcatctttaataaactgctcggactttatagccttaaacaaatcctcaatccgggaagccatagccaatttagccaatgagcggcggtacatctccaacttatccagatagttcacacatctgtctaaataacgggcaatatatacttcttttatcttgcccgtctgctccagttctttgttcacagccaacatctgccgattagccaaactcaaatcacgacgcatagcagacagtttcttcatccagcgatacaaaaagaaaatagctatcaaaagaaataaagacaacatactgacactaataagcatcgctctggaaacggcttgttctttctcttctttcaacttataggccttatcgataattgggaaaaactccgtcacttcaataaacctcaaacgggcattgcaggctacggcatcttccatcgaacaactcaagtacttataggcacggtcaatatctcctagttcatacatcagatgtgccaacttttgcaaagaggcatactccctgaccgaagattccaaatctgcaatagctgtcaatatgagataataaacttctttctcaaaatccttcttcataccgtacgcttcagacaatgtatagtagatatacactttctgccgttcgtcaaccgcctctttcaaagcctcatcaagtatcaccagagctgtatccgccttaccactgacgatacatttctcggccagaacaatcgttctgttgatttccggtgacattacactaataatagaatcccggtataaatctgttttttcgagatatttctttttcgcttccttattagtagtgtaatcagccagccaaccataacaagcacgataagtctgataataagccagcaaggtttctttgtccagcttcgtcggattcatcctctccaattcctcaatagcttcaatatacattcccattacccctaacaccgttgcacgatcaataataatcttattgtccaattcagggcgattcagttgcggaagcaactcctgcttcttatttatataatgaagggcagaatcagcctgataatgaagataagcatcaaataaggaaccgtatagacgatatttgtcggcaggggcatttgaatgcgccaattgcaatttcaagccttcaatttccttttctttctgaatctgataagtctcctttttatttatgatgtcgtccaactttttaagagctgccacatcatctgtctgttttgcaaacattgaaacagaaccaaccaaaagaaaagacaatacacaataggctatatttctcataggttactttttaaagatgtcacaaatataatgaatatagtaatcacaatgaaatagataagccaaactatttaatttccacttatattttcgccgattccaaacaataatatacaactgataatcaattaaataaaatcataaagcggttatatttttattctagacaccttttctgattcaataggtcgctacatttgcaacatccgaaataaaaaggagtagaaacattagttagcttacaatttaataccaataaataaaatgaaaaagaatcttttactcattgcattcctctgtatttcatttatagcgaatgcgcagcagaaactgacttcaccggatggaaatctggtaatgacctttcaggtaaacaaggaaggtgctccaacgtatgatttgatttataaaggcaaaacggtaatcaaacccagtactttaggtttagaattaaagaaagaagacaatacccggacagacttcgactgggtagaccgtagagatctcaccaaacttgactcaaaaacaaatctttataacggttttgaattaaaggatgcaaagaccgatacattcgatgaaacatggcaaccggtatggggagaagaaaaagaaatccgtaatcattataatgaattggcagtgacactataccagccaatgaatgagcgctccgtcctgatccgttttcgcttattcaatgacggtctgggattccgttacgagttccctcaacaaaaatcattgaattatttcgttattaaagaagaacattcccagtttgccatgtcaggcgaccataccgctttttggataccgggcgattatgatacgcaggaatatgattatactatctcccgcttatcggaaatcagagggttgatgaaacaggcaatcactcccaattcgtctcaaactcctttctcaccgacaggtgtgcagactgctcttatgatgaaaacggatgatggtctttacatcaaccttcacgaggcagccctcatcgattattcttgtatgcacctcaacctggacgataaaaacatgatattcgaatcttggctgactccggatgcaaaaggggacaaaggatatatgcagacaccttgccatacgccatggcgtactgtcattgtcagtgatgatgcacgcaacatccttgcatcccgtattactctcaacctgaacgaaccatgcaagttaccggacgcaacctcttgggtaaaacctgtgaaatatatcggtgtgtggtgggatatgataaccggaaagggctcatgggcctacaccgatgagctgactagtgtaaaactgggtgaaacagattattcaaaaaccaaacctaacggcaaacattccgctaacaccgctaacgtaaaacgttatatcgatttcgctgccgccaacggttttgatgcagtactggtagaaggatggaacgaaggttgggaagactggttcggtaacagcaaagattatgtattcgatttcgtcactccttatcccgatttcgacgtaaaagagattcatcgttatgccgcaagcaaaggtgtcaaaatgatgatgcaccacgaaacttccgcatcagtccgtaactacgaacgccatatggataaagcttatcaatttatggtggataacggctataactctgtaaagagcggttatgtcggcaatattattccccgtggcgagcaccattacggacaatggatgaataatcattatctgtatgcggtgaagaaagcagcagactacaagattatggtgaatgctcacgaagcagtacgcccgacaggtatctgtcgcacttatccgaacttgataggtaatgaatccgctcgtggaacagaatatgaatcattcggaggcaacaaagtataccatactacaattcttccattcacccgtctggttggaggaccgatggattatactccggggatcttcgaaacacattgcaacaaaatgaatccggctaataactctcaggttcgctctactatcgcccgccaactggcattgtatgtaactatgtacagtccattgcagatggccgctgatattcctgaaaattatgagcgtttcatggatgccttccaatttatcaaggatgtagctattgattgggatgaaagtaagtatctggaagcggagccaggagaatatatcacgatagcccgtcgtgccaaaggaacgaatgactggtatataggttgcactgccggagaaaagggacatgagtctaaattaagctttgacttcctcgaacctgggaaaaaatatgaagctaccatttatgctgacgccaaagatgcaagttgggacaaaaatccgcaagcatacgttatcacaaaaaagaaaataaacaataaaagcaaacttacactgaaagctgcaataggcgggggatacgccatctcagtcaaagagataaaataagaccttaaacaagtttaattaagattccatagttttcaataggtattcatatagaagtactatttttgacaaacttatttaataacatgaaaacaaaaaaaatgaatgaaccgggtaaaataatgctgctatttttagtagccattatgtttacggtacaggcagttgcacaaaacctgtcagtaagtggactcgtccaggacggtaccaccggagagggagttatcggagcaaatgtagtagttaaaggtactaccaatggcaccattaccgatctggatgggaagtttaaattacaggccaagcaaggagacatcattgtcatttccttcatcggatataagacacaggaattaccggccgcagcacaaatgaaagttgttctgaaagatgattcaaaacagttggacgacgtagtggtcatcggatatggctccgttaagaaagaagacttgagcggatcagtcgttgccattaaagctgaagagatgaacaaaggtgcagtcacttcacccgaagaactgatcatgggaaaagttccgggattggcagtcgctcaaggtgacggtggtccgggttcaggttctacgctacgcatccgtagcggttcttctctgaatgccagcaatgacccgctaatcgtcatagacggaatccccgtagccaacaattcagctccgggtacaccgaatgctttatcgaccattaatccgaatgatatagaaacttttaccgtattaaaagacgcatcagcaacggccatctacggttcacgtgcatcaaacggcgttatcatcatcactaccaagaaagggacacaaggaaaaatcaaggtaacttataacagcagttatactttcaaagatccttataagcgttttgaaacgatgaatgcagatgagttccgtcaggcagtgacgaaccaatatgccgaaggcaccgctttaggcgatgcagcacgcaatctgattaatctctaccctcaacagtctaccgattggcaggatgctatctatcaaagtggtctgagcaccgaccaaaatatatccgtagcaggaaaagcagggttcatgcctttccgcgtgtctttaggttacaacaatgaacgaggtacaatcaagacatccaagtatgaaagatataccgcatctgtcaatctaagtccgaagttctttgatgatcatttgagggtggatatcaatgtaaaaggaacgattaacaaaaatcgttttgctgattcgggagcagtaggagcagctgctttctttgaccctaccaaaccaatctatggtattgacacagaagaccctacatacggtagtaatttatataactataacggttattggaactggagcaccggcaagaatactcccaacacgctttcttccgccaatccgttatctttactctacgatgtggacaatgcgggaactactaaacgaagtctcggcaatatccagttagattataaaatacacggattagaagatttgcatgccaacttgaacgtaggttatgacgtagcaaaaagcacaggtggaaactataccgttcccggttctttccaaacagccaaagacagtgatttcaagaatatcggacgcggtaatgattggaacaatctgcgccgcaaccatctgctggacttttatttgaactacgccaaaaacatagaatccattcaaagcaatatcaatgtaatggccggatattcctggcaacatttctattacagagacctgagtatttacaaatcaaatgttaccgaaaacctgggaactaaagaaggatggacttataacgacgatgaaggacgttacatacaaaacaataacactccctcaccttgggaaaattatctggtttctttcttcggacgactgaattacaacttcaaagaacgttatttgctcactgcaacgttacgtcaggacggctcctcacgtttcagcaagagcaaccgttggggactcttcccctccgcagcgttggcatggagcattatcaacgaaccgtttatggaaaaggcacgcgatattatgtccaacttgaaactgcgtgtaggatatggtgtcaccggtcagcaggagattaccgattatctctatatcactaactactcgctgggtaacaatacgacttcacaatatatgggttcatatctgctgaaaccggatgggtacagccccgatttgaaatgggaacagactgcgacatacaatgtcggcatcgactacggatttctgaacaatcgtatcaacggtagtatcgaatattatcagaagcgtacgaaagatttattgaacacagtcagcgtagcggcaggaagcaactttaccaatatgataacagccaacgtgggatctatgaaaaacgaaggtttggaattcaatatcaatgccgtagctatacagactaaagatttctcttgggaattaggctataacgtgacttggaacaccagcaaaattactaaattgaccgctacctacaatccggattatgaaggaatcaatgccggttctgcttcatacggtagtggcacagtactacaaaagcaccaggtaggttatgccccctccacttactggctcttccaacaggtatacgacgagaatggaaaaccggtacaaaacgcagtggtagaccgcaataacgacgggcagattacgaatgacgaccggtatatgactaaaaagagtccgatggcggacgtatacatgggactgagttcgcagtttacatataaaaattgggatctgggcttcaatctccgtgccagtatcgggaactatgtctacaacgccagtgcagcggacaacggttcactgaatgctttctccaatcaaggatttatcaccaattattataaatcggcagtagaaagcaccggattcactctcaccagttctaccgagcaaaaagcaagcgatctctttttggaaaatgcttctttcctgaagatggataacattactttgggatacaccttcaagaatttgttcaccagcaagttatccggccgtatcagcgcatcggtgcagaatgtgtttactatcaccaagtattccggactcgatcctgagtgcaacgccattgatcaaagtctatggccgcgtccacgcacgttctctctcggaattaatcttaacttttaatctgtcagcattatgaaattctattctataaaatcgatcatattggtttccgccctcattttattcggcggatgtataggtgatttagacgtgatgcctctcgatccgaatgtcatgacggccgaagacgcctattctactcccgaaagttacacacagggattgaaaaagatctattcggtatgggccctctccggacaaaaagacgcaggttcttcggatttgagtgatttgaatgccggtaacacagtactcctgcgttgttggtggacactgcaagaaagtactacagacgaagtaaaatgcgcctggtcggatagctgggtaccgcaagttaacggattatcctggaatacagctaaggtggaatcaatggaagggctttaccaccgttctatgtacatcgtaagtattgcaaatgattttctgaaacaactgaacaatgcccccgacgaagtagaccgggaacgttatcgtgccgaagcacgtttctgccgtgctttagcctactacgtgctgatggatgcttttgccaatccaccttttgtcacagaagaaacaacctcgacgctaccggagcaaatcaatcgcaaagacctattcaactggctagaaaaggaacttactgctattcgtagtctccttcccgaacagacagacgaatacggacgtgccgatcaacataccgttgagttcctattggcacgtatgtatctcaatgccgaagtttatacaggaacaccccgttatactgactgtatcacttattgcaaatatattctaggcagtaatgactattcattggcagacaattatgccgaactttttatggcggacaacggagaaaataccaatgccagaaaagaaatcattttcccggtattggctgacggcaacactactcagtcctatggaataggagctatcattgtcggctcgcgttcaagtagcgaaggcactgttgtcaactacggatgcaacggtggatgggatggcttccgctctacaggaaatctgatacgtgcgttcgaatatgaagcggaagaatcagcctggaccgccgacaatttaaattcacacgacaaccgcgccatcttctatagcacaggacgttcattggatatcaaaacctcatctatcggtacatttaccacagaaggttggtcggtatttaaattcacgaacctgaacagtgacggtactccgggaaagaattccgtattccctgacacagactttccactattccgtctggctgatgtatatctgatgtatgcggaatccgtagcccgtggtggagaaggaggaagcgaatcccaagctgtgacatacatacaggacttgcgcaaacgtgccaaaaccggttatagccaagtggatgcagcttggttgaaggcttccgcatccatcaatggaagcactgccaacgtaaactttggaaatatcttaaacgaacgttgtcgtgaactttattgggaagccacccgccgtaccgatttaatccgttacggactgtttacctcgaatacttatacgtgggcagaaaaaggaggagtcatcaccggagtaggtgtagacaagcgctacaatcttttccccatacctgtaagcgatatcagcgttaatggtaatttacaacaaaacgaaggttattaatctaaaaatcagaatgtacatgaaaacaatatacggatatataggtatactgatcgcagtttgtttattacaagcctgtgaaagtgacttagacaaagcctattatagcgacggacaggctcagcctgctgtattggaggctttaccggaaacgtataccatcaacccgctgcaacaaaatgaagttgcactgacgttcaagtggagtgcaccccaaatgggatataatgcatcgatcacgaacaatctggagatggatataaaaggcgaaaacaacttcggagataaaaaagtaatcttatcttcgttggtagggaataactcgactgtttcatttacgaataaagagttgaatgactatgtactgtctctgttcaagaattatgctgatgaagcaggaatatacaccatagaaaccgttcatctggaatttcgtgtaacctctgtcatttcagaggcgaaaactcctcttgtttcaaatatcgtttcttccactgtcactccatacgacaatgaaaatacaggctacaaagcagcggtcatcacatcaacagacattagcgaactagttttagcggccggtaagaaagaagaaacggcattacccttaacgtggcaacaggcttatttgggtgataatgcaagtatcagctatgcaatagaaataaatctgcccaaaacaaacacggaatataattggagcaagaaagtgactgtcaagactactcaagaaacctcatacaatctgactcaccaagatctgaatgatgcacttgtcagtctattggcaaaatatagtaaggaagtaggaaaaactgaaatcaacctctctgtttcagctactaagagcggatatatcaaagcgctggcttccgaacctctgactatcagcatcactccgtatgtagcaactccgacattcactactgttccggaaaatatggatttaacttccggcacttcttattctctagcatgggaagctgtagaaggagctaaataccaagtggaaatggatataaaagacgcagaattctcacaaagagcaatattggaaagcggtttgaccagtacaaacctagatataaacaatgcagtcctaagcaaggccatcaaatacctgaaaatggcacataatgcagtaacgcttagtgcagaacagaaggtagagtttcgggtaagagcttatttcggtaatactgagacgggagtattatcagaagcaaaaactgtaacggtgacttatgataatagcgagaatacaccggaagtattctatctagtaggagaatactgtgcttggaaacacgatcaaactcaaaagctatataaaacagaaagtggttcgtacaaaggacacattattgcaaaaaatctttatgaagggtggaaaatcacagaccaacccaattggaatggtagaaattggggagctccaatcaatagtggaatcttgactctaggtaacgacagcaaaaatatcacttcttacggcggtaacaacaataccaactacaccgtagaatttaatccaaacaacggtcgcctcaccatgagcaatgaagaaaagtcatggatgttattaggtgaacataacaattattctttcagtgatgcatccaaaatggaaatcatttatgatgaaagtaataaaaagtggtatttacaaaagaaaggagtaaaaatgcaagccggaaatacgtggcaaatacgttcacagatattgaacatggaagtgactccacaaaatgccgaaggacatttcgaaacggatgttaccgacgaaagccaatttaccgtaagccaaaccggcaattacgagatacgttggtatttcaacgaaccgactccttacgtaatagtcattaaagaataacccatccatcaaaaaagaaaagctttatgaagaaatatttgatatatatattattactgctattcactgcgccctatataagctcatgcagtgacgagtggacagactccgacaaactgagcctcctgacaaaagcagaagaggaagaacctattgtagaggatgacattgacataagcctgctgaaattcggtttcaacctgaatcccaaagccgaaacaaacgagttacccaatgcggacgaagctttggatatctatttttatgcagaaggtaaagagttggcagaaggagaaaaagaatgcccgttattaggttatcaagaagcgtgctatctccatgccggtgtatattcggaaggtacttggatgtatgtaccggctgcctggacagaagataccgaaaaatgtaaaatggttcgtgtaaaggagaatgtatggaaaatcaccctctcacctactatacgcgattggttcggaagcggttcaactccaattgaacagttaggactgattatccgtactactgatggcaaaaaaggaatagaagaagatacctttgtcgatattgaggatgataagtacaacagctttactccgggtgagataaagctggagtcaatgccttccggactgcaacatggtatcaatattatcgacaatcatacagtagctttggtactgtatgagaaagacaaagacggtaaccgttattacgattatgcttatgtcatgggagacttcaataattggaaacgcagcaatgatgaaaactctcaaatgtattatgacgaatcagcgggatgttggtggattactttaagcggtcttgagccaaccaaagaatacgcattccaatattatctgggaaagaagagttctgtagaaggagaaaaagatacagaactacgtatagccgatccatacacggagaagattctcgatgcaagcagcgattcctatattccggaatccacttatccatcgtcccaacgtatctatccaacgaaaggggccggagttgtttcaacattcaagatacagaaagattcctattcatgggcacacgacaatttcaaaatagcagataagaacaatctgatgatttatgagttactcttgcgtgacttcaccgaaaccggagatctacagggagcgatacagaaactcgattatttggaaaggttaggtattaccgccatcgaactaatgcccgtacaggagtttgaaggcaatgacagttgggggtacaatccaaccttctattttgcacttgataaagcctacggtacttctgagatgtacaagagatttattgacgaatgccacaaaagaggtatcgcagtactttttgatgttgtttacaaccatgctacaggtagcaacacttttgcccgtctgtattgggattcgaaaaataaccgaactgctgagaataacccatggttcaatgttgaagcccgtcatgctttcaatgtattccacgacttcaaccacgaaagtccattggtacgagactttgtaaaacgtaatctaaaatatctgattaacgaatatcatatcgatggtttccgtttcgacttgactaaagggtttacacaaaacggaaataaagatacggacgtttcaggttacgatgagtcacgtatcagcattctacgggattattacaacgctatccaatccgtatctccagaagcagtaatgatttgcgagcactggactgattgggcagaagaaaacgtattagctttggcaggcatacagtgttggcgtaaaggaagtaacacacatgatgaaggctactatcaatcagggatggggtattcagagcgcagttcctttagcaatttgatacaaagtggcggaaacagtatccattttggcggatgggtaggtttcatggaaagtcatgatgaagaacgcgtagcctataaagcccaagtgtatggaaacgagaaaataaaaacggatcttactacccgcatgaaccagcttgccgccaacgctgccttctgtttcacagttccgggtcctaaaatgatttggcaattcggtgaattaggttatgacgaaacacttggtgaagaagatgaaaaaacagcaaagaagccgttacattgggaatattatgatgaacctgcacgcaaaagtttgtatgatgtatatgctaaactactagatttacgcaaaacgcacgcgaatttgttcgggcaaaatgcaacattctcatggaaagtagaaactgctgattggacagggaacacaccccgcaccatcagtttgaaatacaatgataaggaactcgtagtcgtaggaaattttggaggtgataccaccaactattctctagattctaacatcaagtacaattacatgaccggtgacgaagtatcaggtaatataactgtcgaaccacacaatttcttcttaggaacaagtttcagacctgaataaacagcttaagtagaatagattaaacatagaattaacgcaaattatcgcagataaataagaataatttcccgaaggaataatcttaataatctgcgataatttgcgttaatctgcgtctaaacaaaacaagatcaattacacctgtgtctctccttcgatgtattcctccagaaagagattctctccatcgaataccgcatacgagaagaaattaatccaatccccgagaatcagcacacgggaagttgcactcaacatgagatccagttcaatatgacgatgcccatatataaagaagttgatattcgggtggctcttcagatattctttggtatacaaaaccagatgttcctgattctctcccatataatccggttcctttccgtcaattcgtttcagtcggctatgcttggcccatgtcaaacccagatccacactccaacgaggatgaatagcagaaaacattctttgcaaagtcgtactatgaaacattcggcgaagtaatttgaacttcttatccggatcacccaatccgtcaccatgagccagatagaattctttcccatagatttcggtagtcaacggttcacggtgcataatgacaccacactcttttgtgagataatctccacaccaaatgtcatgattgccaataaagtagtgaacttccacacccatgtccgtaagttcggagatctttcctagaaaacgagtatatcccttaggaactaccaaacggaattcataccagaaatcgaacatatctcccagcaaataaacggcagaagccttatgttttatactgtcgagaaagttcaccaggcgtctctcttgtgtgcgaccatgttcaatggcgcgggaccccaaatgcgcatcggaaaggaaataaacgttcttcataggctttgagttgttacttatagtcagcttgtcactcatcactagagaaagcctagttcgagtttcgcttcctcactcatcatatctttatcccactccggttcaaacaccagattaatgatagccgaagtcactccctccaccgattctactttctgacgaatatcttccatgataaaatcagcagccggacaattaggggcggtcagtgtcatatcaagtactacttctccattatcggagacatctatcttataaatcagtccaagatcgtatacgtttaccgggatttccgggtcgtacaccgtttttagcatagctacaatcttttcttctatttcaatcttttccataggttctttccgttaataataatgcaaatataagaataaattcatttagagcagtccttcatctgcaaaactatagaattgactctcacaaacgataacgtggtctatcaaacgaatgttcattgtatcagctgctttacgaatatgttctgtcaaaattttatccggttgactcggatgaatgtttcctgatggatgattatgcacaacagctatttgcgtggccctttgtaacaatgcttcccgcaagatcatacgtacgtcagtgtaagttccatctattccaccagtactgatgcgcactttatcaatcagtttcgttgcctgattcaacaaaagagcccaaaattcttcttgttccaaatcgcacatcagaggttgaaaaatatcatagatatcttttgaacaggtgatttgaggcctttcttttatactctgcagcttccttcgttttccaagttccaatgcagccatcaccgtaatgctcttcgccggtcctatacctttaaaacgggaatagtcgcagacttcccattttgccaaggaattaaggttattatcacaagacagaagcaagcgtcgcatcagttcaacagcactctcttccgtatttccggagccgattaatatagcgagtagttcggcatcactcaatgctgctgctcctttttccatcattttctcccttgggcggtcctccagtgcccattggttgatggatagtttgtgtccactttccatttgctatgttttgagagtgtaaaggtaggcttatttaatttaatgatagaggcaatggaaaaaaaattggttgcaggcttcttcttttttctatgcagagacaagttgtacgacacccgggtctcagcatacctgacacccgggtgttgagtagcatgagacccgggtgtcagacgtattgagacccggatgtcatgcaacattccttttaagtaaaaataggaatggtagtaaacaaattaaaagtaggttacttataaaaattcttttggaaagcctcaaactcatcttttcctctgacacaacgctgccaccatgcacgcccaaagcctgtaccatagcctataagctgtataaatgcagcggcaatggaataaacgccaatagacagacttttattctgaatagtagaatcaatgcatacgagcaatacatagagaatgaccggcatgaaactgaagaggcagaagggggttcctaataatagaagtgctactcccaatgtgaatgccgccggaagcaaatgtaccagtttcagagaatccggatatttcttataaagattaatacgggcaatgccggagttatgcacttgcttgaagaacttcttcaaatcagtgcggcgtttgtgatacacccaggcatcaggaaaaagacggcagatgtaaccacctttgaatatacggatactgaaatcaatatcctcaccgaaacgcattttagaaaatcctcccaaagcctcgtacactgcccggcgaactcccatattaaaactacggggatagaatttgtccatcttcttttttccgccacgaatgcctccggtcgtgaagaaagaggtcatggaatagttgattgccttctgaatatcagtgaaagaatcgtgtgcacggtcggggccgccaaaagcatcggcaggagaagcggcaagctccttctctaccgcatcgaaatagccttcgggaaggatgacatcagagtccaatataataaggtattctccttcgctccgctctgctccgtaattacggctctgtcccggtccggagttagattttaaaaaatattttatatccaacttatccgtatatcggtctactatttctttacaggaaacagatgaaccgtcttctaccacaatcacttcaaaatctgtgaaatgctgggtagtcagactcttcaacagttcgtccacctcgtcgggacgattataaacgggaattataacggagtaacgcatatcaatcggttatggctctatttcaagatacaaagtaaggtaaaaaaaacgagaaccatgaaaaatagctaataaaaaaggcagcttcgtcaccgagccgcctttttctatatccggattttatgaacttatttcttcaggatatccattgtatcagaagcgatcaataactcttcatctgtcggaattactacaactttcactttagaagcaggagttgagattacagcttcgtcaccatgaatcttatcattgacagacttatcgatctcgatacccataaattccaatcccttgcatacttcctcgcgacacagtgactggttctcaccgacaccacctgtaaacaatacgatatccacaccacccaatgcagcagcgtaagcaccgatgtatttcttaatacgatagtagtacattttttcagcaagaattgctttcggattgccggctttacaagccgcatccaattcacgcatatcgcttgacacacctgaaactcccagtacaccgctctttttgttcagcaaattggaaacaccggttgtattcaagccttctttttccatgataaaagttactgcaccggcatcgatatcaccgctacgagtacccatcatcaagccttccaacggggttaaacccatcgtagtatccatacacttgccatccttgatagcagcgatagaaccaccattaccaatatgacaagtaatgatcttctttccttccggagttatgcccaagtactcgcatacacgctttgaaacataacggtgggaagttccgtggaaaccataacggcgtactgcatacttttcatacaattcataaggaatagcatacatatatgcatagtcaggcatagtctgatggaacgctgtatcaaatacacctacctgaggaatatcaggaagaatagcggaaacggcattcacacctttcaagttggcaggattgtgaagcggagccaagtcattgcaagcggtaaaagcttccaatacttctttgttcagcaatacagactcactgaaacgttcgcctccgtgcaccatacgatgacctaccgcattgatttcttccaaagacttgattgccccatattcaggattaatcaatgtattcaaaataaactctactcctactgtatgttccggaatatccttttccaggattttcttttctccattcggcagagtcagtttaaggaatgatcctttcagaccgattttctcgataccaccttgagcaatcacctctttagtggtcatatcgaacaatttatatttaatagatgaacttccgcagttcaatactagaatcttcatgtattcagtgtttgacgggttagtgattaatggttagcttttgctgcgatagcctgattagctgtaatagcaatcatacgatatacatcttcgatagaacaaccgcgagacaagtcattcaccggacgggcgataccttgaaggatcgggccgattgcgtcagcgtgtcccagacgttgaactaatttgtaggagatattaccaacttccagactcggcacaaccaatacatttgcttgtccggcaacttgtgaacctggagctttgcttgcacctacttcaggaacaagagctgcatcagcttgcatttctccgtccaagtcaagagtcggagccatttctttggcaatctttgtagcctctaccactttgtccaccacctcatgtttagcagatcctttggtagagaagctcaacatagcaactttcggagtttcgataccagcaacagccttagcagtctgtgctgtgcaaatagcaatctgagccaattggttagcatccggaaccggagttaccgctacgtcacccattaccaaaataccgttctttccgcattccggagcatgtgtcagcaacaacattgcacctgatacacaagtgattcccggagcagtcttgataatctgcaaagctggacgcaatacattaccggtagtgttgcgggcacctgccagctgaccgtcagcatcaccgctcttaatcattaaacaaccataaaacaaaggatcgtttgtcaaattacgagcctcttcgatagtcatccctttcttcttgcgcaactcacacagcaactgtgcatactcttcatgtttcggagaagtttcaggatcgatgatagtagccttgctgatatttcccaagccccattttgcagcaagctcattgatttcagctggtttacccagcaaaataaggtcagcaacttcgtctgtcaaaatctgattggcagctttcaatgtgcgttcttcagttccttcaggaagaacaatacgttggcggtctgcttttgcacgcgcaacgatttggttgattaaattgagcatagatatattgaatattattataaaacctgcttacaatttgttatttgcggtgcaaaagtagtcaattttgtaatatccacattacaatttagtccatttttctcctccacatctaaaatattataatatttaacactgtactcctatttttcatacctttgcagcgttttcaaacaaaatcaataggttattagtatatgatacgtcagtgtgccatcttatttggctgtttggctttgggtgagctaatcgtttactttacaggaatcaaacttccttccagcattatcggaatgctgctactcaccctctttttgaaattaggttggattaaactgcactgggtacagggattgtccgactttctggttgctaacttaggattctttttcgttccgcccggcgtggcgctcatgttgtacttcgatgtaatcacggctgaattctggccgattgtgatagctaccattgtcagtaccgcacttgtacttgtcgtaacaggatgggtacatcagattgtccgtaaaatcaacttaacacataagaccaaatgagcttcttagagaataatttcttcctgttggctatcaccttcgggattttcttctttgccaaattgcttcagaagaaaacaggactggtattattaaatcctatattgctgaccatcgccctattaatcatcttccttaaaatgacaaatatctcatacgagacctataataaaggaggacatctgatcgagttctggctccgcccggctgttgttgctttaggcgtacctttatatcttcaattggagatgataaaaaagcagttattgcctatccttctgtctcaactggcaggctgcattgtcggagttatttcagttgtactgattgcgaaatttatgggagcctcacaagaggtaatcctgtcactggctccgaaatcggttactactccgattgcgatggaagtaaccaaagccatcggtggtattccgtcactgacggcggcagttgtagtggcagtaggtctattgggagctatctgtggctttaagaccatgaaaatcatgcacgtaggcagccctattgcacaaggtctctccatgggaacagcggcccatgctgtcggaacctccactgcaatggatatcagcagcaaatatggagcatacgccagcctgggcctgactctgaatggaatcttcactgcactactcacacctacgatccttcgattattaggtgtcttgtaaaaacaaaatctcttgattttccgttatataaagagttaaacgcaaaaagcaattttatgattccatttaaagatatcacattagcagacaaagacacaatcacctcattcacgatgaaaagtgatcgccgcaattgcgatctttcattctccaatctttgcagctggagattcttatacgacactcaattcgcagtggtcgacaactttctggtattcaagttctgggcgggagaacaacttgcttatatgatgcccgtaggtacaggagatttgaaagcagtattgtggaaactgatagaag

SEQ ID NO: 11759 - DNA, 23189 bp, Unknown
  gut microbiota DNA sequence
aagtcctgaccggttttcacaccgttatactctcctgtcgggtcgcctacatacccacgggcatataccacttctgcttttgagcccacacgacttttcagtccatccaacggagaaatctcatatttcactttcaaagaagaactaccaccgcccacagtcatcatcttaatggcattttcaccgataacggctatttttttagctttattcaaatcgataggcagtacgttaccgttgttctgcaacagtacaatcccttcttctccaatctgacgtccggcttgcccgtgttcgggagaacctaaagagccaaatggtttgtgcgggtccattgaagtacggaaaatcagacgaaggacattactaaccttttcatccagttcctttgttcctactttaccctcttttatcagtttcaggtaagggaaagcaaggtaataattatcatacgcatttctcgttccggcagacagtccgttcgtccatgaaccaaactccaagtccatgccgttatgaatagcctgttcggtgttgtgcacaccaccccagtcggacactacaacgccatcaaagccccattcatcgcgaagaatatctcgaagcaggcgcttgttgtgacaggcgtgctgtccctgataaagattataagagcccataatcgaccatgttccaccttcctgaacagctgctttaaaagcaggcaggtatatctcataaagagcacgatcacttaattgtacattggtggtatgacggttgaactcctgattgttcaaggcataatgcttcacacaggcagctaccccgttctcttgtacacctttgatgtaaggaaccaccatagtggcggacagatacgggtcttctcccatatactcgaagttacgtccgttcaagggagtacggtagatattcacaccgggacccaacaagatgtctttcttgcggtaacgcgcctcttcaccgatactttttccataaaggtaggacattttgggattccatgtcgcggcaaggcatgtgagtgcgggataagcaatacaagaatcgtttgtccatcctgcctgattccattcatcccataatacttccggacggataccgtgaggcccatcggtagcccatacttccggaataccgagacggggtacgcctgccgaactaaatttagactgtgcatgaatcatcctgaccttttcttcaagagtcatccggttcaacgcatctttcactcgctcttcgattggcttgtttgtatccaaatataccggtttctgcgcacagacaggcaatgcggtcattatggacaggccaagtaacattgctttgagtttcatattcatataatttctattcttattcagactttactaccacagtattcatactttgagccagattctcaattgttgatttcgaaccatccaacggagcatagatttccaaactggacttcaacatacttccatcacaaagtttgtttatttcttcctcattcattgccgaacggtagaagaacagttcactgtactctctgccctctgtagaactattatcaccgataataaacttacctacagtcagtctctcgttcaattctcctgctaaactcttatcggtgtatagcaatgtacgtccttgtgcataataatgtgtcaaagatactacatgccattgattatccgtaacatttccacctactattttaccttgcgatggagagttatatactacctttccctcctgaatcttcaaagttcccatagtattgccaccatttgtaaaagtggcaatcgttccatctgtagcacctttcaccttaaaagagattgtaaacggatgtactgtttcttccggagtaaattccaaaacctttcccgccaaagtatatgaagttccggagacacgtgcaggaagagtcttaccagcttctattgcatcaaataacgaaggaaccatagcataaaggaattcacggtgtccttctgtattcggatgataaagatccgtaccattctgataaccgtctgcccatttaccactaccgttatctattgcacctaacatattgacagaaggaagatcccactcatgaatcagcagattcatctgttttacatatctataatcgctctcctcaaaatctccacgagtataattattcatcatcacgggatatttaccgtcttcacgcgctttactaatcaaagtctgcatattgtctttgaattgattatagatagcctgctgatcggcagccccatgtattccctcattacccaaagaaagtccgaagataacatacttgccgcagtcatacaacaaatcattgtaacgagccaacaaattcaatgtactgtttccaccaatagaaataccagatgtataccatggcagacgggtctcctgattcttgaaacgctcgtcctgcaattcaccgaacatataggcataaccatgattactgtctgccccctgtccgttagcgacagaagatcccattacagaaatcttaaaaggatctataccttcttcaccacaatcaatatagaaagcgaaacgacggagatctaaagtgatattatacgtaccatgattcaaatttatatcactggtagaatagccagaattggagaaagccacttcattagaagtatcagaaatacgtttcattgtataatcccaacttttgttcataataaagttgaagcgggcacggtcacttgccgtaccaagtccggtcagttttacccgtccaccccatacacctttaccttgataggcaagcggtacaccagttccggcattccaacctccttccgtaacactcccaacaatactccattcttctaccggagtaatggtataactcttctttgacatatccactacaatatataccggacctgtcacctctgccgagataccgtaactattcatcgccacaacaccaggttcatgtccctttccaatatcagtagatacaccctccgatgttacccccttgaaagaaaacttacccgattgaagtgacaaaaaagcttcaaacttattacttaccttgtctgtcggagaaatcatgtgcataggcacttctccttcttctaccgcactaccggttattgtcaacgaagtaaatgtttggggacgttttacatcggtatattcttctagcttcaaagcatttattgccatatatgctcccgtactacgagaaacagcaaaggtcagggtgccttcttcatccggatagactaatccggactcgcagatattagcaatattctggttaaccccttctccgcctaaatttgttccggcaatctgcaactcaccttgataactgttcaacccggacatcgtataataagcaacacgtttctctgtggcacttcggctaccgaacgcatagaacttatatgccttctccttatccaagccggaaatggtaaagttattgccattctccccactctctatatagaaataatcttctgtagctgtagatacggcaaaatctttcaacaactctgcgtcaggagttaacaaaccacctccgccagaacctccattagtagaaaaacgggtattcaacgtcagtttatagcctacggaagtaccttccgagttaacaaagtcttcaaatacagagttaacagcagcataaatcccatcattattataaatgttattccaatagtgtccgttctcatccggactttcagtttgagaccctctcgttccccctcctaccgaaccaaaatcaaaataaagagtttgtaccaatacaggattgataggctccggcgcaggtatcactacctcttcgtcttcccccggtatgggagaaacaacaggctcatcgtcattgcaagacccaacagtaagcactccaaagagtgccataaccaaaagtatatgttttttcatgtcccttctttttatagattaatatatgatatagttatcgtatgccggaccattcttccattttcatgatattcaaagggatataatcacctgtcgcacgggagactgtaaacaaaatctttccttcttcatccggatacacccaatccgattcacagatattctctacattatgattcttcccagtacctccacaatcggcgccggccgcctgtaattctcctgcccattcgtttgtaccagctatcgtgtagcgtgctgtacgaatctgagttgcgtctcgactagcaaacatataaaatttgtaccctttatttttatccaagcccgaaagagtaaagttaccattatcttccaacttttctaagaagaaataatcaccggtggctgtaatcactgctaaatcacctaatttgtctttatccggattcgtcaaaccacctgctttattagccgtaaaacgtgaattcaacgtcaatgaaaagcctgtctgatcattccttgaatttacaaaattggtataaacagagcccttctttgcataaaatccatcattattaataatattattccagtaatttccattattatccggggagactgtcggttccccgcgagttccactttcattaccaccgaaatcaaaatacaatgtctgtactagtgtcggttgcggtttcacctctccatctgaaatcttcttgaaagaaattactgccttatcatttccggctgtcaaatcaacagtaagtacataggtcgctccctcttccagctttacatcattagcaagttcaaaatttttgctatctgtcaacttcaacaatgcttctgtaccggaagccaatgttatctgagaaaattctcctccataaccattctggaagaagaacttagcacttatataatcaaaacggaaacgctgtcctattgatgaaccatgttcagggcctgccactccggtaaactgatatttctttgatgaaatttccggcatacaatagttgcttccgatattccacccaaactggctatccaatgaaggagagccgactccccaacccattaaccaaatagcaccatgtccgtcatcagaaagagtagcctcctcatcaccgttcatgcgggtcacactaaaatatttctgcttcatattagctactacacgatacttgccattcaccggtaagaaagtcaatgtaccattggattctttcctaaaataatccggattaatccaccagccatccagatctatacccacaactactatggactgtccctgagtaaatgatttctgtatcagataagtattcgcatcctgtgctatcatcttctctccgtcaaacaatacattgaccaatggagaaactgcgtatgtaagaacattgaaagttacctcataaggttctgcctccgtaccggagaaagtgatgggatccacattcttcccttccgaaagctgattctcattatcccatccgaaagtcagttcgttaccgttttcaccgactttcggggttttaaaataagccttcatatcctgaggaaatctaccggtcacactataattatacagagactgcctcttcatcagatattcttcacccatttcgtcaaccaaagtgacataagggaagtccggtcgggacaaaacaacctcccgctccatttccgtagtagtgaaatggatattctgaaggacaaacttcaaagtagccctaccatcaatcacgttgggataataaggcacaaagactttgcccgtataatcgctaccacttgtcttggtgcgaatcacagtttccgacaccaattcctctccataaaaaagtttcgctttcaaagtagaaagaggtacatccacatccgaagccttaatggtgaacgggagactatcgccataaagcgcacttactttcccagttccgagttccatatccggattacccgaaaggaattcatcgtcactacaggaattcatgaccagtattcctatcaatgccaatattatatagatacttttattcatgtctttatacttttaaggttcttatttcaacttcgcccaacggtaagaggtcacagacttgccaggaacatcataagcaaaatgacgtttaccatcactgatagttatcctctttgtcttctcattgttattcatcaaaacaaaggcgtatgtaccatccgtattctcgaaagcagaatacataatattgctgtcggaatagccggatgcaccgatacgtactgcgcccggtttcactacacttgaaagatgggcaataatataataatgtgagttacgaatgattgtcttatagtcactattgctgatatccaccgctccatagcaagtctggcaaccaccttcacgattgggagcacggtcattatcaagcatcagattccatacaatcacccctttacaccaattgttcactgttcccaatgcaacttctttcatatcttccagcaatcgctttgacaagtcacgtccgctattccatgtaccgatagaagtttccgtaaacagtagttctttctcgggataagctttatggatttccagcagttcctcacgatcgccgccataattgtgatatgctgcaccggctatatactgggatgcatcgctatcaccgtaaatcttgaccggatactgtttctctgcctcaagattgctgtaatcataattatgatcataggcataaatctttgtatccaatcccgcagccttgaactgaggtccgagtgcagttttcacaaagtctctctgttcttcccaactcatgtacatcgaagccgaattgccatgattcaatggctcattttgaggagtcacagcataaatatcaataccttcggccttaaatgcctgtacccattttacgaaataggtagcatagtcttgataataagcaggattcagctgtccgcttgtccacgtcgtcagcggggtaagatcttccaaactctttaccttcatccacaaagggcaagtccagggggctgcaataatcttaatagaaggattaatagacagaatctctttcagaatcggcaagatatagtttttctcttcactctgcaaagcaaagttctctattcctttcgtatcgcaacaagtatattcgctcaacgaaaagtccgaacaaccaatcgaaatacgaatataactaaacccgaaaccactattatcagagaatgtttcggtcaggaaatcatggcggtccgtcggctgcatctgtaaaagattaaagcaggtagctcccgttatggctgccccgaaaccatccattgtttggtattgttctgtaggatccagcgtgatagaagtaggtgctaggttatccttcgagctgaaattaaccgcatcacgggttaaatcacgtgtcaggctgttggtcgttgcataaatcgttacatctccggttggaacaggtactaccggtttttctgcgtcgtcactgttgctgcatgcagctaatatggtgaagcatcctaaaaaagtcaatgctatatttctcatgtttatcataatcttaagtttctaatatattaataacccggattctgttgaatcttatcattcgcatcaattactgactgcgggataggcaagcgataggagttcttatcgaaagcataaacctgtgccttgcgtcctgaatctttcgcatacacagcattcatcacttcttctaccttgtccaaacgtactaaatcaaaccaccgttgtccttcaaaagccagctccaaccgacgttctttaagcaaagcgtcaatcatggaattcttgttttcacggatagatgaaggaagtttccccaaaccggcacgtttccgtatttcatcaataataccggcagccgcttccaaatcaggtgtatcctgcattatcaatgcctctgccttcagcaacaacacatcagcataacgatattttatgatactactattggccgaacggcatttatacatgaacggataattatccgacggataataattgctccacgaacagtcataataaacaaccgactctttaaaacgaacctcatcaccttctttcttgaaagcattaatcaagtcacgtgacggagttacccatttcgcccatgtgaagttggtattccagttcaccaaatcgcgtccgaacatccacgaacaccaattgcccgctccgggagtaaactgtgcctcaagaatagcttcctttgtattacgtactttcgcatccgtattagcatcgttcatgccaaacaaatcgctgaagtcttctaccaaatcgaagccatccgctttcacttcatcacaatattggattaccttcgtatagtcacgtaacggcttttctgcataaattttagctaataatgtacgtgccaccgatttggtgaataatgtcttattgctcagtgtattgtccggtgcatacttcacagcatccaataaatctttctcaatctgttggtaagcttcaagttccgtattttgctcaggaaaatactgggaatatacatcttcaatattatccgaagtaatatcatccgccacagttgtaatcaccggaaagtctccccaaagacgcaccatatcaaacataatcatagcacggaatatctccgcttccgctttatactgtgcccgttcgtcggcagtcaatgaattatctttcaccaggtcgatgttgcaaatcagcttattggcacgggcaatatcctccaaataccggttccagtcacgctccaatacagaattcgatccttcaatagaattattttcaaacggaacaacttccgctcccgtagtacctgcataggcattgtctgaatgagaatccgcaatcagcagcaaatccacataccaatgttcctgacgatcacgcatctgattgtaaagcgtagtcagatggctttcaacagctgccttatccttgaacacaatcttcgttccgttatccgttattccttctgtcacatccgaataggtgtctaatggctcataatccagtgaacaggaagaaatccccaataacaaaccggacgtcaatccacaaaatatagttcttagtttcataatctttcctttcattagaattcaacattaataccaaacacgtatgatctgcaatgcgggtaagttccccagtcgataccctgcaccgtaccgctattaccccattggttcacttccggatccataccggagtaactggtccacgtcaacaggttggtagctgtaaaataaggttgcagacgggtgattccccatttcttcaagagtttgcctttcacgttgtatgacaaagagacgtctttcaaccgcagataactgccatcctccacgaaataagtagaattcaacagtttaaaattggctttcggcacatccgttatctgtccgggtattctccagcgtcccagcacgcgggtcgactgattcttaccatcatacataccttccgtttcgatacgtgaagcgttataaacatcatttccgtacgaaccttgtataaagatactcagattaaaacctttccaagagaatgtgttggtcataccgtaagtgaaatccggattcgggtcaccgatataagtacggtcggaagatgagatcttaccatcatgattcaagtcacgatacatcagctcaccggtttccgggtccacaccgtcgctaatatagccatagaaacctcccaaagcacgccccggctcattacgtacgacataatcattgactacatccgctgtcttcgcatcataatacactttttgcagttccagcttcgtcagtttattccggttgaaagaaatattgaaatccgtatcccaagtaaatgctccgccacggaagttcttcgaactgatagaaaattcaaaacccttgttcaccatttcaccttcgtttctggctatcgaagtggctgcggcagcaccggcaggcagagatacattcatcagcatattctttgttttcttatagtagtagtccgcattgaacgtcaaacgtccattcaagactgtcaaatccaaacctatatttgtctgtgtggttgtctcccaagttaaatcggatgtacgtaagttcgcctgactgatggtcggtacggcattggcataatccgtcttatccccttcctcacctttcttaaaccattcgatacgaccgatgttataacgttgcagataagcatagtctccgatacccgattggttacccgtttgtccccaacctccacgcagcttcaagtcatcaatccaagtcagatcttccataaacttttctgaagagatacgccaagcggcagaaaatgatgggaataccccccagcgatggtcaggatgcagtttagaggaaccatcagcacggatattggcagtcagcagatacttactgtcgaaattataggctacacgtccgaagaatgacatgataccccattgggaagcccctgttccggtattatcccaagaaatcttattggctgcattcaaggtctggatctggtcatcacgataatgagaaccgttaatccaactgtttgaatagtcggaatccgtccacgacgaaccgaccatgacttccagtccatgctttttgaagttcttattataagtcaagacattatcaaatgtcaggaccgtattcatgttccgattatccgaagcctctccatattggttgcgtccccaagtagtggaaataggatcaaggaaagtagtattgacagcattacggcggtcaagagtaagtgtcgatttgaatttcaactcaggaagaatcgtcagcaacacgttaccggaagccaataaacgattttctttatctttattgttctttgcacgtgccatattctccagtggattggtgatattgcccactccataaaaattattataatattggttcgggttcaaagcgtcccaaaccggagcatacgtcggagtattgataaccgccagaataacacctccccgattcgctcctgtacccatagcgcctcctccattgcttgtatagtcggaataagagatattagcactaacagtcaaccatttacgaacctgattttcgagattcacacggaagttataacgtttgtagtaagagatatccaacacaccttgttcattcagatatccggcagaaagatagtatttcatcttctcgttgccattggatacagcaatctgataattctgggtcttccctgtctggtatgtctcgtcaaaccaatcggtgcggtcgggcaatccgtcaggcagagacaccagtccgatctcgtcctgcaattctttgtactgtgatgcattcaaggactccactttatcggccactttattcagtccgaactgggcagtcagagaaactttcgcatttcccgtcgcacctgcttttgtcgtaataagaatcacaccgttagcggcacgcgaaccgtatatagatgcggaagaagcatctttcaagatctgcatactctcaatatcattcggagaaaggaacttgatattgtctaccggcactccgtctactacatatagcggatcgttacttccattcattgaagtagtaccacgcacacggatagacatctcgcctcccggcgtaccattgggctggatgaccgatacacctgccgccttaccctgaatggcctgtccggcagatacaatgggacgcatatccagatctttggtggatacggaagaaatggctgtcgtcacatctttccgtttcaccgagccataaccgattaccaccacttcatcgagcacttcattatcttcctgaagtgtgaccttcatttgacgggtagccttcatctcctgcgacttatagcccacataagagaataccagaatggcattttgttgaacatttaatgaaaagttaccgtccagatcggtaatcgcaccgttagtcgttcctttttcctgtacactaacaccgataagcggttcgttctgcgcatccagcacctgaccggaggcagtaatttgttgtgcggatgcactcaatgatagaaacattgccagaatagcaaagagaatcttgcgactccccgaaaggatttttcgcctgttctttttcatgcgtactaattttaaagttaataataaacgtccgtccgcaatggagttcctctcattgcttccgaagcacaggtcaaaattataaagaaatgagaacgaattcataaggaggggacaataagtggataccattaaaaggcaaacaattcatttccaaaagcttactctcttttcttcagtctaaaaaagtggatagtttacaaccttgattagcggatttttcgtactaaatcctcaaaatcctctctcgagccacgagttttgttcttcacttttgcacggtaattatagattgtgttcaccgaataacgaaggaactcggcgatctgtgaactgtcttcaatgcctagacgtatcaaagcgaaaatacgtaattcggtattcaacagttcgtctttcttcaatacaatccgttcattatcctgcagcaggtcattaaacttcttcacgaaatcggggaacagatgtagaaaggctgtatcgaagttggcatacaactcttccaactcttcgtcaagagcatcctgcgaacgggttatctttaaaagttctgctatctgtccggcggatactttcttattcaccatacgccgataagcatccaaacggttaatataggtggagcacagcttgataaaccgcgcgatatattcctccttaatctgattggactctgaaagttctatgttggtggaggacaggcaactgttcatctgcctcaactcctcattcagtccgtttaactgctcgttagcctgttgaagatggtttcgtgcatccgcaagtttcttcatctgacgatagatatagcccaaagccactatcaacagtaccagcaatgtagtgataagcaacagatattgctggagacgaccattctgcttttcaatcattgcctgataagtcttgtcaatcagtgaaagtacatcagcactttgccagctacgcaaacgggcattgtagaacttggtcgcattccatgagaaacgcatatactgataggcacgctccatatctccgtcctcataaagaagttgggcaagcatccacagcgacgcatgatctttaatagccgaacggatatctgaaatagcggagatgcagagattcttctcctcccctagatgatccccactgtacttgtagatgagggaacgatgataagtggccatcgcatattgaggtgtatacggctccatctccgccaatcggaggtcatttattttcaaggcttcctcatattgatgttggtcacgaagcaacgcttcacgcatcaacagacgttcttccgatgcaggcggcaatatggcgtacaaagaatccctatatgcctgcgagatactccaataatgtcccgaaagggctttatcctgtgtataaacgctcaattctccatacacatgatcgaaacaagtgtaataatccgggattaagcgagcggctacctcctgacggtctaccgactccaaaacgtcgatagactctgtatacatccccgtcgaagatagtagtaatgagagctgcagcttgctttctatcttccggtctgtatcatgcagatactctgcaatccgtatattctcattcaaataatgaatggcggaatcgcagataaaagctctgtattctttgtatatctgattattcaagttgtaatgttccgctgacttgacctctattccatttaccaataacttaagatgtccgatacgcaactcacgttgggcaacgtatgtctcatgctcttgaatcgtccggtcaagcacgttcaagagtgaatctaaagtcttatcggcccaagtatataacggcaaagaaagaaatacaaggaataacagactattctttttcattggagtatcaagctttaaaatacaaaagttagttattcagttatttttcttcttccaccatccagcgctccacattccgcttttccgcactgaactccacaccgacttttatcacttgccgaccctccgccgcataaggaagcgtatagcctttctcttcaatctgttgcagtgtctgtccggcagttcctttcaacttaaactcgaatacataaacaaacttaggagtctttacaacagcgtctgcacgaccccgtgagctatggacctccgcttgggtgaactgccccatcagcttgaatattaaatatatgatgacttgataatgacgttcagtctggctattcaactgattcaagtcactgaacacactaacttgagaaaactttgtgacaccggtcagaaacgcaaaacggaggtaacggtccgcactcttcaataccccgtaaaaagcctttaaggtagaacgataagactcaagaagaggttcattctgaatggcctgcaacaatggcttatcatactcatccaccaataccacaacacccttgcccgtctgttcggaagcacgacggatgacataagcaaaacgttcttccgaagcacggtcacgcttttcttctccatacaccgcttcccatcgttctaagtgctgatttaaaatagcatccaaatccgccggagtggtgtacttacgggcattcaagtcaagatgaagcactggatgctcttcccacttcttcttcaactcttccacagcaaaccccgtaaaaagctcacgtctccccttgaagtaggcttcgaacgtagatatcaacagactttttccgaaccggcgcggacgacttaaaaagaaaggcttgccaatgttcgctatagtccacatcaatgccgttttgtccacatacagatacccgtcattgcgaatatcctcgaaagtctgaatcccgatggggagttttctacccgttaccaacatactgcttctgtttttagattgttatcacacacgtatctgatctgctacaaaaatacgaattatacagacgaaaacaagtagcatccctcttttttaattagaatcactcttcatccgttccgcaaatacgcacacaagctacagatcgtcaacgagcggcacaataaaatgcatctgattgccacgtcccactctcttgataatcccttcggccgcaaaagatttgaggtcggcaagcgcggagttcttcaagcgacctgtgagttcagtataagtagcccttgtgatgaacccatgcttccggatatgctgcaatacaatttgttccagttgctccctgttccactctttcgaagtacggaaaccgatacatctcctacgttccaaatctcccctgataccggtacggaaagacttggatgcacggaaattcactccatcaaaggaaactgaatttgaacgcaagtcattcttgttctccaccaggcgggactttactttggctgaaaagaaaccgaattctcccaattcgacgcggtatccttcacccaggtactccaacgtctcgttctgcaactcggaaaggattccttctatcatcccctccttgaaaccggttctctgggccactgtccggataagacgctctgccgtaatcgttccgctatacacaatgtcggcatacattgtttccttctcaccctctttcgtggtaagggacggttttttcttcaaattgtaataagccataattcttttcttactatgtttaggactcttcagtgcagagaataagaatgttcagtgcagaaaacagtgcggttttatgtagccgggaagtcgtcaccttgcaaggtgaccatcggcaccttacaaagggacaaaaggcactttatagggtgacaaacggcaccttatagagtgacatctctttagagaaaagaataaaatctgtaaagatacgaatttaatcagcgaaaagcaagaccgcctactaattatttgtaaatcaacgtggacaaatattcctctgcaaacatttcattggacacctccaacaactgttccgccgtcaaagcttctatgcgtttaaagacaagctcggacgactcgtatttgtgataatgcaaataggttttcgccattcccaaagcattattttcaaaattgtccgaagccactcctatttgccctatcagttgcttcttggccgccgccaactgggacgaagtcatcttcgtatcccgcatccgcttcaactccttataagtcagtttcaaacaggtatccatatcttcaacatcagtgccgaagtagatacagaaagctcccgtatcggtgtaagaagtcagattggactcgacattatataccagtcccctacgttcgcgcagagatacattcagcttgctgttcataccgggaccgccaagaatattgttcagcaaataaagcgccgtacgcttatcgtcatacgcattgtatccacgactgccaatcatcacatgagcctgatgcgtatccttagcgaccatcaaatgctcgggagcataaagcggaggaggcacacgtcggctgtttacctctccggcagggacatccgacagatacttctccgccagacggattattcttctgaagtcatattgcccttgaacgaagaataccatatttcccggctgatagaaccggcacgtaaacgaaaggacatcttcggtgcgaaagctacgcaacagttccggcttacccaggatgttcctccccaacgggtggttacggaaaatcatatcctcgaaatcatcgaatatcaattccgacggagtgtcttcgtatgattggatttcatcaatgataacctccgtttccttctcaatctcgtgttggggaaaagtggaatgaaacacaatatcccctagcaattcgagcgcccgttccagatgttcggtcaggaaagcggaatagactaccgtttcttctttattggtgtaggcattcaagtcgccgcctacattctccatccggttaaggatatgccaggctttccgcttctccgtccccttaaagatgagatgctccacaaaatgagccatcccctgttcgtgctccgcctcgtctcgtgttccggcgtcgatggcaaaaccacaataagctactttcgagagagtcggttcatggataatacgaagaccattcggtagtgtatattcgttataatgcattgttttctacttccttattgaattatgccgcaaaaatacaataaaacttattgctgtttatagaaaattgcagatatttgtggactataacagtaacaacgtatatggaaaagataggaatattctgttctgccgccgcaaacattgacaaaatgtactttgaaagtgcccgccaaatcggtgagtggatgggtaaaacaggtaaaacgttgatttatggaggagccgatctcggacttatggaatgcgtagcgcgtgccgtgaaggaaaacggcggtaaagtaatcggtgtagttcctaccaaactggaagagaaaggacgtgtctgcacgttccttgatgaagtgatccatacccacaaccttagtgagcggaaagatatcatgacagagaaatcggatatcctggtagcattgccgggaggcataggcacattggacgagatattccatgtaatggctgccgcttccatcggataccaccggaaaaaagtcatcttctacaacgaatacggtttctatgacgaactgttgaaaacactcaagacattagaagataaaggatttgcccggcagcctttttccacctattacgaaatagcaaacacgccggaagaattaaaagaaaaaataaactgatcatatgatagactccatcaaacaactattgcaacaggaagcacaagccgtgctcaacatccctgtaacagacgcatacgagaaagctatacaactgattgtagagcaagtacatcagaaaaacgggaaactggttacttccggcatgggaaaggccggacaaattgcgatgaacattgctactactttctgttccaccggtattccgtccgttttcctgcaccccagcgaagcgcaacacggtgacttgggaatcttgcagaagaacgacttgcttttattaatctccaattccggcaagacacgtgagattgtcgaactgacccggttggcacataacctcgatccggacttgaagttcatcgtaatcaccggaaatccggacagtccgttggcacaagaatcggatgtctgcctgagcaccggaaaaccggctgaagtctgtacattaggaatgactcctaccacctcgacaaccgcgatgaccgtcatcggtgacatcttagtggtacagaccatgaaaaagacccaattcaccatagaagaatattctaaacgccaccacggcggttacctgggagaaaaatcaaggtcactatgcgaaaagtaatcggtatcggagagaccatcctcgatatcatctttcgaggagaacagccttccgcagccgtgccgggaggctccgtgttcaacggcatcgtgtccttaggaaggatgggagtcaacgtcggtttcatcagtgagaccggcaatgaccgtgtagggaatatcatcctgcaattcatgcgtgaaaacaacatcccaaccaatcatgtgaatgtatttcccgatggcaaatcacctgtatcgctcgctttcctcaatgagcaaagtgacgctgaatatatcttttacaaggactatccgaagcaacgtctggatgtactgtttcccaaattggaggaggatgatattgtcatggtaggttcatactatgccttgaatccggtattgcgggagaagattctcgagttattggatcaggcgcgcgagaagagagccattatctactatgatcctaacttccgttcttcacacaagaatgaagcgatgaaactggcccctaccattatcgagaatctggaatatgcagatattgtgcgcggttctttggaggacttcctctacatgtataatatgcaggacgtagacaagatatacaaagataagataaagttctactgtccccgttttgtctgcaccgccggtggcgacaaagtatctttgcgtaccaacctggtcagcaaagaatatccgatagagccgttggaagccgtcagcaccattggagccggtgataactttaacgcaggcctgatctacggattgcttaaatatgatgtccgttaccgcgatttgaacaacttgaatgaagagatctgggataaaatcattcagtgcggaaaagactttgccgctgaagtttgccaaagtttcagcaattcggtttcggtggagttcgcacaaaaatataaataacaattatttcctaattttatataggcatttttgaaaaagattccatatcaaaccggtatttacttttacggttcggtatagaattataaatctcaaacatgagaattaaatcacaagctagtatttatcaaatattatatttacctttatcccaaattcaactttagcgataaaatctaatataatcatgagaaagttcattttacctgtattactctgctttatttttatcaatccggctacagctaacgatgaaatcaagtcattactaaaaacattagataaagccctaaagtataaattagattatgcagaacaaaagcaagagcaaatagatagtcttaaaatagaactgaagttacatcataaaatacgtaaaaaagtacaaatagccgaattattatgtttcgcctattcttcctttcaaaaagattccgctttaacctatgctattcatatgaatgagttagctcaagaaagtggagatagagagcttatcatagaagccaagctagactatgcacgtattctatcttccatgggatttttcaaagaggcattgtccatcgtcaatcccatacaacatgaattattatctcccaaacttaaagtggaatacttcctcgggcaagccactatctacaatcaccagaagaattttgcttccaatgaaatagaatcacgcaagaatgatttgatagaacaaacttatcgcgactccttactccaatgcgcagaagtcccttccaatatacgagctttcacaattgctcctatcctgctacacaaaaagaaatataatgatgccatccatatgcttgacagtgcttatttaagctatccccaatattcgcggaatgccggtatattagcttattcattagcctccgcttatcaaggcaaaggtgactctaagaatgcggtcaggtattttaccatatccgccatatctgatgtaataaacggaactagagaaaaccgttctttgcgaatattggcaaaacttatttttgaaagtggagatatagatcgggcatacgcatacatgaaaaatgcaatggaagatgcgattttatgtaatgcaagaattaatactatcgaagcctcggatatgtatctcttcattgacaaagcttttcaagagaaagaaaaacgcaaatttgttattatcagtagcctactcagttcgctgtgccttgtttgtatcctattatttatacttttcacccaactaaagaagcaaaagaaaaaagtggaacaagccaataaaagcctgtcatatcatttggatgaaatacaaaacataaactctgcactggctgatagcagtaaaattaaggaagaatatgtgggattatatatggagcaatacaccaactatatcactcagatagatagtttcaaaaaaagagcccttaaaatagcaaagagtgaagatatcaataaagtggtttctttcctcaagtcttcgctaaatacagaaggagacttggcagagttttataataatttcgacaaagcaatcctcaacttattcccaaacttcgtagcagacttcaatgcgctcttatcacccgaaaatgccataatacccggtacaggcaaactgctgactcctgaactgagaatctttgcactaattcggttaggaatcacggacagtgtaaaaatagcccatttcttgcaatattcgctgtctaccatttacaattaccgctcgaaaatgagaagcaaagctattggcgaccgtaactctttcgaagaaagagtgggacgtatcgggcaataaaagctactctcaccataacaaaaaacacccactgtaataagctgttttctctcattgcagtgggaataatactttctcatattggtgctaaaaaagccctttgcacacatctgcctacatcaaggattgactttgacaatctgctcccatttcagtttcgtcggatagccccaatccggtttagtaggatcacagaaatcgccaacagacgccattcgggcataaagtaatttagtaagctcttcacgtttcttactatacttaggattatcataaagattattcatttccattgggtcggccttaaggtcgaaaagctgcggatgacgctgaccgtctacattatagagtataagtttgaaaccatccttcttgatagctcgttgaaggttaatatatgtcagcaatatgtccttacgctttttcacttttgggttctgtatggtttgcgctaatgaaatacccttaacagtagtcggtgcctttatattcgaaagatcacagagagtggggtaaaggtcataaagataacagtaggcatcgcttgtaacattttgcgggatattaggtccgcatattaccaaaggcactctcaccgccgcttcatataagttctgtttgcccaataggccgtgttctccgacacaaaggccgttgtccgcagcaaatacgatgatggtgttatcggccttgccgcttttttcaagcatatcaaggatacgccctatctgaacatctacctcgttcaccatactataatagttagccctttcagcaagcacctgttccggtacacgcggagtaggcaacagtttttcatcacgttcattaaggtctccattatcaaacggatgctgtgtgacaaaattctttggcatcgtaatttccttgctgccgtatttgcgtccgtaatcaggtaatacgttacgcggatcatgcggcgaagtaaatgcgacatacatcagaaacggattatcgttcgatgcatttgtttcaatgaacttgatggcggcatcggcatacaactcagacgagaaagtattgagtgatgcgtttacccattgcccatttttgtatttccctgtcggatcgtactcatgcagataagggcatcggtgtcccttttcttccttttcatttccatagggatgcattcctccgaaaaaaatgttcgcacccgtagagaacgaacggttgaatgcagctttgtcactgtgccatttgccggttccgaaggttgtatagtcgttctcacggaacagttcgggaaatgttttctcattcttggggatgatttgtccgttgcggtgtacgtccatcaaaccgcgtccggtaaggagcatcgcacgactgggctgcgagatggcgccattgagcccgcccattacgtgagtttgggtgaatgacataccctgattgacaagcctatccatattcggagtctgaatttcattattaccccaggcatggatagtgctgaatgtctggtcatccgttagcaatacaagtacattggggcgtttcaggctattttctttattgtctttttccgaatttgccccgaatacagaagagcctccaaaaggtatgttcaacattgccggaaggcataagaacagagtcttgtttttcattttgaaattcatcatactagttttattttatgatttaagtttctacttagacggtgcctggcaagggactgccccccaagcacgataatgcccagtcattgcattgttcaatttccgaaacatatccccttgcaaaggtaacggagtagtttccaaagagtcctcttccaaattgaacatctgcgccttttcaaagggaagattctgtaatagtttgtactcattatacctcactgcactctgtgacttgccaccaaactgcgcgccaccttcatttcggagccagaagacaaagcggtcttctgtgttctgggtctttcccttaatggcatccagtacggaaataccgtctatctcatgcttgaccggtacattcacaaagtcacatatagtgggcataaggtccatcatcaccacgaagtgattgtcacgtcggccgccttcgaaaactcccggcatattcaatgcgcaagcgacatgaataccaccctcaaacatatcgcctttggcaccccgggtag

SEQ ID NO: 11760 - DNA, 1202 bp, Unknown
  gut microbiota DNA sequence
tcttgcaatctttcgggtgaactgttagcggattgatctatgaaaacggtgtcgctgcatggttgctgaccgagtccggttatatcactttggctgatgataagtaccattactatctgaaagatcatcagggcaataatcgtgtagttgttgatgaaaccggcaatgtagaagaggtgaatgattattatcctttcggtggcctgatgtcttcttcttcgaattcagttcaaccttataagtataatggtaaggagcttgatagaaaaggtggtttggattggtatgattatggtgcgagacattatgatgcggcggtaggtagatggcatgcggtggatccgtcaagtgagaagtattatggctggagtccgtatacatattgcaagaatagtcctgtgttgaggattgatttggatggaaaggatgattatgtagtgaccaaatcaggaagattattcaatgaaaccccaaagaatatgaggaatagaagttctacggataaccttgcttcctttggcgaccgttcgaagtcgattaaagtaaaagcgggacttcttgggaatatgtataattcacaaaaaggaaatgcgtacataaaagcttatggaagtacacaagatttggaaacagctgctgcagtatttaaatttgctgctgacaatacctcggtagagtggaaattagatgtatatgatgataacagtattaaaacagcagtagtaacagataagagtgaatattctgtgaatgggacctatgctcaaaagcaacttcagatagaaggtgagagaataatagatattcattcccatttatcgggaggtaccaaaggaggagccgggaatgattttaatctggccaaacctaaacgtaaaaatgctgtttacattagagatagtggaaaggagggaatgctatatgagtataataacaaaaagtcgcagataaaatctatacctatattttcaaaagaagacctattacaatatatacgaaaatagtaaacatatgagaaaacttatcagaattattatggtagtgatattttggggatgtatgtccccctcttctactcttcctgagatacatcaacgtgttgccgatcaagtaaagatcttgatagacaagggacatttgtctgccccttacatagagatttacgaatcattctctaatgattctaatgttttctattatat

SEQ ID NO: 11761 - DNA, 12718 bp, Unknown
  gut microbiota DNA sequence
agattgttacgttgacccatcaaaacaccttctcgctaaaggctacaaaaaacccccgcaaaagtaaatattttgcgggggtttgtatcttctaaactgttagattgttggactaccaagattcgaacttggacaaacagaaccaaaacctgttgtgctaccattacaccatagtccaaacttatgcgctttctgttaaaaagcggtgcaaagatagaggtttgcaagcaaacctccaaatatttcattcatttttttactttgctacctaataaataatgagctattactttgcaatcagcaaataatagttctttttaccgcgctgaacaagcagatatttctcatcaagcaggtcagctgccgtaattacctggtcaaaagctgccagcttttctttattcaacgaaacacctccgccttgaaccaacttacgcatttcacctttcgaagcaaatacagccgcattatcaacgaataagtcaacagctttcacaccttccgccaatgcatcacgggaaatctcaaactgaggtacgccttcgaatacagcaagcagcgtatcctcatccaatttacgcaacgcttccgaagttgcattaccaaacaaaatgtttgatgcatccactgctgcgttataatcttcttcggaatgaaccattacggtaacttccttagccagacgtttctgaaggatacgcaagtgcggagcttcccgatgttctgcaatcagagcttctatttcttccttctcgatggaagtgaaaatcttgatataacgttctgcatcagagtcgcttacattcagccagaattggtagaacttgtaaggagacgtataacgggaatccaaccagatatttccggattccgtcttaccgaacttaccgccgtcagcttttgtaatcaacgggcaagtcagcgcaaaaacctctcctccattcgtacgacgaatcaattcggcaccagtcgtaatgttaccccattggtcagaaccgcccatttgcaatttacatccctttgtttcatataaatgaaggaaatcatatccctgaagcagctgataagtgaactcggtaaatgataacccgtcacgcgcttcaccattcaggcgacgctttacagaatcctttgccatcatatagttcactgtgatatgcttacccactttgcgagcgaaatcaaggaaactgaaatctttcatccagtcatagttgttcaccagttcggcacgattaggcacatccgactcgaagtcgaggaatttggcaagctgttttttaatgcatgcctgattgtgacgcaatgtctcttcatccagcaggttacgttccgctgattttcccgaagggtcaccaatcatacctgtagcgccaccaatcaatgccaacggtttatgaccgcagcgttggaaatgacgaaggatcatcactccgcaaaggtgaccaatgtgtagcgaatcggcagtcgggtcgatacccaaataggcagtcacctgctctttgcttaacaactcttctgttcccggcatgatgtcctgcaacatgccacgccatctcaattcttctacaaaattcatcgtattactctttaattattaggtttttattctatttcaatcccgtagggggcaaaagtacgactctttctcggaagatacaactcttatgccctaaaaaagacattttgaatgttccggcggatggtttctcgcagtgtttccactcctaccccacgcactcgggctgcccgatacagaagctcttcgatatcaagcgaactttcgtctgtctccagaaacagacgatcatcggataccgctctcattgcttcatccgaataaaactctccgaaagatagatacaatcctttaccctgcaattgttccgcctgttcgggctttcccctaaagccatgccatatccagggctgtccgggccggaattgctttttcacagccaatattttatccgtcattctcacattgtgaagaatcagaggcaaatcatattccatcgacagagtcatctgcgccataaatgctgccgtttgaatttccattgaagctcccttcaatttatccagtcccccctctcctatggccacaatgcgcttgtcgggcaaatgctcaataataaaatccgattgctgtttcaaattatccggtgtcagttcccaaggatgaatgccgacagaataataatatccctcttgcaacggcgttcctgccaactgacgataattgataatcgccttaccaccggactgttcctctcccttatgggtatgaatatccaaaatagcattaacagcgtttatatcactctctcccattattactttttatttatatgattaaggtacgggatcataacctgagccaccccacggatgacatctcagaatacgtcgcacagtcagatacaggccttttacaggtccatgtttcttaatcgcctcaactgcataggccgaacaggtcggtgtgaaccgacaagaaggaggagttaacggtgaaatacaaacccgataaaaataaataggaataagcagcaagaatgaaaacactctccgcagcatatcttttacgaatatccagctgacagatattcggaaaccatgaaatttcatgaggacagtttttcagagatgcgcgaaagcgctattttcatcttctcttccaattcggcagtcgctgtaagctcgtccgacagatagataaaggcgattgccaaatgctgttcccggccttgcagacattcctgcaggatggatttattcttccggtaagcctcacgtatctgacgtttcacccgattgcgctttaccgcccgcttaaaacgtcgtttcgacacgctgatcagtatggaagccgaagcctcgccttgttcgacaggcatatatacaacgcgtatcggaaagatggaaaacgactttgaaatgccgccctcaaacatctttccgatcaaaatcttactattcagcctttcggctttgcacaaagtatatatacccactttgtttatttattgttttctttgataaacatatcaagcgcagcagtcattgacggagcctgcaccgtaggagcctcaagatccagacgaagcccggcgtcgcgtacagcctgtgcggtagtggaaccgaaagtacctatctttatctccttctggttaaaatcagggaagttctttttcaatgaagtcactccggcagggctgaagaataccagcatatcataatcaaagtcttcatcaggtgtaaaatcattgctgaccgtacgatacatcacagcttccgtatgctgtataccgttcttgtcgagcagattcttcacatcgtcattatgcacgtccgacatcggaacgaaatatttctccgttttatgcttcacaatggatggaatcaggtcttcaatctttcctgtagctccaaagaaaattttacgcttgcggtattgcacatatttctggatgtacaacgcaacggcttccgtcacacagaaatacttcatcgtttcaggaatcgtcacacgtaactcggtgcacaagttaaagaaatggtcaatagcatgacgagaagtgaatataacggcagtatgatcgagaatcgaaattttctgttgccggaattctttcgccgaaagactttcaaccttgataaacggccggaaatctatttttacgccatacttctctgctatgtcgtaatagggagatttctctgacgcaggcttaggctgcgaaactagtacttttttaattttcaacgtcctaaaattttattagcaatatatcattaattcgaaccataccttgatagagtagcagacaaggtactatttcaagagcgcaaaagtacaaaattaataggaaaaggtcgccaaattgatgaaaaaaaagctttatccacttataaaacatcaacattttggtgaaaatcagaataattgagccgattataatcaaattggtaaaactcaagtcgaaataaacgagaaaaagcacgaacggaaaaagagcaaatccaatataatatatgagtgcggaataagattccagccacatatttgtcctgtttttattaaagaaagtccaccccagaaacatataaagtaaccatttcagtaagagataggtaaggcaaaagacgacatagattcccactagcaggagagaggacacatgatccataagggtagggcacgtatcatgaaaataattgaaaaaagtgatacccgacaacacgcaggtctgcaatactaacaccagcagataacgcacatcagccgctgtagagctatcgaaaatacttgtccgttcgcgatgcagtacaaaatctttcacttgctgagacagaaatttctttcctttagccaaagcaatagacgaaagaaaaaagcaaaccagcaaggtcagagcaatagtatcatctgtacggggagaataggagacaggaatgccttcaacaccggaagtaaacagctccacaatcatatagccgcaaatttacgaatggaaatatcccatacaggagtctcatagagcaatctcaacgcctcttcaggtgtctgtgccactttccatatatctccatgctgttgacgcataaaattctcgtcaatcgccttcccaagcatttccagtaatggatcaaagaaaccgtttacattcaaaatgacaataggattgagatacagccccaattgcttccaggtaataatttccagcagttcttccaacgtaccgcagccaccgggcaatgcaacaataccgtcactcagatttgccatcttctgtttccgttcatgcatggattctacttcaatcagttctgtcaatccggtatggtgccaattctgttccaccataaaacgggggatcactcccgtcacttcaccgccattcttcaacaccgcatctgcaacggcacacatcaagccgatactgcctgccccgttaatcagacgaatgtgatgttcggcaagcaagctgcccaactcttcggctgctttaaaatatacaggatttatcttggtgctggaagcgctatatacgcatacggaatgtatctggttcattgctacgattttattgtatcaccctgcaaaattacgaaaaaaaacaaaggccgcaacctcctttccccgaaaaggaaaatgaaattgcggctcttatcaaataagtcaagctcggtttcagactatttacagaccgaaagcggctttaattttatctacatagtcgagtttctcccatgtaaagagttcaacgtctaccgtcttgtctccttcatagcgggagaagaacttcttcgttaccacctgcggttcgcgccccatgtgaccgtatgcagccgtttcctgataaataggattacgaagtttcaggcgctcctcgatagctttcggacgaaggtcgaacaactggtcgataacgcgggcaatctcaccgtcagtcatgttcacgtgagaacggccgtaagtatctacaaagatattgatcggacgagccacgccgatagcatagctcacctgtacaagcatttcgtccgctacgcctgccgcaaccatattctttgcgatatgacgtgccgcataagctgcgctgcggtctaccttgctgggatcttttccggagaaagcgccaccaccgtgagcacccttgccgccatacgtatcaacgataatcttacgtcctgtcagaccggtatctccatgaggaccaccgattacaaactttccggtaggattgacatgatagataattttatcattgaacagcgccaacaccttatcatgatgaatggaagcaatcacacgaggcatcagaatctcaatcacatcacgacggatgatagacaacatctcttcgtcagccttcagctgggcagtctgcgaatcatcttccggctggataaagtcatcatgctgcgtagaaacaacaattgtatcaatacgaacaggagttccgttgtcgtcatattcgatagttacctggctttttgcatcgggacgaaggtaagtcatcacctttccttcacgacggatatcagccagcacttgcagaatgcggtgtgccagatcaagagaaagcggcatatagttttccgtttcattggtagcataaccgaacatcataccctggtcgcccgcaccctgttccatcggatcctgacgttccacaccacggttgatatcggggctctgctcatgaatggcggaaagcacaccgcaagagttactttcgaacatgtactctcctttggtatagccgattttcttaattacctcacgtgcgatgagctggagatcaacgtacgcttttgttttcacttcacccgctagcaccacttgtccggtagtcactagtgtttcgcaagctactttcgaactggggtcgtaagccaacagtttgtcaagcacggcatccgatatctgatcggctaccttgtcggggtgtccttctgacaccgattcggatgtaaataagtatcccatctttttaaattaagaattaaaaattgaaaattaaaaaatgagagagagcaggagaggtgagtgctgcaaggattaaaccgcaaagcgtcggtaagacgtgttttagcatttttttccgtggttgcaagctactcaaatctgtccacaccttcatttcgggtgcaaagataaagagatttcggagataatgagtatctttggtccgtatttaacacataaatagatttaaaatgattctaaataagaaattaaaaacgctcttagtcctggcgctttatataggcttcacgattgccatctatgccattgtctgccatttcattgacagaccgttccaggagattcatctgctgtatgcaatattgataggctgcattgcctatttgccggtatttattgcggagaaaaagaagaaataagttcccgcatcgtcttccccaataccggatgtaccagttccggagctatttccgccaacggtttcatcacgaagtcacgttccgccatcagcgggtgggggagattcaattccgctccggacggagtgactgcagagagaatcagatcctcataaagcaacaggtcaatatcaatcaggcggtcgctataagcgccattgaccgacttcttcgtgcgccccaattcacgttcaatcgactgcgttttctgcaacacatccaaaggagacagttccgtttccacacaagccgccgcattcaggaaactattctcagaggtaaagccccaaggggcagttatgtaaaaagcagacagggaaacgactttccctatctgctcttctattttttgcacggcaaccttaagattctgttctttatctcccaagttagtgccgagtcctacatacactttcgccattatttatccagaatcagcattgcatctccatacgtaccgaagcggtaaccttctttcagcgctacatgataagcatccatcacctgttcataaccgccaaaggcagctacaatcatcagcaaggtagaaagcggcatatggaagttggaaatcattgaattggctacggtgaattcatacggggggaagataaacttattagtccagccctcaaattccttcagatgtccgtccgtgctgaccgcactttcaatcgcacgtatcactgtcgtacctaccgcacacacattcttgccgttatctttcgcacggttgacagtcttcacagccgcttcatccacaaacatctgttccgaatccatcttatgctttgtcaggtcttccacatcgatatcgcggaagttgcccaaaccggcgtgcagagtgatgtaagcaaagtccactcctttgatctccagacgtttcatcagctcacggctgaaatgcagactggcagtcggggcagtcaccgcaccttccttcttcgcaaagatagactggaaacgctccgcatcttccggctctaccggacggttgataatcgtatggggcaggggagtctcgcccaattcatataaagctttcttgaactcgtcatgaggcccatcataaagaaaacggagcgtacggccacgcgaagtagtattgtcaatcacctcagccaccatcgaatcgtccggtccgaaatacagcttattaccgatacggatcttacgggccggatccaccaacacgtcccacaggcgtagttcttcgttcaactcacgcaacaagaacacttcgatacgggcaccagtcttctccttgttaccatacaaacgagccggaaatacctttgtatcgttgaatataaacacatccttatcatcaaaatactctagaacttccttgaacatcttgtgctcaatcttaccagtattacgatgcaataccatcaaacgcgattcatccctatacttcgtcgggtgcaacgcgatcttgtcttcgggtaacttaaatttgaattgtgataatttcatatctattccttattacgttaattattttcttcctcattttctatttcctgccggtctatccactctttaaagtgttcagggtccagacagtcttccagacggacatcgcccacacgtgtacgaatcaagcccgtcagatgcgctccgctgtggagtgcttcgccaatgtcgcgtgccaacgcacggatatacgttcccttgctgcataccacacgaatccgaatcatcggttccggtgtttccagacagcattccagcaattcaatctcgtcgataacaagctgcttcgcctttagttcgacttcctcgcctttccgtgccaactcataagcacgttttccatccaccatgcaggcggagaaggcaggaggaacctgttctatcgtacctataaaatgtgtcaacacttcttccaccatctcccgtgtgatatgttcggtagagtaggtagcatctatctcgtgttccaaatcgtacgacggcgtagtagcccccagtcggagcgtggcgatatactccttcgtatgatattgaaactcttctatccgcttcgtggccttacccgtacatactatcatcacccccgttgcaagaggatccagcgtaccagcgtgtccgactttcagttttttcactcctatccggcgacagatatgatagcgggcatgtcccactactttaaatgaagtccacccaagaggtttattaaaaaacagtacttctccttttttaaaattcatcagcctttatttataactcattcgcttctgcgacaactcatccaaagcccgtcagcctatttgcagattatatcccatcaacaacatcaccagaatagctccacccacgataatccgataccaaccgaaggccttaaaaccatatttggtcacgaagcttataaagaactttatagcaagcaaagcgacgataaaagccactacattaccaatgataagtgccggcatattattcatcagtatttcagtccctccatccagaaagagtttcagcaccttatatccggttgccgcaaacatcgtcggcactgccaggaaaaacgaaaactcggctgcttccttacgtgtcagtttctgcgccataccgcccacaatagtagccatcgaacgcgaaacgcccggtatcatggcaatacactgaaacaagccgatattgaatgctttcttttccgtcagcaccgtatcttcacttcctttcgtgaatattctgtcgcaaaacaacatgaacactccgccaatcaccagcataacggcaaccaccgtcacactctccaacaattcatctatcttatcactgaataagaaacccaatatagccgcagggataaaagcaaccaacagtttccaatagaaatcgaaccgatgcagcaaacgcttcagccagaaagtaccggcaggcaccggagtgttgttcaaccggaagaaccgtttccaataaaggcagacaaccgaaagaatcgcgccaaactggataataactgtaaaagccttcacaaattccgtactctctactcccagtatgttttgtgttataatcatgtgtcccgtagaggaaaccggaagaaactccgtcaatccctctacaatagcgatgataattgtttcaaatgtagtcagatcccccatctttatttctctgtcttttgagttttaggtttgcgcaacacagcgtatatcatagacaagaagccaaacaggcaaacagcaggcgctatctttattctacgtacactgaaaatatccggttcaaaggctgtttcggacgacgaaggtcccgccatcagcaggaacccgatgataacaatcgccattcctattgctagcaagataaagttcactttatcaaaggcaaatttctgcttgtcagacatagtttcaattaaaaattataaattaaaaattataaattaaagtcgcaaacgacgtgtctcactacctcaacttattacttatcactcattatccactaaatatagtataggctgttcgccctcattctcagatatttattgattgacacataggcgcagagccatgtaatcacaattccaaacaccaatacgcttgcacatacaatcaacatcacctcgggcgtgataacctggagcagctccggctcgtatgtcaccgcccaataagcagttcccatcaacaccgtatctgccacaaccgccgccaacactccgctccacacattctttcggaggaatgggccacgaataaatccccaactcgcacctactagtttcatggtgtgaatgaggaatcgcttggagtaaatggccagccttatcgtattgtttatcaatgcaaaagagataaaggtaagcactactgccaacgcaagcagcaccaggctgatattccgtatattgtcattcaccgcgtcaatcagctccttccgatagagcacatcctgtatgttggtattcctcttgatcttcttctctatcttcgcgatactgtcggaattcgcatactcggaatggagcttgatttcgatagaagcggtgaaaggattataacccagaaactctttggggtcagtgcccatcgcctccgtctgctctttcaaagcctgcttcttagagatatattcggactctttcacgaaagattcaccgttcagtttcttctgaagtttcagtatgtcggcttccttcatatcgtcactgataagaatagagaaactgatattctcacgaacatagacggaaagattgtgtgccgtcaacacgaaaaagacgaccagtcccagcaacagcaacaccagtgtcgtactgatactcgatgtaatgaactgcatgtcgaaaatcgaacctgacttatacttgtttttatttcccatgcgttatctcttttttcggaatacgtaaatcatagaactgctccgttcctttcgtcccaaagcgttgaaccaagccagcgtgcctgcatacatccctttcaggaaactgcacgaactgccacaatgtttctcgctcagcatagatacgtaaaacgcatcgaacggcatcggatggcgtgctgccataataaaaccgtgacgggaagccaactgctgtatagtgcctggagtaaaatgccaaaggtggcggggaacgtcgtatgccgcccaatattcgccataacgcttggcatcgtacgaagaacagttgggcactgccacaatcaatactcctttttccgtcagcagctcacggagtcgtccccacacctcattgaggtgttccagatgctccatcacgtgccaaagggtaatgacatcaaagctatcgggagcaaactctttcagtgccgactccggctttacgtccagattgaaatgcgcttttgcaaattcacgtgcctgcggacttttctctatcgcctccactttccaaccacgacgtaccatcgtatcggaaaagtaaccggttcccgtacctatatcgagcaaacgtcccgtcttgcgatgcgcttctctggctaccagacgcgctttactgcccagcatataggaacgtacgtaatgatagatattattcatcgcgcccttgcgcgtatcagtgtgggagatgtaatcgggagtctcataatacttgcctatctctgcttccaccggaactccttgcgtgaacgtaaagctgcaaccgtcacacgaatacagctcaaactgttcgcccgaagcataaaaatccgtacaagtcatgacgcgtttcaagtgcgtacaaccacacaccggacaagcatttatactgagtttctccattaatcctaaaacaaaattaagtgctgcctcaatgcaagaagcaacactataccctaatttggtgcaaagaaacaaataaaatgtgatggattgggctttcgttaaggacttttaatagaaatcagaaatataaaccctgcatgattttactaaatcttgagagataaaatgataaagcagcctgttgggagaaagaagtataccagtgagtatctaatcatgctaatagaaaaaattaccctgatatggattagacaaatttaagtcaactatatcaaggtaagacacgttattaattactgatcccatttaaagaatctacgtatcctatcttctttatcataaaaactttcgttattgatcgttctagataatgaatctgacttcaaaataatacctgaatatctatcatcatgttgtattctaaatcctgtcagttttccatttatattcaaaaaacaaaaggttgaatctgcaaatagctgatacatattcatccaagcctctttat

SEQ ID NO: 11762 - DNA, 4917 bp, Unknown
  gut microbiota DNA sequence
tccaatcaagcaaatgccgttatagtctttcttaattcggttagcgttaaatatatttgtctctctacggtatgaacagagattcccattatgacagctatttccttatggctttttccatgaaaacgactgagttcaaatactcttcttctgcgatcgggaattgcagccaatgcagaatagataatcccaagtatttctcgataatgaaatctttcgaaaaaatcatagtctatttgtgaggaaactgatttcaccatatgatattccatgtattcctgtctgacctgctcatgcttgtatatgttcaacgcgatattccttgtcataatcaaaagatatgagtcaaactccctttcattgtccaaccaaatattctgtctttcccaaagtctggcaaaaacctcctgggcgacatcctctgcatcaggttcggatttcagcaagacataagcaaaatattttactctggaataattgtttttgaataacatggaaaaatgatcaacagtctccacttcttcattgttagctatcattacaatacaaaatttaagaaataaaaatattaaaaaatacggaactctccttttgaatcccgtattttcttagttacactcaatgtacagtgttattacttaaaatattcaaagagaagtacgatgtcaattaatagcaaccggttcatccaattctttgaaacggacatcagtttctccattctttccattaccggaagcatctttaatgtaaggaacaccaccttcttgagtcaaatcttttccattcagtttgtaataagcaaacaaaccgtctgatgcgggatctacagaaagcatattttgtttaatctgattttccgtacgagccacactccataatctgacttcactcatatatccattgaaaggacgttctccccacataaagccttttacttttccaacaaaacatccgccgtttgacaaatcgaaacttggagtatcccaactgctttcagaggctttttctccattaatatagagtatagcctttcccgaaggttgatcataagtaaatgcaacatgataccattgaccggttttaaattcctgttcagaatggaattgcttatttccggcaatttgcatccagtcattgtgtccgcctggtaaagcttcgtcacctatacggaggatcagaataccttccgttcccataatcgtgttattagaattaaaacgatttaaatagatcaaagcttcataagtaaccgatgtgaacggactaagcggacttaccggtatcttgatataattgctggagaactgacctacagtccgtatttctaccggtttgctgatgacgagataagtgaaatccgaaccttcgatgacaggcaaagaagatgaccgcacacatacaggcaacagataagtttttccttcagcaatatctgccataccactgagttttacagtggtttgcggagcgtatatctttccggcttcaatagtggccgatgtaacttccagacttgcctgagaagggtcgagcagttcataagttgtaccatgtgcgacattgaaagcctctaccgcacttgctcctcctatttcataagttacctctgtcggcgaggaacttttgaaagaaagtctcgcctgcaaatcatgggtaatgacatcatcacccgaggctttaatagtaacactgttttcttcaaagtatactttggtttccagcaagtcactttcactgtcattgcaaccgaaaagcaatgctccaatgacaaaacctgctatgtattttaatcgaatcttattcatgataatctttaatctaattttttacttcagtggttattctccttctgtattttccccgttctgagcggctttccattcattgaatacctgctggttaatttgtattgcctgacgcatccacttataatccggagtattaccataatcattgtcaaaacgataagctcctaccccacctttgtaagtagtgccgttttcaggcatccaccgggcttggttcaacaactgcccaccacttgttgcgctagactcaaagttttctgtaataatcaactttttcaaattaccactctgtggcctataatttgggctggaatttccatatgactgtgtaatccaataatctatatattcatcaagctcaggaccaaaatgattgatatatccatcaataaccaataatttatgtccctttccctccgggtcgcttttcggaccgatgtaattacccatttcttttattagaaactccatgttagaatacccattataacctctatacgtcaatgtattatctgcatcattaaatccgccggtcggttcccagtcaatatcaaaaccgtcccattcacttacaaacaaagaatcgcaaagcgctttagcgtatttggccaatgcctctttcatgtcggcaccttcaggatttccggaggtatacccccaaaacttccaacgtgctttttttctttcttcgttcagtttactctcattccacccttcttcttcggcctgcttctccacttcttcatagacccagtcgggagtccttcctttacccaaatgagaaagcagacttacttccagcaatttaatgccttttactttctgaacaaactctttatcctttttctgtgcttccgtaatttcatatcttcccggagcaccactccacatggatatgatatccatactgtcgggaacagaagtcaaataccccttccttatcacaccggatggtgcccagttggaaaaccatccgaaagccacaggacggccatagtttctggctgtttccttatatgcccggagttcggcataataagcttcactctcttcattgttcattgtattgaaaccgccaatatgttcaatttccattttctctacatccgtacaagatgcaaatattattcccgctatgggaatcgcatataatagttttttcagtactttcataatacacatttttaaattatttatctgcaatcccaccacaatctggaggttgccttatctgttttatctttcaatttacttatagcatcttcatagttggctctatcttctgcagattgggagaaacttatcggataaaccatacggcgaatgcctttatctttggttataccatttgcagaacctctgttctcctgcacttgatgcaacttaggatatcctgtccttctccactcagtccatgcttcctgcccgttgggataaagtgcaatccatttttgaatcatgatcttttccagtttttcttcctggcttccttcaaaagctggagtagctgtagtaggttctgaagccaaataactattcttaggagattgaacccgtacaaatacaggtgcgcctgctcctgttatataagaatctacacttgtagagactccgttttcgtcaaacgacatctgaatgccttgtttatatagtgcttcggcatcaccaaactctggccattccaaagcggcttcagcgcgtaagaaatacatttccgatgcacgcatccaataagtcggtgtgcttcccgtcatattaggctgagagcaatcggtgtattctcccttacccatagtatgtccgggaggcacaggggcataccaattgtcatcaaatcccggcagtgaattctcctgtttgatacttgtaaaatatttgctcatgcgcggatctttatagccttgcagataagcatacatacttgtacccatacggcactcctgatagttgcttgccaaataagcaatattattgtcaaacgcataattggcattcggactgattttagcctcatcatctttcgcggtcatcactcctacgctatgattcaaggcttcatgcgcccattgtttggccatatcgggagcacaatatttcaaacgcatagccagacgcaacatcagtgaattggcatactttacccacttaaccggatctcctgcgtacaccaggtcaaaatcttccatcactttggcacctgaatttgccagtgaagtcaactcagttatagcgcttttcaaatcattgaacatggcagtatacacttcttgttcagtgtcatacggcacaacaagcaagccttcgcctgcatatgtataagggatcggaccgaatgtctcaagcgccttgtgccagcaggatattttcaaaatttgtgctaaagcataatttgccatatttcccgtttcttctgcattttcttttatttttttccaggaagcatatgccttggtataagtactggtataggtagacgatgtccaatcatcctgtaaatagtaggtcagatggttacttccgctataccaattgttgttctggctaaaatatccgctccagacatctgcagaaacattaaatgatgtctgatattcgttaatgatatctgttttatttgcaggggtacccaccggaaaaacttgtctggcaaggctcataatagaaccaccaacagccacaccatcccggttcgcctcctcatcagtcacttcatagggattggtgttaacctcctcataatcgcaagatgcccaacaaggcaatatgcaaaaagctaccaaaagcttatattgatttatctttttcattgttgcattataattttaatttaataccaaagccgaaacttctgacacttggttgcataaagtaatcgttaccttgaccataagttcctatagacggagtcaactccggatcgaaaggagcttcgcaataaagcatccacggattgtttgctgtgaatgaaactgttacatctttcaacacattcttaaaccatgagttggggaatgtatagctcaacgtcagttcctgcagacgaatattggttgcactgtatacataataacctgaagtatgataatctccggttccaatcattttg

SEQ ID NO: 11763 - DNA, 305 bp, Unknown
  gut microbiota DNA sequence
tccaatcaagcaaatgccgttatagtctttcttaattcggttagcgttaaatatatttgtctttctacggtatgaacagagattcccattatgacagctatctccttatggctttttccatgaaaacgactgagttcaaatactcttcttctgcgatcgggaattgcagccaatgcagaatagataatcccaagcatctcccgataatgaaatctttcgaaaaaatcatagtctatctgtgaggaaactgatttcaccatatgatattccatgtattcctgtctgacctgctcatgcttgtatat

SEQ ID NO: 11764 - DNA, 820 bp, Unknown
  gut microbiota DNA sequence
cgttccacgctaaccccaatccgtccgtgacggatttcgattttcgtcagaaaatagcaaggtgtgttctatggcacatagaaccgttttccgtgcctgaaaacgccttgccccttgcgggggtaaaaatcactccgaagtcgtaattttttaatccaaagaagcatggaaacaagaaaacctaacaagggcggtcgccccgccctcgcagacccggcgaagcatcgccatgtcctttacctgaacgaccgggagaacgcccgcttcctctcgcagtgggagcagtcgggcgtcacaagcaagtcccgtttcatcgccgcccggttgttcggcgagccgttccgggtggtgaaagtggacaaatcggcggtcgagtattgcgcccggctgaccgaattttacgcccaattcagagcggtagcggtcaattacaaccaagttgtaaaggcgttgcacagcaacttttcggagaaaaaggcactggcttttctctataaactggagaaagcgaccaccgaactggcgatgttgaaccgtcaggttatcgacctgacaaacgagtgtagggaactatggttgccaaaataagtacgggaagttccatgttcggcgcactggcgtacaaccaaaacaaggtggacagcggggaagcaaaggtgcttttctccaaccggatgctgttaagcgaggacgggaatttctctatcggcgagtgtatgcgcagctttgaaatgcagatgcccgtccagctatccaccaagaagccgatacttcatatttccataaacccgcacccggaagacgtgctgaccgaccagca

SEQ ID NO: 11765 - DNA, 652 bp, Unknown
  gut microbiota DNA sequence
tccaccaagaagccgatacttcatatttccataaacccgcacccggaagacgtgctgaccgaccagcagctttccgacattgcacgggagtatatgcggaagttgggctatggcgaccagccttatttggtgtacaagcataccgacatcgaccgccaccatatccacatcgtggggttgcgggtggacgagaacggcagaccgctgaatgacaggttcgagcatcggcgcagcaagcaaatcacccgtgaactggaaaagaaatacgggctgcacccggcagagcgaaaggaacgtgccgaacgcccggaacttaaaaaggtggactatgccgccggggacgtgaagcaccaaatcggcaataccgtgaaagcggcttgctatggctaccgcttccagttgttcggggagtacaaggctttgcttgccgcttacaacgtgtgcgccgaggaagtcaagggtgaagtgaacggcaagccctatcagggcattgtttattccgccatgaacgacaagggagaaaaggcgggcaacccggtaaaggcttcccgcatcggcaagtcggtgggttatgtagcggtgcagcgcagaatggagaaatcgggcgaagcaatcaggaacgggaaactgaaagagcgcacccggaagattg

SEQ ID NO: 11766 - DNA, 26435 bp, Unknown
  gut microbiota DNA sequence
caatcagatggatagtccccacaaatatttgtagcgagagtttttttattttcaattacttactattataagccaccaacatccaaaccagtttttcctgttctttcagataatcgctcatcatcgaaacggttacttcgtctccggcttgagaagcgatagacagaatcttgcgttcctcaccgatcagatagctgatagactggagaatgctgttcagagcctcgtcaccattgctcaccttgtccacttcattgatattagccactttcagataatcactgaatttgttggcaggagttccgcccaacattaggattcgttctgctatttcgtccaccttttcggctgtgtcgtcatacatcttctcgaactggctatggagaacgaagaaattatgtcctttgatgttccagtggaaaccacgaagattcgtgtaatatacttggaagtccgctaatagttgttgcaaagatgctactacgttgtttgctcccgattcattcagcttgataaattctaaagttttcatattcgttttatttttaatgatttatactcgttttattttttttctgtactgcaaagataaggcgtaaaatgcttgctgtcaaactgaaaatttctatctttgcatagatgaaatctataactttaaataatttgatagatgacaatacaacaattggaatacatattagcggtagatcagttccggcattttgcccgggcggctgaatattgccgggtgacacagcctacattgagtgccatgattcagaagttggaagacgagctgggtgtgaagctgttcgaccgaaccgtgcaacccgtttgccctactactatcgggcaaaaagtgattgatcaggcacgggtgattttagctcaggcggctcaggtaaaagagataatcagtgaagagaaacaatcattgtccggcatattccgtttaggagtattgccgacggtagctccttacctgcttccgcgtttcttcccccaattgatggagaagtatccggagttggatattcgggtgacggaaatgaagacgcaggatattcagcaggccttgcatgccggagatctggatgcgggaattatcgccagcaagctggaggatagttttctgacggaagaaacattgttttacgagcaattttatgcgtatgtatccaagaaagaaccctccttcaaacatgatgttatccgcacctccgatataaccggtgaacggctttggctgttggatgagggacattgctttcgcgaccaactcgttcgcttttgccagatggaagcggtgaaagtcagtcagatggcctatcgtctgggtagtatggaaaccttcatgcggatggtggaaagcggaaaaggaatcacgtttatccccgaactggctgtcgtgcagttgacggaagaacaacgtaaactagtgcggccgttcgccatcccgcgtcctacacgccaggttgtgttggctacaagcaaagatttcgttcgccacactttgctttgcgtcctcaaggaagagataaaatcagcggtccctaaagaaatgctgacgttgcagtctgttcagtgtttactgtagtctgtcagctcagtgtttgccgtatcaacttactttcgccgttttattcttgagccattggcttatttcagctcctttgaaatagataatcaaggagctgacaataataatcattcctgccactgtactgaatgtgggatattcgtccggcagcataacccaactcagtactgcaccgagaatgggattgatcagcctgcacatattgatatcgctgactttcgctcctttgctttgcaaggcgataaaccagaagctgaaggcgaagaccgagataaatacgagaatgccgagactgatatagaatccgcttggctttccgatgaaagaatgataaccttccgtgcccaatcctaccatatatataagcagtcctccgaaaaacatctgtacggcattcaggaaaataggattcacctttcccttatcttccgaaacggagatggcggaatagccttgaaaaatgatactaagcagcagaagcacgatacccgtaattcctttccagtcgagcggctcgccgtcacttcccattccgatgataaggaacagtccgataaggctgacaatgagactgataatcttatgcgcgtttaggcggtcatcgcttgcgagcagatgagccaacaatacattgataaggggagtcattcccatgatgatagacgagatggccccgcttacaaagtccacgccaaaataaaaggccgtgtatcccataaacatattgataagcactaggttcagaaatagtttgctgtgttgccgtatttcctgccacattcctttgtgccaggtatatgcgaataagataatccccacagtcgtgaaacggagtccggcaaaattcatgggagtgaaatcgtagctcagcccttgtttgataaagggattgacgatagcccatagaacagaggccaatatagcataaaagagtccttttttcatttgaaataattcctttgtttaaaaaatgttgcaaagatagctataattgtatagatatactttgactttcagacttaattgattatttttggaaaataaacaattaacaatattgatttactatgaagaagtacatttcagaaatgatcgggacaatggtacttgtccttatgggatgtggtagtgccgtttttgcgggcaatatggcgggaacagtaggtgccggtgtgggcacggtaggtgtggctttggcctttggattatcagtagtggcgatggcgtatgctatcggaggcatttcgggatgtcatattaaccctgctatcactttaggggtatttctgacaggacgtatgaatggaaaagatgcaggaatgtatatgcttttccaagtgatcggagctattatcggctcggctattctttttgctttggtttctaccggagcccatgacggtcctacggtaacgggatcgaacagttttggtgacggggagatgttacaggcattcattgcggaagcggtatttactttcatttttgtattggtagtgcttggtgctaccgactcgaagaagggggcaggtaatttggcaggacttgctatcggcctcactctggtgttggtgcatatcgtatgtattcctattacaggtacttctgtcaatccggcacgcagtattgctccggcattgttcgagggaggagaagccttgtcgcagttgtggctattcatcattgctcctttcgtcggagctgccttgagcgctgtcgtatggaattatctgggagataagaaataactcataaaaaagaaagggacggcagtttcacaactaccgtcctcctttgcgtaattaatatattaaaaaaaaagagtgtttttcattttagattagcagattagggaaattttacttcataagttttaatgccgctatatagggtatttacgcggattctcagtcctttctttccttccatccggtccttgattttatctagcttgaaagatacgtatccctcacccaaagtctggggatagtctccctcactgttgtgacggaattcaagattgatatattcatcttttccgctaccgtcttctgtggtaggagcggcttccgctttggggattaccagattcaggaaatgttttttatctgcactgtgcgtaccgtagtattggtattcaatcgtcagatatttgttatctttgttgatacgcatatcagtagtgtttattttatcatctccgattttctcttcagtattttcatcgtcatccatctcgacgatatcttttgtaagtatttcattaatctgttttacttgcacattgtagtcatatccgtttacgggagtttccagttcgttaaaaatgacaaaggcgcgttgcccctctgcaaattccgcactgttccattcctggccattattgggatacatcttttcaccgttatcgagagtgaaataaaaatccttgctatcctggctgattttgttgatcgtgctgataaccagcaggtcggccggaccgtcgttatcgtccaggcatgactgaagaatcagcgtagtggtcataatagcaaagataaaggcaatgaatttaaatttcttcatatacatacttaggttttagattgattaattattgctttgtattggaaaaatgcgtagagaacggaaatattgcattcgaatctgttaaagaaacaaaagtgcaaaaagagttgttctctaggtgcagtatttctatctttgctgcatttataaggtaaacacgtgtataggagaatggaagaatttgagttgtcggaacaatgcaggctaggcaataaccgtgcccgcaaggagctgtatgagcagtatgcggggcgtatgcttggaatttgtcttcggtatatcggcgaccgtgatactgcccaagacctgcttcacgacggttttataaagatattcgattctttcgacaagttcacctggcggggtgaaggttccctgcgggcgtggatggagagggtgatggtcaacattgcattgcagtatcttcgcaagaacgatgtaatgaatcagtcgacacccttggaagagctgccagaggaatatgaagagccggatacatccgatgtagaggcgattccgcaaaaagtgctgatgcagtttatcgaagagttgcccgtcggataccgtaccgtgtttaacctttataccttcgaagacaagtcgcataaggaaattgcccaagcattaggtatcaatgaaaaatcttcggcttcgcaactgtttcgcgcgaagagtgtattggcaaaaagagtaaaagaatggataatgcataatggatagatagagatggaagagaaagatttgtggatgaataagttgaaggagaagctcgcggattattccgagcctgtacctgcttccggttgggaacaactggagaaagagcttatgcctcctgtggagaggagaatatatccttatcgaagatggatgatggttgctgcagccgttatattactggccgttgtctcgtccgtaagcctgtattttctgggaacacctgctgcggatcatatacgtaatacgcaaactccggcattggcttctatgcccgatgcgttgccgggagtgcagcgaccggatgtgcagggctcttccgtggaacctgtattgagaccggtggctcgtgagaaccggttggcgaaggcggctcctgcagtttccgaacataaggcgataggagacgaatttgcagtggaggaggttgaatctgtttcggaagaagttgaacctacggtgaaggaagaagcggaaaagatggaagaaaagcgttcggatatgacacagactgagaatgatgaccgatctactgtcagaagacctcgccgaccttccggtaaggataaatatcatattccggcagagaaagcgacttctcgaaaagggacatggtcgatggggctttcagtcggcaattccggaggggcttcaacggaagtggggacaggaatcaatccttacatgtctcgtgtgagtatgctttctgtttcagacggtttgatggagattcctaacgaccagacattggtttttgagggtggagtaccttatctgcttcaaaaagaaaggcgggtagtagacattaagcatcaccaacccatctctttcggattatccgtccgtaaagctttggcgagaggcttttctcttgagacggggctgacctatacattactttcttcggacgcgaaacttgcgaatgaagaacatcagatagaacagaagctgcactatgtcggtatcccattgcgtgccaactggaattttctggataagaaactcgtgactctttatgtatccggtggtggtatggtcgagaagtgtgtttatggcaagctcggttcggacaaggagacggtgaaacctctgcaattctcggtgtccggtgcggtgggtgcgcagttgaatgccacgaaacatatcggtatttatgtagaaccgggtgtcgcttactatttcgatgatggttcggatattcagacgatacgaaaggagaatccgttcaatttcaatatacaggcgggtgtccgtttaacttattaatcagactgtaactattcaaaataatcatattgattgataaaggaagtctctactcctgaaagtcagggctttcttcctgtgttctggattggtgcggctttactatctgttttctttgccttattggtttggaatgcgaagtcgaaagaagtggattaaaagtgagtacattaggttaaaaataaagtcttacttttcgaagtattagtaactatttcgggtgagagttattataagtcttcccggaatagtttttatttaataatttaatgtgattgttttatgaaacacgtatttgacgatgagttattttgttcgttgaaaaacgaacttagtgaggtaagcgcacagattgatgcgcaaagtgcaaaattgatgggtctgatcgaccaaaaaaaagaatatccgctcaactgattcgggaaacgaagtcggagatacctgctagcatagaatatctgggagatccgaaaagattcatcgccattattctgcgggctattgatcagaagagattgactttcaatggaactgctaatagcgaacagactatccgttatttagcgactgtgatagacgtgattagcccgaaaactggcaaggtacttaagatagagacactggtatcttatgcgaagaagatacatgccggagagatagagggctgtaaggaaggggagtttgactggcttggataagccaggttgctggatttagaaaaacatggcgggaaatttgaaaaagacggtggcttttttcagattttccgctgtctttttcagaaagagaatacaaaagtgtgagaggtgtgagagagaattttcaactttctacttttctattatttaattctattatctatatattcaattaaaaaaaatacaaatgttacaaatcctctctcacacctctcacactttcgtggtaaatagaatgaaaatagataaaaacaggaagttttgttgtatagttgaacaacatctcgtgtatttgcagtatggaaaggaaaataattgcatataaaggatgttttaaagagttcttaaatagcttggatgcaagcaccaagataaaatattatatgtgctaatgcttttggagacacaggataggatacctgttaagtttatatcggataatgaatgtcttagggtgtagaatcgaattttcgatggatttgtagggataaaaaatgcagagttgtcaaagataactctgcatttttattagctactgtacccaatcatgggtcgctctttttattcgtatagcctgttcgattttacctgttcgggggcaatgacaaatacggcatatcttcttccatttcttccctttttagactcaaaattatgcttgaccattactttgccaatctggatcttcgctccgatggaatattgataaccggtacgctcacggatcagttcggcaatttcgctgacagtgaggtactgtaccttttcaaaccgttccggcttgcggatatgggtgagtaccagttcctcttccggtgaatggaaaatgaaatcttcattattcttttcgatccggttgttgtcctcctgcgtgaaccaatattgataacccggagtgttgagcaaatgctttatctgcgcatacagttgagtataattgattttgataaactcgatggaatcggcatggaaacaaaggaagcggcggttgcctgtcgtgtcgtgaagaatctcctgatagttgcacgttccggcaaaggaggcggtgtgtgggaagttctgcgagcggcgtgcgtacgggagacggatactgattactttacgggtcaccaaatccttgaatgtattcagatcgcgcccgctcattccttcgaattcgtcaaggttgataagcattgattgcgctattttggccaaatcgtctttactgttcggattgataaggccggtagaaagataagtgcgcagttcgggcggaagcaggttgttgataaaggttgtcttgccgatattctgcacctcgctgcatagcaaaagcacggtgtggttgacgacatcgtcttgggtggcggcagcacacatccctaccagataacgctccaggcactccgtccagaaactttggtggttggtacggacactgtccgccagaatacggatataatctgtcccgtcccattcgggaagttccttaaaatactcgcggatagggtggtagctgctactgaaatcggagtaaatcagattctgaatcatcttcacgttgcaggcatagcccagctcattcatctccatccaaatgctgttctccatcctgtcatcaagaatgcggaaaggatccggctgctctgtttcggaaaccctccggcgatattccatgatgtgaagcaactcgttatagcgcgtctcataacactcgctgatatgctgttctatttgcagcattcgtttttgggtactgttcagcttgttcgtattgaactcctccgtatgtgcataagcactggcaatcagcgaatccgtttcctccgtcgggaggtcggtaaacaggctctttatgaaagctgccgcttcctgttcgggaatgccgtgacggttgtatttgcacgccagatgatgcaggtaattgttgcggtttccttcggtgtatttttccgacttgttgtgatagtagttcagagtcaccattaatgaagcgtgtgaggaatgatagttgagcgcggtctcttcactgaccggattgttgtccgtttcctgctttttccttccgggtgttttcttcttcttttgcgttttatagaacagagggggctgttccacgatgaagggagtggcgtcacgattgaaatagatgcccggatcgtatgacaacagacaggtacgccccacatcctgaccggaggtgtcaatctcggtctggcaaagttgggagtaaaaagaagcgaccttattgtaggctgcattgtggaaatcttctatttcctgaatggtgtcgggcaatgtcccgtccggccgttgtgtgtgcgctatgattttcagtcccatacctttggggctgataaaggcgattcgggtgtagctgcacgctctcaccgtttgcaggatacgcgctaactcttctttactcaaatggtctatatctatcacgatatatcccagatatttgacaagggtcgcattggaacggccaccccgataattggcggagaatgtgacggaaggcagtttcttcttctcttcgtttgcagctttctctccctgctccaggaagatgcgtcgtacgctttctactgtgttacgatactttggactaccgatggcagatacgatttcttcttcggtcatttctgctatgatgcgatagaagtcaagaaaaatgttgaattgattcatttctttagtttacttttttagtcggctgcgaaataactcttttgcagcgagatgtaacgaaactttcgggaaaatagtgaaaagttctttcagggctctcccagatattgcacgatggtagccacctgtttgggagagagcaggcggttgcgtgcacggtaaccctccgcttccagttcgtgtaggagagggaggttgaagagaatccatctccggagaatttgtaaagcaactttgatgcatacggtagggttgtaaagatgtgccagctctgctttcgtataggtgcggatgatgaagaggttttctttgttattcataactgattgttcttgttgtatgctataaagttactgaaaataaacggtttgagaaaggaataacttcacttttattcattggaaatcaagaaacttcattcgagatcaagaaacttcgttggggaacagggagtgtggaagaggttgtatctttgtgtcgttaacaagaaggaaatgcatttctaatgtacaaaaactttaaaattattttagtatggcaatgacagtttcttattcagtagtgccgcgtaagaatcctgcaaaaaaggatgaaccggctaagtattatgcccaagcgcaatcagcgggcgagttggattttgaagagttgtgtgaggcgatcaccagtcgttccacctgtacggaaacggatgtgcgtgcctcgatttccggtattctttatgaggcgaagcgttcgttgaaggcggggcgtattgtgcggctgggtgatttgggtagtttgcagatcgggttgaccagtgagggagcagagtcggttaaggagttcgccacttcgatgatcaagggagcgcatatcattttccgtccgggaaaacagttggcggaattgctgaagattcttagttatcagcaagtgcgtacacgcgcggctgcccagtcgggcgatggaagcgatggcggcaacggtgacggaggtagtggcaacggtgacggaggtagtggtgataaaggtgacggtgggtccggtgatggcggatcggacaacaacggagaagctccggatccggctgaataatagtactaacattaatttggtaaaaatatgaaagagatcgtaagtaaaatcctggaggtgattatgtgcctcattcctttcttcggaaagggaaaacgtgaaagagtagtgagggaagtgcgttataatgctacgcacaaggaggtgtgcaacgtgaaaacaacggaaagggcgaaggaagatgagaaagattagtctgattgtcattcattgttccgccacccgtgccgaccgtgattttacggcaaaggatgtggatacggctcaccgtttcaggggattctcgtgctgggggtatcactattacgtgcgtaagtcggggcagatagaaccgatgcgggacgaggatatggtaggtgctcatgcgcgtggctacaactcgatcagtttgggtgtgtgctttgaaggcggattggacgcgaacgggaaaccggcagatacacgcaccccacgtcagaaagaggctttgcatcgcttggtgagagagttgttacagcgttatcctgaagcgaaagttgtgggacaccgggatctgagtcctgatacgaattataacggaatcgtggacccgtgggaacggatcaaagaatgcccctgtttcgaggtgattgaagaatttgagagttgagaatggagagttgagagttggctgcgcactgttatactgcatggttaactctcaattctcaactctcaattctcaacttcttcaactaattgaccaccacagtagtgaaatattctttaaatacctccgcggctttttcaagttgttcgggggtattttcttttacgtctttcagcttgtattcctgctccatcgcttcatacttatgtacgcctaatgtatgataaggcaggatttccactcgttgcaccatcttatattttcccagagcctctcctaaacggcggatatcttcttcgaaatcgctgtagccgggcactaatacataacgcagccagaaaggtttctcgttttcttccagccatgctgccgtgcggatggtttgctcgttacttcttccggtcagtgcctgatggcgtgccggattgaactctttaatatccagcaatacaagatccgtcagtttgaaaagttcttctacttcttcgttccagataccgccgttgctgtctatgcatacatgcattcccttttctttcagttcacgcactaaagggactagtgctttggcttgaaacgtaggttctcctccggagaaagtgactcctccgcgtttcccgaaaaaaggacgttggctcatagccatgcggacgatttcttccggtggagtaggtgtgcctcctttcccggctattgtgtcagggttggcgcaatacaggcagcggaaattgcatccttgaagaaaaacgacgagccgtaagcccggcccgtcgaatgttcccatactttcgtatgaatgtacgtttatcgtcatattgagtagatctgattacattcgttcgtggaagctacggctgataacctccaattggtgttcgcggctcaacttcacgaagtttacggcataaccggaaacgcggatggtaagctgcgggtatttttccggatgttccatcgcatcataaagcatttcacggttcagaacattcacgttcaggtggtgagcgcctttggtgaagtaaccatccatcattgttaccagattttcgatacggtcttcttcagtggctcccaatgatttcggaacaatggagaacgtgttgctgataccgtcttgagagtcgcggtaacgaagtttcgctacggaactcaaagaagcgatagcaccgttcttgtcgcgtccgtgcatcgggttggctcccggagcaaaagcgacacctttggcgcgtccgtcgggagtagcacctgttttcttgccatacatcacgttggaagtgatggtgagcaaagacagagtaggacgggcattcttgtaaaccggaagtttcttcaattcttcactgaagaaatataccaggtcgacacccaggtggtctaccttgtcgttgtcatttccgaagcaagggaactcaccttcgatatcgaaaccttccgtcagaccgatgtcattgcggcgtgcggttactttcgcatatttgatagccgacagtgaatcgagcgcgatggagagtccggctacaccgtaagcgaggttgatgcgcgggttcgtatctacaagcgccatctgggctttctcgtagtaatacttgtcgtgcatatagtggatgatgttcatcgcttcgttgtaaacacgtgcgatttctgtcaataccttcttgtagttgctcattacttcttcgaagttgagaacatcacttgtcagtacggggatgtttttcaccattaccgtaccggtgttctcacaacgtccgccgttgatggcaagcagcagggctttcgccaggttgcagcgtgcaccgaagaactggatctgctttccgatttcctggtaagacacgcagcaggcgattccgtagtcgtcagactggcgcacttcacgcatcaggtcgtcgttctcatactggatggaagaagtgtcgatagaaactttagcacagaattctttgaacgcttccggcagttccgggctccacagtacagtcaggttcggttccggtgaaggaccgagattgtacaatgtctgcaagaaacggaaagaagtctttgtaaccttcgtgcgtccgtcgttgagacggcctcccagagattcggttacccaagtcgggtcgccggcaaagatatcgttgtaggattgcatacgcaggtggcgtaccatacgcagtttgatgacaaactggtcgatcagctcctgtgcgaaagactcggtgatggttcctttgctcaattcatattccatgtagatatcgaggaaagaagaaacattacccaatgacatggctgctccgtcttgttctttcacggcagccagataagccatgtacacccattgtacggcttcctgtgcggtataggcgggacggctcaagtcgagaccgtagtattcgcccagcaccttcatatccttcaatgccttgatctgttccgctacttcttcgcgcagacggatgcgggattcggtcatcgggccggtcaggttgcggaggtcttctttcttggcctctatcagtcggtcgataccgtaaagagccatacggcggtagtcaccgatgatacgtccgcgcgcatagttgtcgggcagtccggtgaggaatcccaatgagcggaacgaacggatttcttctgtatatacgtcgaatactccgtcattgtgcgtcttacggtaatgagtgaaaatatcttttacgcggtcgtccacttcgacaccgttttcgtgacacgccttgcttactacgttgatacccccgaaaggtttgatggcacgcttcagcagttcgtctgtctgcagaccgacgatcagttcgttttccttgtcgatatatcccgctttgtgggaagtgatggtagatacggtaacattatccagtgcgcggacaccgttgtttgctctctcttcagccaatgcttcgaggcagcggttccatacagcttttgtgcgttcggtaggtccttcgaggaaagatgcatctccgtagtacggagtgatattatgacttacgaaatctcttacgttgatttcgctgctccaaagaccgtctttaaagatcttatttaattccataaatgataaaattagaggttgtagttatccttttctttagagcgcacaaagttacaatcatttttcatataatcagcataaatatactctgattttatgctgtccaacataaaatacctataaattgctatcttttagaaatagatggctgattttttttagagaaactcttgcatatttgaaatatcttcgtacctttgcaccgcttttgacgaaaagcactcctgataaaggagttttggagaggtggcagagtggtcgattgcggcggtcttgaaaaccgttgaaggtaacacttcccggggttcgaatccctgtctctccgctgaaaagcagcaagttagctgcttttttattttatagggaagcgaattttcctcttaaggagaggtgctcgagtggttgaagaggcacgcctggaaagcgtgtatacgccaaaagtgtatcacgagttcgaatctcgttctctccgcattttcattatttttttgattatttgatgaaaacggctgtcttgatttgtcaggagagtcgttttttgtgttgtatagagataccgggaaaataaacctgcctttggcggggactttaggtaaataaatgtttatcttcgtatttaataggtagcaaacctaaaaaagatattgaagtatgagacgaattttactgggactatgttttttatctttcctcaatagtgcgtccggacaagaaattcccttgccggagagtatgccgcaggctcatccgagagtgctgactacaccggaagggaagcaggaaacgtggaacttgattaagaccgaagaatgggcaaaggatgttttcgataagctgagagagcgtacggagaaatataccgatctgacggccacccggccggattggttgttgtcgcgtctggctatgtattggaaatcccatgctactgaggtatatataaaaggtgaaactttcgaccatgcgggcggtgagaaagctccgtatcctaccgtgcgctatacgggaacacgtggaactgccgctactcacggccgtccccgactggcggatattgtgccgtacgatgatgatgataacgggaatgtgacattctgtaataatgcgcttcccgaccgtcctatggagagtgtgcatccgtctaaaaccgggcgtaacatcgaaagtctgaattgtgagatattgggaatcgcccgtgatgctgctttcctctattggatgacggaggaggagaaatttgcaaagttggcagccggagtgttcgatacttatatgacgggtatttattacagaaatgttccggttgatctgaatcacggccatcagcagacactggtgggactgacttcctttgaagtgatccatgaagatgcgttgcatatcgctgtccctctatacgacttcctgtatgattatctgaaagcaaactacccgcagaagatggaaatctacgccggagcattcaagaaatgggcggacaatatcatagcgaacggagtgccgcataataactgggatttgttgcaggcacggtttatcatgaatgtggggctggtgctggaagacaacaaggcgtatgccgacgggaaaggacgggaatattacatagactatgtgatgaaccgttccagcattcgtcaatggagcttgacgcgtcttgccgaatatggttttgactctaaaacgggtatctgggcggaatgtccgggatatagcagtgtggtgattaatgattatgccaattttgtgaatcagtttgacaacaacctgcgatatgatttggtgaaggcgatgcctgtattgtcgaaagcggtagcgacaacccctcaatatctgtttcccaaccgtatgatttgcggtttcggagatacgcatccggggtatctgaacactaatttctttgtccgtatgatacagaatgcacaggcaaacgggaagaaggaacaggaagactatttcactgccttgttgaaatgcctgaatcccggtgccggaaatgagaaagcggaaaagaagaatgtgcgggtgtctgtcaattctttttttgaagataagccattgacgctgaatccggaggtgcaggcgggaaagatagaagaatatgtctctcctttgttccatgcgcctaacgtctcttggctggtgcagcgaaatggtatggatccgcgcagcagtctgatgatttcgcagaatggaagtgagggcaaccacatgcacgccaacggcatttctatggaactttacggaaaaggatatgtgctgggacccgatgcgggtatcggtcttttcctgtatagcgggttggattatgcggaatattattctcagtttccgagtcataatacggtttgtgtagatggaatatcgagttatccggtgatgaaaagcaatcattcttttgagttgctctcctgtttcccggcttcggcggaaccgggtggggagtttacctctgtcacatacagcaacctctatttccgcgaaccggaaagcagggcggatcagacgcgtatgatgagtatcgtcaccactgctccggaaacggggtattatgtggatgtgttccgcagtcggaaagaaaaaggaggggacaagatgcatgattatttttatcataatctcgggcagacgctcacattgaccgctgccgacggaacggatctgaatctgcagcctacggaggaactggcgtttgccggtgcgcatctttatgcctattcttatttatatgataagaaagtggcggctaccggcaaggatgtgaaagcgacctttaccattgatatgaaagataagggaggcgatgatatatccatgaatctctggatgaagggagaaccggaccgtgaagtctttacggctctgtcgcctatgaccgaagggttgagccgtacacccggtatgccttataatataaaggagcaacctacattgacttttgttgcccgccagcatggagaggcttggaaccgtccttttgtcgctgtttatgaaccgagtacacggaaagagccgtcggccattcaggctgtgtcctactttgatgcggaggaaaccgctctgacggattttgccggaatctgcgtgaaaagcaagaatgggcgtacagatcatatcttctcgctttccgacgctacgcagacggctacttatcaagggatgaaagtaaaagcggattatgcggtaatcagtaaccggtatgcgggagataaccgtacgctgtttatgggtaacggaacgcaactgatagcaccgggagtcagtatccgtacttctgttcccgccaatgttctgctcgaacagaagcaagggaaatggtatatcttgtcttccgctttttgcacggtggtgatcggcggcaagaagatgaaagtggaagctgcacagaagacaaaaagatgtatatcctgtccatagattgataatattgtaatgtattggcagactgctaaggaaatattgcaataaaaaataaaaaaaacgtaggcaaacgttgtgaataccatattttttctaattttgcggtttcttgtctgattcggaagaaacggacaagaagtccttatttatatagggcggatatttagtgggaaatatttagtgggaaaataattatggtatatgcactgagaaatggtcgcagagtggtcgctctgttgtcatttctgttattgtgttgtggggtacatgtacacgcacaacgaatggctgtgaaaacgaacacgttgggatggctgactgccagccctaatgtcgaggccgaatttgttttgggtcgtcatatctctctcaatatgggagtcgctgcgaatccgatcagtacagacaattttaaaactactttcacacattttcagccggaagtacgttattggttaaaccgtccgatggtgagccattttctaggtgtcaccgctttcgcgaacaattttaatatgctggttaaagatgtgcatcacaaaggcgatgcgctggcagtcggtttgacgtacggttatgcttgggtgctgaacgatcattggaatattgaggcgacggcaggtatcggggtgatgcgctaccgtcagtttaagtacgacaagggtgctccgaaaccggatgcggcgaatgacagtaagacaacgctggcgccagtgaagctgggagtgtcttttgtgtatattatccggtaacggaacgaacatttatagttagaaaagagaatgaaaatcaattgtaaacgtgatagattaatcggaatcctcctggcagccatgctgctactcggtgcggatgcgtacgcccaacgtatgcgtgtgcaaggacacgtcaccaaccaacagggaaaaagcattccgaacgtgaatattatagatcctgtgacgaatgaacgcattgaaatctccgatgaggacggacgctacagtgtgctggcggaacgacacggatcgttgaaatatacttgtgtcgggtatgaagacaagacggtcaaggtgggcggaaagcagattatcaacgtggtgctcaaagatgcggtcattgaacttgacgaggtgattgtgatttcaaaagtgaaggataaagtggtgcccgagcctacggacattgagataaaaggcaattacttccatctgaaaacccgtgtgccggtgcctaaggagatgttcacttccaaccgccgtttggtgttgcaaccttctatctatgatgtgacacagaagaagcgtttgctgttacgtcccgtggtgttcgacggaggtacgtataatactacccagcggcgtatgtatgattataatatcgaacaggacccgctgcacgaatacatacaggtgaagactacttcctcgcggaacggggatattatcgcctatcatgattctatctatatagagtatctgcaacatgattatcgtgcggatgtacatcttgcgatggagaattaccgtgctattatctatcgggattctttctctatcgcacgcggtactgtcaatccgttgcgtttcctggaatataaattctccgctttcaatctgacggataagaaatatctccccaaacctgtgatgcaattgagggataccaaaggagaagtcaacttgactttcgttgtgggaaaagctgatctggatgataagaatccacagaatcaggtggaactgaatcgcttgaatcaagagttgcacgctatcgagatgaatccggaggcttcattgaaaagtttccatattacgggtgtcgcttcaccggacggttcgtatgaattgaatctgcgactggctaagttgcgtacggacaaggcgctggaccgtatcttgtcgcaactcgacccggagacccgcaaacttctggaggtgaaatcggacgcgtcggtcgcttcgtggaaagaagtggcggagttgctgcggaaagattctggacaggatacggccgacgagatcacggaattgattaagcgatacggagaaaagaattaccagttgaatcgcgcgctgaaatcgaaacctttttataaggaggttgctgctgtgtatctgcctaagttgagaaaagtgcagtacacttacggatattctattttccgttctttgacggatgaggaaattatgcagctctataagaaagatccgaaggagctgacacgttttgaatattaccggatgattgcaacggctaaaacgccggatgaaaaagagaggtattgtaaagaagctcttgaattgtacgataactttacgtatgcggcgaatgagctggctgtgttgaatattcagaaagatacgccggactccaagattcttgaaccgttcgtcagcaagtcggctccggtggaattgctttccaatcaggcgattgccctgttgcatgaaggtaaatatacgaaggccgattctgtgttgacactgcttccggagggagttgttgccgatgatttgcaggcgatcgttcaggcgatggcaggctattacgacgatgcgtttgagaaagtggcggctaccagccctttcaatgaagtgatcatgttgctggcgatgaagaagaataaggaagcatgggagaaggcttcgcagctggatacgggctcggctcgcgagtattatgtgaaggctatcgctgccaaccgtatggaaaaggtgggtgaagcacttatgtatattgagaaagctttggaactggatccttccttgctggagaccgcgagagtggacggtgacattattgacctgttgcccgaagagcagaaaataaagaatgataatacaacgaaagagtaaatgatggatatccttagaatcaaaaataaatatgcggcagtggcattgttcttgatgttgtctgttgctttgcaggcacaggattatggtgcattgaaatatatgttgcagaaaagacctgccaatgagaggtttgaaagtaataaattcaatgaacacctctttttctctgccgggctgggaccttacggtttgctgacgagcggaggacaggatggcatgggaatgacagccaatgcttttataggcaaatggttcactcctgttcacggggcgcgtctgggagcgactttgggctatttgccgtcggaagtatataacagtaagataaaaatggtaggaggcagcttcgactacctgctgaatatatcttctcttacattcggatacaacgaacagcgcaggttcgaacttttgggtatagcgggagttgaagccggctattccagggccaatgacaattcggccggtgataatccggctgtgaagaatggacatgagttctattatggtgtccgtatgggattgcaggggaatatccgtctttcacggacactcgatttatttgtcgaaccccgaatcggatggtacaacgatggattggggcatacggaaagttggagaaactataaaatgggaggatcggtcttggtgggtctgacctatatgcctgctgcggcgatgggtaggaagattcattttgacaacttcgataacagctcattcctcaatcatatgtttgtctcgttgtccggtggaatcagtacgctgaaaatgccggggataaagaatacactcaaaggattcggaccgcagttctctgccggaatcggtaaatggttcagtccgtcgtcgggagtacgcttgtccggaaccgttggctacagcgatacgcctgccggtagtgcgagcagctatttcaagcatatagacctgcatgccgattatttgctgaatatcaataatatactttggggatatgacgaacagaggcttttcactttgatcggtatagccggtgtcaatctgtccgggacaaaaggagtggcgcagacagccaagtatgcaccgggattgggtatcgggcttcaaggaagtttccggttgaaccgttccgtagatttgtttgtggaaccccgccttaatgtttatcagaagagatatgccggtggatgtggtttcggtagtacagaccagctcggagaactgaacttcggtgtgacgtatcacacaatagaccgtgcagcccgtcctcagaatggattctcaagcaatcatattgccgacaatctattcatgacgtcaggtatcggggcacagttattcctgaataagactaatctgaaacatctcgctgcatggggaccgcaactttccgcttctatcggaaaatggtttactccgtattccggtctgcgactggtagggacgggaggtttcttctccaattatttgcttccgacagatatggaggcggagagactcagacatatcaccgtaaccggaggattggattatttatggaatatcacttctaccatgagcggatatgatccggaacgtatttttgaactgatcggttcggtaggatttaatctggcttatacgtcgaattcagagcataagttccagccgggactcaatgcgggggtacagggagtatggcacatcaatgatttcttcggtttgtatctcgaaccgcaaatccgcctgtatcgtgataagtttatcgaaggaaatctgggtttcatacagaaggatgtgatggtggggatcaatgccggtttccattatcgttttgttccttattccaaagcggccaatcgcagtgtgtttgagaaagatgacaaacggtatttcatatcgggagcattgggcgtaagcagtctgctggttgccaatcgggatttggtaaagaatatgggggtggaagctaagggtagtatcggaaaatggtatactccgctttctgcatggcgtgtgaacggaacaatcatgtataaggcgaaaacaccggataagttgaatcttcattatgctgggttaggaatggattatatgatgagtctcgctactttggcgaagggatatagccgggatcacgcgatagatgttgttccttttgtcggagtgacagccggattggtacgtcgtagaggtgaatttaaagcagttccgggaattgacgccggtgcgcaagtcaaactgaaactgggctcttccctcgatttctatgtggaacccaaagtaggcattcgcacggacacgtatgatggtatggatcagggaagacccgaccgcgttacttctatggtgggaggattgatttacaagtttaaaatgcctacttttaaataaagttagcattctacttacaaaaatacagctgtatattcgataaaaacaaattcaagagtgaaagttttgtcgctctttatttgattttgcctgctgactgttatctttgtttcaaaataatagtggagtaggataaggggatttcatttttcgttcgtactaataatagtactacaaaaaagaaaactatgaagattcgaatatgcatattgattattatatgggggatattatatccggagtatctgagctcgcaggaatccccttacgtattccgccagatcggagttgtcgaaggattaccggataactatgtaaaaagcgtttttcccatttccgacggacgtatcggtgtgcgaagtactgtgttattaagcctgtatgacggtgcgaactattcaaattttcctttcaatattcatggtgaatatccgatagtatataaccacatcattcccgaacaatatattgataccgataaacgtttgtggatgaaagaacgtaaaagcctgcgcgtttttgatttgactaccgaacagtatatctataatgtagattcgctgtttcttcagttcgggctgaaagatagggtggaggatctgattattgattccgagaagcgttattggtttctcacgccgggatcttctgtctatacgtatgatacggaaacgaaatcggcagaattggtttgcaggaatgatgagtttatggaatattatggcggactgttgggaatagaaagtcacggcaactatagttggatggtgcatcagaaaggggctatccgttgctatgattgggagaagaaacgttttattcaggaactcgatttcttgaaaggacagctgaaaccggatgaccgtgttgtcttacggatactcgataacggtgacttctggctaatgtgggatcgggggataggttactatgatgtttataataaaaaatggaacccgatttcaagtatccggttgggacattattcatggttcacctcaatggatgtggataaaggtggaaatgcatgggtaggaaccgttatcgatggattttatgtaattgatatgcataatttctccataactcacacattggatatacctttgttgtcaggcaacagagtgagaaatgcagttcagagcatttattgcgatcatgagaataattccgtctggatggggctttacaatcagggaatgtgctattaccatcccagcatgaacaagataatgctgtgtaataagaaaatgattcgcggagactggaaaggagaggagatccgttgtatgttggagacttcgaaaggcgagattctcatgggaaccgcttcgggactgtatcgttacgaaccggcaacacggagcttgaacaggctgtataatgaattcaatcaaaagaattgccgtgtcctctacgaagacaaagaaaaccgtatctgggtggggacctatcatgacggattatattgtatagaacacgggaaagtaagatcttatgactatccggacacggattatcagaatgagttggatttcagtaatatacgtgttatggttgaggatccttccggacggttgtgggtgagtatatacggaggtgtaggcttgttcaatccggagaatgggcagataaaactattatccgaacagtttcccgagctgaagaaatataaagtagccaatgcgttggctattgacgaccggtcccgattggtagtgggtagcgataatggcttgtatatctatgatcctgcaaaaaatacaatctggatatccgaacaggatggacaagccaattcaatctttaatcaaggaagtatgaagtataaccagatattgaaagatcatgaaggtactttatggtttgctacccaatacggtttgaatgtccttacccatcatgggcaaagttatacattgggtaaagaagaagggttgtcacaagctatcctgaatgtggtggaagataaaaatcatgatatatggatatcgacagtcacttctatctataagataaaagtagaccgtaagacagataaatacagttttcacgttgtcagttatttgtccgaagatgagatccggcaggatgatttatatagctttccttctctgataacccgtgacaatcaactcttcttaggcttgatgaatggatttattgtcttttctcctgagaatatggttgataaccaatgcctcaatcggcctttattcacttcattccgcctgttcaatgttccggtagtgtcgggagaggaatataatgggcgcatattgtttgacaaagcattgagttattcggatgcagtgcaattggaatatgatgagaattatgtaacacttgaattttcgggactgaacttctctaatccttctcagacttcttttcgttatcagttggaaggctttgataaagaatggattgaaacatcgtttgagaatggacagggacgtgttgtgtataataatcttccgtctggcgaatatgttttccgtgtgtccgcagccggaaacgaccggatatggggaccggagtctgaattcagaattgtgattcatcctccgttttgggatacattggctgcccgcatcctctatgccgttttgggtattttgttggtcttcggtcttatttatgtgattaaccgccgtaatcatcggaaaatgatccgtatgcaagaggaagaagccctgaaacaaaaagaagaattagatcagatgaaattccgtttctttaccaatatcagtcatgagctgcgtactccgctgacactgattatcactccgttggatatgatgatacgccgtttgacggatgatgcaatgaagaaacaactgaatactatctataagaatgcccaaaacctgttgtcattggtaaatcaattactggattttcgtaaacttgaaatgaagggtgagagattgcatttgatgaatggcgatatggaggagtttattgtttctgcctacaataattttatgccgatggctgtagagaagcatcttaactttgtaaaccagtcggaacacagagcgctttatatgtttttcgatcgggataaagtacataaaattgtaaataatctcttgtccaatgcctttaagtacactccagagggaggaaccgtgaacttattacttgcgacggaggaagtggaagggagaaactatgtgagaatatcggtatccgacacaggaatcggaatatccgagtccgatcttccctacatctttgaccgtttctatcaggttggcaatgaaggggatgaaaagataggcagtggtatcggactccatctggtcagggaatatgtgaatattcacggtgggcgtataaaggttgacagtcagatggatcgcgggtcggtcttcaccgtttggttacctatggatttgacacctgaaccggatgaactgccggatgaaataactgatatggaatcgacgggtatgaaagaaaaggaaaccgttgtatctgcgtcagatgagaatataaagaaattgttgttggtagaagataatca

SEQ ID NO: 11767 - DNA, 2482 bp, Unknown
  gut microbiota DNA sequence
atacaggttcattcaacggaggagcatcataatcacgttcacagccggtcaacacagcggcagccagcactaaaaaggagaatattttctgagttactttcatatctgtttcaattttaatcgttataatattcgttccgttctctgtttagaagcggtaactgatgttcgcaaagcagttgataccctgcatataataatacttgttagggaacaacgccggattaaccaacgctccgtctgaagcaaacacacgtgcctgttcataaccacctgtacgaatgtcccgcttattgagcacattattgaccgaaaggttgaaattaatggattgacggttgcgcaggtagaaaatcttacctaccgaaaggtcgagcgtacaagcacttccgatacgttcttgtgtagtcatggcataataggtatccatcgtttccggaagcgtcgggtctaccgtattgtaaatcccctccatgcggcgggcaggagccacgtcgatataattgcgtccgaaagcattcaggttggcacccaagaaccaataatcaatgaagtaacgtaccccgaaagttcccgcaaactgcggtgttccggacacatacaaatttttcatatatacttttgaagtcttgtcaccttgtgtagcttcataattttccactgccatcggattattgctataataatattccgagatggtaccggcaaggtcgaaactccaatggttgtccaacttataagtcgttcccaattcaataccacgatgtatccggttcacaccatagagcacatgattaaagaagttggttccgttgaagtaactgctacgctccatctgatcgtagaaattagtctgataaagcgaaacacgtcccgtgaaggagggcaatgaaaaaatataattcacatcggcagagaatactcttccactctccagcttctgtccgttctctacatcctcaggagtcatatccgaaatacggggtgacagataagcgttgttaggcaacggagcttcagtaccgtaactgacattggctgtcaggaaatgacggccattgaatttataagtcaatcctgctttcaatgccatatccacaaacgaatgtgtccgcccttttccgtaagaattctccggataacgtccattcttcattttaccgtcccgatagaactgaacataatcgaactttgctccataatagaagtccatcttagcatatctatgctgattggtgacccatgcaccggctttcatgatattcagattgaagttatatccgaacacaccgccttcatatactttacggtcgggacggttcaagtcattctgtttgctgttgaggtcatcgtgtatatcacgttcggcatacttgtcataatccatcacgtaggatgcgcccagcaggtcatccactgttttgaactgccgcgactgtgtgtatcggaattccgcccctgccgtcaaccaactatggtcgcccaatttggtgttaaaagtagagttcaaagtagtttccaacaaatcactacgtcgttcttccaccatatattgcgcttttccatccgcctgcatagcgttggcaagatacatattgtcccaattaatttgcgtaacgctcgtatcgttgcgtctccacaataattctgtagcttcggcaacttcgggtgagacattgatgtcaatggcaaatggcaacttgcgataatagtccggacgcgggtccgacgcattgtaccagttcaatgctgtattgccatagcgtccgtaatgcattcccactcctgtaaccaatgacgattcgtcgtcaatcttccacgtatgtgaaagaatcaatgtagggtcgaaagccagaacgactttcgcatttctttttttcccgttctgatatccccagttcgggttgtattgataattgtctagcaattcacacgcctgctgataagtggcgctctgctgtccacgctgcacaggagaaccgaaagtgacgatagagagactgtgttctccccctttccattgcttttcggccgacagcgcataagagaaattacgatagaaagtaccgtctactgcaccttcgtgcgagtaacgaccacctaacgatgcggcaaaagcccatccattgtcaagcaatcctgtggaataagtcaccattccgcgcaaatagtaattgcggttggcgtaagaaagcgtagccttcgttcccggagagatggcagaagcccgcatattgatattttccgcaccgccgatagatccgtaggtgaaagcggaaggtctgttgtaattgaccacatctccattccgggtcatgtcgttcaatgcaccgatagaagaatagttgaaaacgcccctcaactggtcattgaaattcacgccatttatatatctttgttcatagatgttttcatatcctctgacacgaaaacgcatgggagataactgataagaagttttattcaaataaacatcgttaga

SEQ ID NO: 11768 - DNA, 39186 bp, Unknown
  gut microbiota DNA sequence
gaggcggcaaagatacaaaaaagaggtggattacaggatatatgagaaaagtttcgtatttttgcctccaaaattgagttaatacgtaacgaaatgaatatattagaactaagtgaacaggaaatcattcgacgcaacagcctgaatgagcttcgtgcgatgggtattgatccataccctgcagcagagtatgtaaccaatgctttctctacagatattaaagctgaatttaaagacgacgaagagccacgccaggtttccgtagccggccgtatcatgagccgccgcgtgatgggtaaagcatctttcatcgaattgcaggactctaaaggtcgcatccaggtgtacatcacccgcgatgatatctgtccgggagaagacaaggaactgtacaacgctgtattcaaacgcctgctcgacttaggtgactttatcggtatcgaaggtttcgtgttccgcacacaaatgggtgaaatcagcatccatgcaaagaaactgactgtacttgcaaagtctatcaaaccgttgccaatcgttaaatacaaagacggagtagcttacgactcttttgaagatcccgaactccgttatcgccaacgctatgtggacctggtagtaaatgacggtatcaaagaaacattcctgaaacgcgccactgtagtgaaaactttgcgcaacgttttggatgaggctggttacacggaagtggaaactcctatcctgcaatctattgccggtggagccagtgcacgcccgttcatcactcaccataactcactggatatagacctttacctgcgcatcgcaacggagctttatctgaagcgactgatcgtaggtggttttgaaggtgtatatgaaataggtaagaacttccgtaacgagggcatggataaaactcacaatccggaatttacctgtatggaactttatgttcagtacaaggattacaactggatgatgaatttcaccgaaaaactgctggaacgtatctgtatcgctgtaaacggctgtacggaaagcgttgttgacggaaaaacgatcagtttcaaagctccttaccgccgcctgcctatcctggatgctatcaaagaaaaaacaggatacgacctgaacggcaagagcgaagaagaaatccgccaagtttgcaaggaactgaaaatggaggaaatcgacgagacaatgggtaaaggcaagctgattgatgaaatcttcggagaattctgcgaaggtacgtatatccaaccgactttcatcaccgattatccggttgaaatgtctccgctgaccaagatgcatcgttctaaaccgggactgaccgaacgtttcgagttaatggtgaacggtaaagagctggctaatgcttactcggaattgaatgacccgttggatcaggaagaacgtttcaaagagcagatgcgtttggccgacaagggagacgacgaagcgatgattatcgatcaggacttcttgcgtgctttacaatatggtatgcctcctacatcgggtatcggtatcggtatcgaccgcttggtaatgttaatgaccggacagaccactattcaggaagtattattcttcccgcaaatgcgcccggaaaaagtagtgaaaaaagacgctgccgctaaatacatggaattgggaatcgcagaagactgggttccagtgatccagaaagccggttacaacactgtagctgacatgaaagatgtcaatccgcagaagttgcaccaggacatctgtggtatcaacaaaaaatataaattagagcttaccaatccgtcggtaaacgacgtaactgagtggattaacaaacttaaataagttgagagttgaaagttaagagttgaaagttgttatctgaataacattttcaagtcttaactttcaactttcaactttcaactttcaattagaaatgaaattacccggcaagatagcgataatgggcggaggaagttgggctacagccatcgcaaagatgtgtctggcccaagaagactctatcaattggtatatgcgacgcgatgaccgcatcgcagatttcaagagattagggcataatccggcctatctaacaggagtgaaattcgataccaaacgtatctctttcagttccaatatcaacgatattgtgaaagaatcggatacactaatcttcgtcactccctccccttatctgaaggcacacttgaaaaagctgaaaaccaagattaaagataaatttatcattaccgctatcaaaggaatcgtacccgacgacaatgttatcgtgtccgaatacttcactaaggaatatggcgtaccacctgaaaacatcgctgtgctggcaggtccctgccatgcggaagaagtggctttggaacgtctttcttatctaaccatcgcttgtcccgacaaggataaggcacgtatttttgcgcgcagattgggaagcagttttatcaaaacttcggtcagcgacgacgtttcgggtatcgaatacagttcggtgctgaaaaatgtatatgccattgctgccggtatttgtagcgggttgaaatatggtgacaactttcaagctgtgttgatttccaacgccatacaggaaatgaaccgttttctaaacacggtacacccgttgaacagaaacgtagatgaatctgtttatctgggggacttgctggtgaccggttattccaatttcagccgtaaccgtacattcggcacgatgataggcaaaggatattccgtgaagagtgcacagattgaaatggaaatgattgcggaaggttactatggtacgaagtgtatcaaggaaatcaacaaacatcatcatgtcaatatgcccatattggacgctgtttacaacatcctgtacgagcgtatctcgcccacgatcgagattaaattattaactgattcttttagataaccttataaacaaaaacgatatgataaacttgaacattgaaaagacatttggatttatctccaaagaaaaagtttctgcttacgaagctgaggttaaagccgcacaggaaatgcttgaaaaaggaacaggcaaaggtaatgactttttaggatggttgcacttgccttcttctatcactaaagaacacctggctgacttgaatgctactgcaaaggttttgagagataactgcgaggtagtaatcgttgccggtatcggtggtagctacttgggagcacgtgccgtcatcgaggctctgtccaacagctttacctggctgcagaataagaaggctgatccgatcatgatttatgccggacataatatcagtgaagattatttgtatgaactcactgaatatctgaaagacaagaagttcggtgtcatcaatatctccaaatcaggaactacaactgaaacagcactcgctttccgtttgctgaaaaaacaatgtgaagaccaacgcggtaaagaaactgccaagaaagtaatcgttgccgttacggacgccaaaaagggtgctgcccgtgtcacagccgacaaggaaggatataaaacgttcatcatccccgataacgtgggcggacgtttttctgtactgactccagtaggtttactgccgattgcagttgccggattcgacattgagaaactggttgccggtgctgccgatatggaaaaagcatgtggctctgacgttgcttttgctgaaaatcctgccgctatctatgccgcgacccgtaacgagttatacagaaatggcaagaagattgaaattctcgttaacttctgcccgaaactacactatgtgagcgaatggtggaaacaactttacggggaatctgaaggaaaagataacaaaggtattttccctgcatcggtggatttttcaactgaccttcactctatgggtcaatggattcaggaaggtgaacgttctatcttcgaaactgtaatctcagtagagaaggtaaatcataaactggaagttccttctgacgaagcaaatctggatggcttgaacttcttagctggcaagcgcgtggatgaagtaaacaaaatggcggaattgggtactcaattggctcatgttgatggcggtgtacctaatatgcgtatcgttcttccggaactgaccgagtacaatatcggcggtctgctttatttctttgaaaaggcttgtggtatcagtggctatctgctaggcgtcaaccctttcaaccagccaggtgtggaagcatacaaaaagaatatgtttgctttactgaacaagccgggttatgaagaagaatctaaagcgattcaggcaagactgtaagtaatattattaaatgcaaaattaacgcagattttcgcaaagaaaccttcttataaagaagtctgatctgcgagaatctgcgttaattctgcgtttaaaccaataaactgcaatcagctatcaattttctttttcattcgttgttttcagtccgatgacttcttcagctccttcacactcagctttggaggaaagataaaattccaatttcacgtcaccgttctcatcaacatgttcgatggtggctcgaactataacctgactttgtgtcacgccgtctttgaaacgcagttgccctttatcttcatccgtcagatttccctcagtcgaaacttcctcctctttataaataagcttagtagccaattcttcatcattctgaagtttgaatgtttttaattcagctccgttaccgtccaaaagtaaaagagcttccacctcatcccccactttcagagtcggcaaattatccatcttattggcatagtcttctccttcaacgctattattgtcagaatcaaccttaacagatagcttctctattttaatgataggactctccccaccatcggagcaggcgcctagaaacaatggtagcagtaataatactctctttttcatgctatcgtctaattttataatgctacaaaaatacatattatcttctaaatagcaaaaaatgtgtaactttgtgcttcaaaactaattaatagatatttagatatgtctcagaaaaagataaaagctgtcctattcgatatggacggtgtgctctttaactctatgccttaccactctgaagcttggcataatgtaatgaaatcgcatggacttactcttagtcgcgaagaagcttatatgcacgaaggacgaacgggagccgctactatcaatattgtattccaacgcgaattgggtagggaggcaacacaggaagaaatagaaagtatctatcaagagaagagtgttttattcaattcttacacagaagccgagcggatgcccggcgcatgggagttgctgcaaaaaataaaaaatgaaggactggttcctatggtagtgacaggctccggacagttgtctttgctcgaacggctggaacacaactttcccggaatgtttcataaagaactgatggtaacagcttttgatgtgaaatatgggaaaccaaatccggaaccttatttgatggctcttaaaaaaggcagactgaaagccgatgaagccgtagttatagaaaacgctcctttaggagtggaagccggacataaagctggtatattcactatcgctgttaatacaggtccgttagatggtcaggttctgctggattccggagctgatttattgtttccttccatgcaagccttatgcaatgaatgggacaactgcttaattcacctagattctatctaagttaacaccaattccactatgcaaaagttattgtctgtacccccaaatttaattcattgctttcatgaactggaagaagtaaatcgtaccgattggttttgcacgtctgatcctgttggaagcaaactaggctccggtggtggaaccacatggctactgcaagcctgtcatcaggaatttgctccacaagttcctttcagtgattggataggacgagagaaaagaatattactccatgcgggcggacaaagccgtcgtctgccaagttatggtccttccggcaagatactgactccgatcccaatcttcagttgggaacggggacaaaagctaggacagaacctgctgtcgctgcaactgccgctatatgaaagaatcatgaaacaagctcccaacgggctgaatactttgatagcgagcggcgatgtatatatccgttcggaaaagccactgcaagacattccgaatgtagatgtggtatgttacggtttatgggtaaatccttcattagcaacccatcacggcgtgtttgtttctaatcgggaaagtccggagattctcgatttcatgttacagaaaccttctcttgaagacttggaaaggctgtcgaaaacacatctcttcttgatggatatcggtatctggattttaagtgaccgtgccattgaagtattaatgaaacggtcattaaaaagtggaacgagcgatattaactattatgacttatattcggactacggactggctttgggaaaacaccctaaaacgaaagatgaagaaatcaaccgcttatcggtagcaatcctgccactgcccggtggagaattttatcattacggcacaagccacgaattgatatcttctactttgaccatacaggataaggtacgcgaccaacggaaaatcatgcatcgtaaagtaaaaccgaatccggctattttcattcagaattccatcacacagatatctctttccgccaacaatgctaatttgtggatcgaaaacagctatgtgggaaaagaatggaaactgggatctcgccaaatcataacgggagttccggaaaaccattggaatataactattcctgacaatgtctgcatcgatatcatccctatcggagaacatgatttcatagcacgcccgtacgggttggatgacatattcaagggggccctgaacaatgaaacgactatgtatctcaatatccctttttcacagtggatgcaagaaagaggacttgactgggaagcaatcgaaggccggacggatgatttacaatcggccgctatcttcccaagaaccaattccattcaggaattgggaatagtactccggtggatgacatcggaaccacaattagaaaaagggaaagaactttggaagaaatccgtgaaagtttctgctgatgaaatctcggcaaatgccaatctcaaacgtctttacacccaacgtcgcaattatcgatgtgagaattggaaaggcttggcagccaattatgagaagagtgttttctatcagctcgatttacaggatgctgccaacgagtttgtacatttagacttggaaactcccgacattctgaaagaagatgcggctccgatggtacggatacataaccgaatgctccgtgcacggattatgaaattacgtggaaacggcgaatggcagaaagaagaacaagcagctttccaacttctccgcgatggtttactaggagcaatgtccacacgaaaaaatcatccggcactcagcgtttattccgatcaaatcgtatggggacgtagccctgtccgaattgacatggcaggaggatggacggatacacctccttattctctttattcgggaggaagtgttgtcaatctcgccattgaattaaacggtcagccacccttgcaggtatatgtaaaaccgtgcaaggaattccacattgttcttcgttctatagatatgggagctatggaggtcataagtaattatgatgaactgcaagactacaagaaagtaggttctccgttttctatccccaaagccgctcttactttggcaggtttcgctcctgcattctctgccgaacgttacacctcactgaaagagcaattgaaagcttttggttcgggcctcgaaataacattattagcagctattcctgccggttcaggtttgggaacaagttctattttggcttctaccgtactcggagcaatcaatgacttctgcggactggcttgggataaaaacgaaatttgcagttatacacttgtattggaacagttattgaccacaggaggcggatggcaggatcaatacggcggtgtcttctctggcgtcaagctgcttcaatccgaagcaggtttcgaacaaaatccattggtacgatggctgcccgaccagctatttgttcatcccgactatcgtgactgccacttattatattacacaggaatcacccgcacagccaaaggtattctggcagaaatagtcagttccatgttccttaattcaggcacacatctgagtctattggcggaaatgaaagcacacactatggatatgagcgaagctatcctccgtagtaatttcactaatttcggcaatctggtgggcaaaacttggatacagaaccaagcattggattgtggaacaaatccaccggcagtagctgccattatcgaaaagatcaaagattatacgttaggatataaactgccgggtgcaggtggtggtggctatctgtatatggtagccaaagatccacaagccgcaggactgattcgtcggattctgactgaagaggctccaaatccacgtgcccgctttgtagaaatgtctctttccaataaaggacttcagatttcaagaagttaaaatctcaaattaaagcctggacataggaatcatccgtcatgtccaggctctaaatttcaattctcataattggttcgtttacagattaatacttgaaattactgtaaaataaattaaaagaacgataaagacgatagctccaacaatcaacacaatactagaccatttcttttttccagcttcttccataataagcaaaatctagggttaatacaaattatcatcattgcaaaaatgatattttatacggaaatatcgattgcattaaacaacttatttgtataattcggattaaattatgctagtataaagtaaaagattaaagtaaaagattaaagtaaaagatggtatcgattcatgaaagaagaggtatgaaatcaatatgaaagagaagtaaattcagtcttcggagtttacaattaaacatgaatttaaggtcaacaatagatcaacaataagacatattagacaagatttagtccaattttgactttaaaataatagtcaccaaaaaagaaacccctcaacaatcaactgattatcaaaggatttcttcgtgaccccggtgcgattcaaacgcacgaccttcagaaccggaatctgacgctctattcactaagctacggggccatttttttaaatgcgaagcaaaagtataaaaaattttctcatcttcctaatgtttctcctttttttatagttcttaaggcaatccatcttattaagagtttgttattttgaaatgatttagagcatatactttatcattttgacaatcttttagagatttaccattacatatatcaattttattcctatctttgccaacaattaacattcaacaaacctatgagttacttgataaaacctaagaactataaaccactactcgacctcaaacagaccgagctaggaattaaacaaataaaagagttcttccaattaaacttatcatccgaattacgtctcagacgtgtaacagcccccttgtttgtattaaaaggaatgggtatcaatgatgacttaaatggaattgaacgtcctgtctctttccccatcaaagacttgggagacgcacaggcagaagtggttcattcattggccaaatggaaaagactaactttagctgattaccacattgaaccgggatatggcatttatacggatatgaatgctattcgctcggatgaagaactgggtaatctacattctctatatgtggatcaatgggactgggaacgcgttatcaccgatgaagacagaaacatacacttcctaaaagaaatcgtaaaccgtatttatgcggccatgattcgcaccgaatatatggtatacgaaatgtatccccaaattaaaccttgtttgccacaaaagctgcattttattcattcagaggagttacgccaactctatcctaacttggaacctaaatgccgtgagcatgccatctgccaaaaatacggtgctgtattcatcattggtataggatgcaaattgagtgatggcaaaaaacatgacggacgcgcaccggattatgatgattatacaacaatcggactgaataatttacccggattaaacggtgaccttcttctgtgggacgatgtactgcaacgttccatcgaattatcatcaatgggtatacgtgtagacaaggaggctctacaacgacaattaaaagaagaaaaagaagagaaaagactggaactttatttccataaacgtttgatgaacgacgcacttccattatccatcggtggaggtatcggtcaatctcgcttgtgtatgttttaccttcgtaaagcccatatcggagagatacaagctagtatttggcctgaagatatgcgcaaggaatgcgaagaactagaaattcaccttatataattatcatgaacgtacaaattgaagaaagctggaaagtacatttagcacctgaattcgacaaagactactttcggacattaacggatttcgtcagaagcgaatatagtcaatatcagatatttcctccgggaagactgattttcaatgctttcaacctttgtcctttcgacaaagtgaaagttgtaattatagggcaagatccttatcatggtcccggtcaagcacatggcctctgtttttccgtaaatgacggagttcctttccctccttcattggtaaatatctttaaagagattaaagcggaccttggtaccgatgcacctgttacgggtaacttaacacgttgggccgagcaaggagttctgctcctcaacgctaccctaactgtgcgggctcatcaagccggttcacaccaaaatcggggatgggaagtctttactgacgcagccatccgcacgttagcagaaaatagagaaaatatcgtatttatcttgtggggatcatacgcacaaaagaaaggggcttttatcgaccgcaacagacatttagtactcacatcagcacacccctctcccctttctgcttacaatggttttttcggcaacaaacatttcagccgggcaaacgattatttgaaggcacacggaaaaacagaaattatctggtagaaagtttgcaataatatataaaaagtggcggcatttttctttcgtaataaatgccgccattttttatatattcacctattttagtaccattgaatattactctgagtctggcttctctgctcatacttcaagtcttgcaagatacttgcattcgcacggattgtcacattgtagtatttccaacgtccgaaaggcgaaagactggcagacaagttgaaacaatgcaaatcacgtgtgatagtacaagaggtttgcgtaatttcttttgcctgaaaatcataaccggaattgaatgagagcgaccaattattggagatcttcacatttccattcgcattgatattatgtgtgtaggtataaggatatctcattgaatgacgattaatcggcttcgatctatcctcacgaatattaaatgagtaactaagacttaatgaccacggcattttaaacacttgataaccatccgcatcagccgcggctttctctactttcttagttgtagcctcttcttcatcgctcccgtctgaatcttcatcctcctcgtctccttttttcttatccttcccctgttcctctttcggtccgaaccatttcttccaggtatcgttgttgaaagtataattaaaagaagatccatagccttgaaaacgtccgaaacgcccataagaccattctgtacgattgccggtaaccacattaccatttttatcgaacgtgtaggcataagtagcgaatgacgcattcatattgaacgtataattcttggtcagtttcaaacggagattcatactcaaatcactccatggccgttctttggctgccatattataagacatactcgctccaaattcatcgattaagctcacctttttcagtgtatctttctttgcatcataatacttcatttccagattattggaaatagagaaactaaccgtacccgaaccttcacgcgaaggcacaccgtaaggctgtccagtgaaaggtgaataatattgcgtgttaccattatagtctgtgtattcttcccaatatttactgaatcccggagcaccgctcaaactcacttgcggagtaaatacgtggcggatttgtatttctttcttctttgcgaaaagaggtttatacataccataaagcttcgtgctcaggctcaaacttgccgaatagttagacactcggtagaaaccgttcaacgtatcacccggcaacgattccaatctgtgatccacttcattatactgctgattaattttacgggtataccaacgttccgtataattgactgaaggagaaacctgcaaatacttgaacaatgtaaaagtagcactgataggaatattatgattcattgcattttcccactcgctcagccctgctttaaacaaacggtcatcctttgtacgaatactgtttgtcagacgtccggtataactaatggatatcttttcataccaacgttcggctcccgcagccttcttacgtttgaatggaaacagacggctcaatgtaatattaaggtcgggcaaggttaccgcaatagaagaatcacgcattgtctgagcgatattggtcgtcccggaaagcgtcaggccgatatcgggaaaactacgtgaataactgatacttgatgttttcgtattctgagtcagcaactgagagttgtagaggttgttgatattagaacgttcgtaactactggtcgagaaatttacactggccgagaaagtactgttcggactggctttagcgtcttgacgatgattccagacaattttaaagtctttagataccgcatagtccggcatccccttgtcacccgttttggtgacctgataatccgcctgcaacgtcccggaatattgatagcgtttattatagtttgtcaacccggaaagcctccatgaaccttttgtaaagatatctcccgtcatcttcaaatccataatatcactgatagcaaaataatatcctccgttagccaaaccgaaaccacggctggagtcgtccatataagtcggcattataaaaccggatgaataactactagagaacggaaagaagaaaaacggtacagccaatggcaaaggaacatcttccacaaccagataagcaggtcctgtcaccacattttttttaggacgcacttttgcacgagtcagctgcatataaaagtgaggatgatcatgatgatcgcaagttgtatagcgaccgtgttccataaagatttcatcattggcccctttcttagctttgcttccggtcacataaccttcaccttgctgagtaacaatatcggtaatcccggcttttttagttttgaaattatagcggatagtctccgtatcataagaagtatccccttccttgaagaccggtttacctttctccactccggtagaatctttaataccgtatgcatgaaccgtactgctgtcaagattcatcgagataacctccgcagctaactctatattctggtagttcacttttccactaccataaagtgtggccgatcctcccaatgtaaaaacagtggagtcgttggattcataaacaaccggtgcatcgagcggttgcttcttcttaacaggtgctatagaatcaatgcgtaccgtaaccgtatctgccttcaacgaatcgcttccttgtagtgaatctttttgtgcagtattggaggtaatcattcctctccttcgacgttgagacgtagcctcatcgggaagcatcagtaagacaatcagcagtataaatgatataagtattcttgctttcaatggcgccattaactaatagtttacgcttgaagtggcaaaagtacacaaacttcaccaattatgagttagaatctccgttatttaattattttttagtgctataaaaagagagagcaccatctgtcaaaacggtttagcccttcttcaccatattttgcaatactattccgtgctttctccaccgtcttttcctcatccaaatgagtcttagaaaagaacttatccgcaaaacaaatcaattgctcttccaatgtgacaggaagcatctcacggtgaggtaccggaagttgctgatcaataatatcctgcaaggaaagaccggctcctgtatggcgttcgcaaactaacgcatgttgaggaaaaccttcagcacgcaaaatttcagctcctaaatatccatgagcaatataaggatgagtaccgaaacatcgaatggacggagcatctgtctgaaagataccgatatcatgcaaaagagcggcctctttcacaaagctccggttcaaatgcaactccggatgtgcatctagcatcttcatagcctttcctgacactgaaaggctgtgtattactaagatttgtcgctgttccgtattctccggataatacttatcaatgatttcgtatggattcatgtgtcgtttttttgttctcttgatgagaaatttatatttttgtgcaatattacaaaaaaataccgacatgcaagctagaactttgctcattcttttttttctactcgctatatccccttcaggatatacccacagtaagataacaaccggtgcagaacatatcgcacaatacttatcacttattcaaggcaaacgtgtcggaatggtagtcaatcacacttctattgtaggaatagaacagactcatctgctcgacaccttattaaagttggatataaaaatagtgaaagtatttgcccctgaacacggttttcgtggcaatacggatgcgggcgaaacagtaaaggatggaaaggacctacgcaccggtatccctattatttcactttatggcaataataagaagcctaccgctggtcaattaaaagacattgatgtcatcttgtttgatatccaagatgtaggagcacgcttttatacctacatcagtacaatgtactatgtcatggaggcttgtgcagaaaacagaaaggaaatgctcgtactggatcggcctaacccgtgtgactatatagacggtccgatactcaaatccccctatcggagttttgttggtatgcttcccattcctatacttcatggatgtaccataggcgagctggcacaaatgataaacggagaaggatggattgccaacaaaaaaaacgcctgcttattaaaagtaattccaatgacaggctggaaacatggagaaccctattcgcttccgattaaaccttctcctaatctgcccaatgaccagtctattcgtttgtatgcatcactttgtccttttgaggcaacccacatcagcgtaggacggggaaccacctttccctttcaggtattaggtgcacccaataaaaaatatggcagtttcgttttcactcctcgttccctgcccggattcgacaagaatccattacatcaaggaatagcttgttatggagaagacttacggaacaacgcgaatattagtggttttaccctttactacttcctacgtttttatcaaatatcaggtgaaggggccggattcttttcccgaccccgatggtttgatttacttatgggaaccgacacggtgcgcaaagctattctcagaggagaatctgaaaaaactattcgaaatagttggaaaaaagaattacaggcttatcgggagacgagaaagaagtatctgctttattgattctcttctcgctttcttttcttccacaattgccaactattaatgatattttgccacaaaacatacgatccaggtgcaacagcagacaatggattcagataagtatgggccatccagatagctagaatcgtatttttctgtcctaatgcctgtccgccactgatgcggtcgttataaatagagccgatagtctttccaaaaaagaactgtaaacaacaagctgccaatgctccaacagcaatcataatttcagtaaatccatccgcagggtcattcaataacgaatacagcgtctgtgccgtcacgatagctagcgaaactgcccacaagtagaaagcaagttcatgataactcaataatttccgatgtatttttggcaaaaatttgctcaataaccatgcagccagaaacggacaaatcagtagaggaaatactttgcttaaaataacaaagaacgcttccaaaaaactaacatcaggatgaacctccactaatggaaaaagaataggtaccgcaatggcagctccgatattagcaagtaacgtataagtggtcagacttgccgcactcccacccagtttcgaagttatcacggcagcagcagtggctgtcggacaaataatacaaaccatcaccccttccgccacaatcttatcaaaccggaacaacagcaaataagcagctaacgccccgataatctgaatcagtaataaccatacatgaagcggtctaagctttaaatcgcgcggagatatcttacagaatgtcaacagcaacatcgtaaagataagatacggagtcaaaaaagagaggcagataaataacggataacccacagcacccaccaacatggcaataggcaatgtccaattcttcaaaaacttaagcatcatcgtacattttaacttcggaacacaaagtaacggagatttcaggaaaaaagctatcattaaaccgaaaaaaacacaaaacttaatggcaaataataagttttctataaatttctactacatttgcatcgtattataaatatgaaactgaatagatcctacatattatatatatgcatttgcctctggcttcttttcttacccttatgcaccagccatttatggggtaaagattttgtcgtggtcattgatgccggacatggcggacacgaccccggcgctattggaaaaatctcaaaagaaaagaatatcaatctgaacgttgccttaaaagtaggaaatctgataaaaaacaattgtgatgacgttaaagtgatctatacccgtagcaaagatgtttttatccctctagatcgaagggcggaaatagcaaacaatgcgaaagcagatctttttatttctattcatactaatgcattggcaaacaaccgcactgcaaaaggagcatctacctggacactcggtttggctaaatcggacgccaatctagaagtagctaaacgggaaaattcagtaattctctacgaaagcgactatcagactcggtatgcaggattcaatcctaactcagctgagtcttatatcatatttgaattcatgcaggataaatacatggaacaaagtgtgcacctggcgtctttgatgcaaaaacaatttcgtcatacttgcaaacgtttagaccgtggagtacatcaagccggcttcctcgtcttaaaagcaagtgccatgccaagtattctgatagaattaggattcatctccacccctgaggaggaacgttatctgaactccgaaacgggagctacaaccatggctaaaggtatttatcatgcttttctcaattataaaagagagcacgaaatacggctaaccggagtcagcaagactgtaataccgactgaacaaaaagaacaagatatagagaaagaaaatgatagacccgtaaccgttcaaaaggttgcggaaagtgcaactaatgacaatgaaattacgtttaagatacaaatacttacctcttctaaacctcttgctaaaaatgacaagagactgaaaggattgaaaggtgtagattattataaagaaaaagatatatataaatacacatatggtgcctccggtgattataataaggtactacgtaccaaacgtactattacagccaagttcaaagacgcttttatcatcgctttccgagacggtgaaaaaatgaatgtcaatgaagcaattgccgagtttaagaaaagaagaaataaataaaagataaaatgaagtatattacaaaagaagtcagaataggtatcgcaggtatcattgcactgtgtgtacttgtttatgggattaactggctgaaaggaatacatatgtttcaaccttccagctatttctatgctaaatttcagaatgttaacggactgactaagtcgagcccagtattcgcagacggtgttcgtgtaggtattgtacgcgatatattttatgattatactaatcccggaaatgtggttgtagaagtagaactggacaccgaactacgaattcctaaaggaagtagcgccgaactggtatccgaactgatgggaggagtacgcatgaatattcttttggcaaacaatccccgcgaaaaatatgccgtaggagatactattcccggtacactgaataatggaatgatggaaagtgtggcaaagttaatgccacaagtacaggaaatgttacctaaactggattctatccttatttctctgaatacaattttaggtgacaagagtattcctgccaccctacattcaatagaaaagaccactgccaacttggccgtagtcagttctcaggttaaaggtctcatgagcaatgatattccacagcttaccagcaaactgaatacaattggagacaacttcgtaaccatcagcggtaatcttaaagaagttgactatgcagctactttcaagaaaatagacgaaacattatccaatgtaaagatgcttacagaaaaattgaatagcaaagataacacactcggattactcttcaacgacccgactttatacaataatctaaatgctacaactgaaaatgcagcaggcttattgaaagacttgaaagagcacccgaagcgctacgttcacttctccttattcggaaagaaagacaagtaataaaatcccgttatatagattttatctaaataacgaattgctataaaaagcaagttttttgcatctcaaatgtctatctataaaccgaaataagattcctatacaaacatgagaatgagagaagaaaaacagagcttttatatataatattctatataacagacacttacaaaatagcaaaagcgggattagtgatagtacaaagacataaacacataagtcattgaaagtaaacatgttattattcacttgaaaaaaacaagaaaaaatagatttgttttttccgaataagattcccaattttgcaaacgtagaagttttgcttaattaataaatgtattaaaagttactatgatagaatcaaatcatgtcgtactttggaaccgctgtcttgatatcataaaagacaatgttcccgatacgacatacaacacttggtttgcccctattgttccattaaaatatgaggacaagactttgtatttacagattcccagccagtttttctatgagattctggaggaaagatttgtagatttaatacgcaagactttgtataaggtcattggcgaaggaaccaagttgatgtacaacgtcatggtagacaaaacttcgattccaaaccaaaccgtgaatctcgaagcaagcaatcgttctacggctgtaactcctaaaaacatatttgatggaaacaaagctcctaatttcttgcaggctcctgctgttcaagatttagatccgcatttgaatcctaattataatttcgaaaacttcattgaaggatacagtaacaaactttcaagaagtgtagccgaagccgtagcgctaaaacctggaggaactgcttttaacccattattcctttatggagcttctggagtgggaaaaacacatctggctaatgccatcggtacgaaaatcaaagagatttatccagaaaaaagagtcttgtacgtatcggcacatttattccaagtgcaatatacagactctgtacgtaacaacacaaccaacgacttcattaatttctatcagaccatcgatgttttaatcattgatgatattcaggaatttgccggtgttaccaaaacacaaaacaatttcttccatatcttcaatcatctacatcagaacggcaaacagcttatattaacttccgaccgtgctcctgtattgttgcaaggtattgaagaacgtttgcttacccgtttcaaatggggtatggtagctgaattggaaaaaccgaccgtagaacttcgcaaaaatattctgcgcaataaaatacaccgcgatggactccaatttccagaggaggtaatcgattatattgccgaaaatgtgaatgaaagcgtacgtgacttggaaggtatcgttattgctatcatggcacgttctactattttcaataaggaaatagatatggatttggctcaacatatcgtgcacggcgttgttcacaatgaaacgaaagccgtcaccatagatgatatccttaaggtagtatgtaaacatttcgacttggagcctgcagctatacatactaaatccagaaagagagaagtggtgcaagcgcgtcagattgccatgtatctagctaaaaatcacacagacttttcaacttctaagatcggtaaattcattggcaacaaagaccacgcaaccgtacttcacgcttgcaaaaccgtgaaaggacaactggaagtagataagagttttaacgcagaagtgcaggaaattgaagcgttactaaaaagaaaaggaattaatgactagtgattaggctcatgattcatgcttcacaaacctattcactaatcactaaccattatttcagttcactattatttcaaaaatccctgccgacgaagcacctttaatagattttcagacataaactcattatctttcttcgtataacgaacatctgtaaagacctgggctagagtttctttcttattctcctctataaattgtttgctttcaggcaatgattctttataagcatagagtttgtctatttcttccggtgtataatcatgatacatttcctcgtgcacagcagcttccaaaggcaagcgatcaacctgtgcaggaattccatccgggtaaccgactgtaattgtcgtcaaaggaaacaccaattcaggcaaccggagtgcatcgataatcatttgaggattataagtagtggtccccaaatagcaaattccgagccctacctcctctgccaacgtacaaaaagtctgtgcgacaagcagagtgtccatagacgcattcataaaagacattaaattgtcatagccaggtacagcttttctttgctcacaccattttgaaaagcgacgaaaatcagcacaaaaagtaagtacaacaggggcacttttcaccataggctgattaaaatgagctggtgaaagcttctctttcatttcagcgtcacgagtcacaaccacactataaagctgcatacctcccatcgtagaagctcggaatgaagtttcaagcaaatcatttaacaaatcaggagtaatatccttcgatagatatttcctgatagtccttctgttctttacggtttcaaacatttcttttttattgcaaagatacaaaaagaaaaatctattttgctatatctacagaacagaatagttttctttttggaaaactttaacctttaaacaaaaagcagattccattgtttatcaaacacttatcattaataaatagaaaacttatagtctgtcaataaattatttcatttttattttgatagatgaaaaaacattcttagatttgcatccacatttgttaacgataagtaaacttctacacattacttatttaaaaatcagatttaacgcacattgcatcgtggaaaaacaaatttattcttatgacgaagcctacgaagaatctttacgatattttcaaggtgacgaacttgctgcaagagtttgggtaaacaaatatgcagtaaaagattctttcggaaacatttatgaaaagtctccggaagatatgcattggagaattgccaatgaagtggcacgcatcgaatcgaagtatccgaatgctttaacagcaaaagagctgtacgatctattggatcacttcaaatacattgttccacaaggtagcccgatgactggaatcggtaacgactatcaagttgcttccctatccaattgttttgttatcggtgtagatggtgctgccgactcttatggtgctatcattaaaattgacgaagagcaagtacaactgatgaaaagacgtggaggagtgggccatgacctatcccatatccgtccgaaaggttctcccgttaaaaattcagcattaacttcaacaggtcttgtgccattcatggaacgttattccaattcgacccgtgaagtagctcaagatggacgtcgcggagcactcatgctaagtgtatctatcaaacatccggactcagaagctttcatcgatgcaaaaatgacagaaggaaaagtaaccggagcaaatgtttccgtgaaattagacgatgctttcatgcaggctgctgttgacggaaagccatacttacaacaatatcctattgattcttccgaccctacatttacaaaagaaatagatgcttctactttatggaagaagatcgttcacaatgcatggaaatcagcagaaccgggtgttctgttctgggatacaataattcgcgaatccgtaccggattgttacgcagatttaggttaccggaccgtttccacgaatccatgtggcgagatacctctatgtccttacgactcatgccgtctcttggcaatcaatttgtattcatatgtagtaaatccgtttaaaccgaatgcttatttcgattttgatctgtttaagaaacatgtggcattagctcaacgtatcatggatgacatcatcgacctcgaactggagaaaatcgaacgcatcatgcacaagattgatgaggatccggaaaacgacgaagtgaagcgggcagaacgtgtactctgggaaaagatatataagaaaagcggacaaggacgacgtacaggtgtaggtatcactgcagaaggtgatatgctcgcagcattaggattacgctacggaacagaagaggctaccgaattctcagaaaaagtacataagacagtagctcttggcgcttatcgttcttctgtagaaatggcgaaggagcgtggtgctttcgaaatatatgataacaaacgcgagcagaacaatccgttcatccaacgtttggcagaagccgaccctgagctatatgaagaaatgaagaaatacggacgacgcaacattgcctgcctgactatcgctcccaccggaacaaccagcctgatgactcagacaacttctggcattgaaccggtattcttgccagtttacaaacgtagaagaaaagtgaatccgaatgacaccaatgttcatgtcgactttgttgatgaaacaggagatgcattcgaagagtatattgtattccatcacaagtttgtcacatggatggaagccaatggatacgatccgtccaaacgttattctcaggaagagattgacaaattagtagccaagtctccttattataaagctacttccaacgatgtcgactggttgatgaaagtaaagatgcagggaagaatccaaaaatgggtagaccattccatcagcgtaactattaatctgccgaatgacgtagacgaggatctggtaaaccgtttatatgtggaagcatggaaatccggttgtaaaggttgtaccgtataccgtgacggctcccgttccggtgtacttatctcaaccaaatctgacaaaaacaagaaagaggaacttcctccttgcaaaccgcctacggtcgtagaagtgcgtccacgaatattagaagcagatgttgtacgtttccagaataacaaagaaaaatgggtggctttcgttggcctgctagatggacatccttatgaaatcttcaccggtctgcaagatgacgatgaaggtattttattacctaagagcgtgactagcggacgtatcatcaaaaatatagatgaagacggaacgaagcgttacgacttccaatttgaaaacaagcgcggatataagacgactattgaaggattgtctgagaagttcaataaagaatattggaactacgccaaattgatttccggagtactccgttaccgaatgccaatagaacaagttattaaactggtaggttctttgcaactgaacagtgaaaatatcaatacttggaaaaacggtgtagaacgcgctctgaagaaatacatccaggatggaaccgaagcaaaaggcaagaaatgtccgaactgtggcaatgaaactctcgtttatcaggaaggatgtctgatttgtaccacttgcggggcttccagatgtggataaacattctataatatatgatcttatcatttaatatcgaataccgtaccaattggggggaggaagtcaagcttgcaggcttatcgacggaatccaccccaatgtacactacagacggtatatattggacggcagaagtggaactggaagttcctcaagaaggattgactatccattatagctaccagatagaacaaaacggaatcgtcatccgcaaagaatggaacaattttccacgatgcctttttctatccggtactcctagaaaaaagtatagaatcaatgattgctggaaaaatatcccggagcaactatacctttacagttctgcctttacagaagcattattatcacatcccgaaagggtagacattccgcaagggtataagaaagggctaataataaaagcttatgccccgcgcatcaacaaagattattgtctggccatttgcggcaatcagaaagcactaggtaactgggatccggaaaaagccgttttaatgagtgactccaatttccccgaatggcaggtggagctagatgcaagcaagctcaaatatcctttggaatataaatttatcctttgccataaacaggaaagaaaaattgattgctgggagaaaaaccctaatcgttatctggcagacccggaaataaagacgaacgagacactcgtgatttccgaccgatatgtctattttgatattccaatatggaaaggtgcaggaattgccatccccgtattttctctgaaatcagaaaaaagttttggagtaggtgatttcggtgatctgaaactcatgatcgattgggcggtaaacacacatcagaaggtcatccaaattctaccgattaatgacacgaccatgacccatacatggacggactcttatccctacaacagtatttccatctatgcttttcatccgatgtatgcggatataaagcaaatgggaacactgaaagacaaagaagcagcctctaggttcaatcagaaacaacaagaactgaataatcttacaactattgattatgaggctgtaaaccgggctaaatgggaattcttccatctgatattccagcaagaaggggaaaaagtattggcttccgagaaattcaaggagttcttcgaaactaacaaagaatggttgcgaccttacgcagtcttcagctatctgcgtgatgcttaccggacctccgacttccgtgaatggccgagacattctgtatacgatgcacaggagatagaaaagatgtgtcaaccggaaacggtagattatccccacatcgcattatactactatattcaatatcatctgcatctgcaattattggctgcgacaaaatatgctcgtgaaaatggggtcgtactaaagggagacatacctattggcattagccgcaacagtgtggaagcctggacagaacctcattacttcaatctcaacggacaagcaggcgctcctcccgacgacttctcggtcaacggacaaaattggggattccctacttacaattgggatgtaatggaaaaggacggatatcgctggtggatgaaaagattccagaaaatggccgaatatttcgatgcttaccgaattgaccatattctcggtttcttccgtatttgggaaataccgatgaatgccgtacatggattgttaggacaattcgttccctccctaccgatgagtagagaagagatagaaaattatggtttcacattccgagaagaatacctgtctccattcattcatgaatcatttctcggacaggtgtttggaccttatgtcaatctcgtaaaacaagattttctccagttagtggacaaatccggtatttaccgtatgagacctggctttgagacacaacaagaagtcaaacaattctttgccggtaaaaatgacgaaaacagtatctgggtccgtgatggattatattctttaatcagtaatgtactgtttattccggacaataaggaacaaggaaagtaccatccccgtatcggagcgcaacgtgatttcattttccgttcgttgagcgaagaagacaagaatgctttcaacaaattatacaaccagtattattatcatcgccacaacgacttttggtaccaacaggccatgaaaaagttacctcaattgacacaatctacccgtatgttggtatgtggcgaagatttaggaatgattcccgcttgtgtgtcctccgtaatgaacgagttacgtattcttagtttggaaattcaacgaatgccaaaggagccgtcgtatgagttcggacatttaaatgaatatccataccgatctgtgtgcaccatttccactcatgatatgtctactctacgtgggtggtgggaagaagattatcaacagacccaacgttattacaatacaatgttagggcattatggcacagctcctgccattgcaactccggaactttgtgaagagattgtacgcaatcacctcaacagtaattctattctctgcatactgtcttttcaagattggttgtcagttgatggaaaatggagaaatcctaatgtggaagaagaacgaatcaacgttccatccaatccacgaaattattggcgatatcggatgcatatcacattagagcaactgatgaaagccaaagaactgaatagcaagataagtgaattaatacaatacacaggaagaaacccggagaaataatttgacttctatctatattaaacacggattatacaaattcctttttaaatctgtataatccgtgtaaacagattattaaaagaatgaaagagaccccgagtaaacgtattgattttgtagacttaactaaaggagtctgcatcattctcgtagtcatgacacatattggtggagctttcgagcaactcgataggggctctatgttatcctgtttccgtatgccactgtatttttttatatcaggagttttctttaaaccatacgaagctttatcaggattcattcttcggaaaataaacaagttgattatcccttttcttttcttctatctaagtgcattcctccttaaatacatcatttggaaaatagcaccgggagtattccatttacctgtatcatggaaagaacttttgatagtatttcatggacatgaccttatcaaattcaatccgccgatctggtttctagtagccttattcaactgtaatatcctgttttatctagtccatttcctaagaaataaatatctgcctgccatgtttgctcttaccttattgatcgggtgtacaggattttatctaggtaaagcacaaataacactccctctctatctcgatgttgccatgacggctctccctttctatgtagcaggattctggattcgtagatataacttcttcttatttccacatcaccgttttgataagttaattccgcttttcgttttgttggcattgttagtcatgcattttactgctactacattggggatgagaacaaacaactactctgggagtatctttcaagtatacatcgctgcattcgccggaatatttatgattatgctactttgcaaaaaaatgaaaagagtaaagattatttcttatctaggaaggtactctatcatcaccctaagcatacacggtcccatactccattttctagagccattgatagcacgctacattcataatagttgggcacaagcaacaatgcttttgttcataacattaagtatatgtattctactcacccccctctttctgaaagtaatcccgcaaatggttgcacagaaggacttgttaaaaattaaacagattcatactaaataataaatagtatatgaaaataaataaaagctatatctttttgaaagggattcgattttacgcctaccatggagtagccccacaagagaatttgattggtaatgagtatattatcgacctaaaactaggtgttgacatcagcaaggcgatgcagacagacgaagtgacagataccgtaaactatgctgaggtatataacgttataaaaacagaaatggacatttcatccaaattactagaacatgtagggaaacgaattgtgaagaaactattcaaacaattcgctactattgaagacattgatctgtttctatccaaacgaaacccaccgatgggggcagacatagaatcggcaggaatagagctccattgtagcagaaaataaaaacgggcacgtctgccattccgaaccaatcaagaataacagacgtaacaataaattatggtaaaaattctattggtagctcataatcttttctttttccttctattcacagattccacagcttccgttaccacaggcttattctggaaacgttttgtataactggaatagtcaggatggatacgttcgtagtcaggatccataaacaacgggctggaaataatatgatccgctgttgaacggttacagcaaaatacgatattttccacaccggccaaacgagtcaaagcttttacatctgtatcatgaggttgcaaagtcataggatcagtaaaaaagaaaagataatcaatctgcccatcgacaatacgtgatcccatctgctgatcaccgcctaatggaccggatttcagtattgtaaaatcccattctacatcaggatgtttttctttcaatgcttccagtattagtgtcccggtagtacctgtacaatagaatttatttcccatcaacaattctgaattccacaacacccactcgataagatctttcttcatcgcatcatgtgctaccagcccgatgccccttctaacctttgcttccatttcgttattcttttaagtccgacaattgagagaatcgtttgcatcctctcgcgtaaaactgccacaagatactactttttatctgttcaggtattaaattcaaagttttttttcttaggttctcttctcttaatgaagaaaatgacggacaaatccgtttatattcgtcccgtgcgcgaatcactgcgcgagcattgtcccaatcccctttcagaaagaaagtaagtgccgccacataatccaaacaagtccgaatacgcatcactttatttaactcctcctgcggaagattcttataaagcatgacaagattattacggaaattaagaaaagtcttacgaggattctcttttttaagcgtggctcctccaacatgatagactacactttgcggaatgcagacaattccacgtcctcgagaacggagtcgccaacacagatctatttcttccatgtgtgcaaaaaagcgtccatccagccctccgacatccagataatccatacgacgaataaacaaagcagctcctgttgcccaaaaaactggaatcaccgtatcgtattgcccttcatctttttcgaccgctcccatgatacgtccccgacaaaaaggataaccgtacttatctataaatccgcctgccgctcctgcatattcaaaaaattccttttggcgctgacttcgtatcttcggttggcaagcagccacttcgggatgcttatcaagataagcaatcatcggtttcaaccaatgttccgtcacttcaacatccgaatttagaagaacgacatactctgcatctacttgtcgcaaagccaaattatatccgtccgcaaagccatgattctgttcgagcaaaatcattcggacggatggaaactcctgctgaatcatagttaccgagtcgtccgtagacccattatcagccacacagatttctacttctttcccctccgaatactgaataacagatggaaggaaagtacgaagcatatcacatccgttccaattcagaatgacgactgatactttcatctcttatcttttctcttaataagttcctgttctttttgttcgcattccttcttcgtaaatttccagcgcttatgcgaccacaaccaataagcaggttctctacgaatggtctgttccagttcatgggcaaacatatccgtaatttctccttcgactgtctctttgggagcttcagtcatcaatttaaactcagcctcacaatatcccctacgtgtcttcgtcagttcacaataaaagacagggaagttcattatttttgcaatacgttcagctccattcaagaaagcagtctcctgccccataaaagtagtccaataccgatcaccactaggccattggtctgtaatcagacctactaccatattttttccttcacgcttcaatttgataatttcacgtgcagtagaatgtttaggaatattatatccaccgaaacgggaacgaatctgcttaaacagttcattcagatatttatccttcaatggtttgtaaacttgtacaggtacatcgccaggcttcatgaccgatcccattccaatcagccattcatagttggcataatggggaatcatcacaataatacctccatacttttccgtcaattccaaatattgttctgtattcttataaatcatcctttggcaaagatcttcagcggacatatgcaacagtttcaggtcctctagcatataatccgaaagataacgataaaatttacgttctatctgtaatctttccgcctcagtcttctccggaaacgacttttccagattttcccgaactaccttccggcgatatctccccacatgatacatcaacagataattgaaatccgaaagcacatacaatacccggaacggaagagctgaaaacagccacattccaccatataccagccaatagataagtttagatttcatacttatatcagaattgtgcctttaagcgctgtcttgtccccattaaaatctcccaaacgcacgttgaccacttgattatccaatgagttatcacttcccacttctacacgaatataattcttcgtaaatccgtgcatcggagtattccccttcgacttttccaacaacaccgacatcgtctgtccgatatggcgcgcataaaaagcctgtgttttctcatccgaaagtgccaacagccgttgactgcgttgatgcttttcttccggagacaccacataatctattttcaaggcttgcgttccgggacgctcggaataactgaacacgtgcaattgggtcacgtccaatccggaaataaaccgataagcttgctcaaaaaactccgcagtctcgccacgagtacccacaatcacatccacgccaatgaaagcatccggcataacctctttgattttcttcaccttcgatgcaaaaagagccgtatcataacgacgacgcatcaatttcaaaacttcatcacacccagactgcaaaggaatatggaaatgtggcataaaactacgggaatgggatacaaactcaataatttcatccgtaagcagattcggttcaatggaagatatacgataacgctcgattccttctatctgatccaacgcttgcaccaaatcaaagaaagtctctcccgtcgtcttaccaaaatcaccgatattcaccccagtcaagactatctctttaccaccttccgctgcagcttgccgagcctgttcgaccatagaagcaatagttccgttacgactcctcccccttgcaaacggaatagtacaatatgaacagaagtaatcgcagccatcctgtactttcagaaaaaaacgagtacggtctccccgtgaacacgaaggagaaaacgaacgaatatctttcgttgcagtagttatagcctctcctttttcatgtttctgcaaatttcccagatactgcagcagttcacctttctgctccgcccccaatacaacatctactccatcaatttttgccacatcaccaggcttcaattgggcatagcacccagtcactaccacaaaagcaccgggatgttgtttcaccaatcgatgaatagcctgccgacattttttgtccgccatttccgtcaccgaacaagtatttaccacacagatatccgctttctctcccttgcgtgcagtacgaactcccgcctcacgcagaattttaccgatagttgaagtctctgaaaaatttaatttgcagcccaatgtataataaacggctgtcttatcttgaaacacagtggtatctatcataagctgttataaacacattaactttgcaaagttacacattattattagtaaaacacttttggatacgaaagtttattcctatttttgcacaattcactaaaaaacgtgcaatgattaaagagaatttcattaaactatacgaaaatagttttcgtgagaattgggatctgccttgttatactgattatggagaaaatacccaatatacatacggtgaggtagctgaaaaaatcgcccgtttacatctgttattcaaacattgtagccttcgcagaggagataagatttcagttatcggcaaaaataacgctcattggtgcattgcttatatggctacaatcacttatggagcaattattgtccctatcctgcaagattttacgcctaatgacgttcatcatatcgtcaatcattccgaatctgtctttctgtttaccagtgacaatatctgggaaaatttggaagaggaaaaacttatggggttgcggggagtgttctcattgaccgattttcgttgtctgtatcagcgcgacggagaaactatacaaaaattcctaaagaacctcgacaaagagatgcattctgcttatcctaagggatttacccgcgaggatattcagtacaccaccctctctaatgacaagattatgttgctgaattacacctcaggtactaccggattcagcaaaggcgtaatgctgacaggcaataaccttgccggaaatgtcactttcggtatccggactgagttacttaaaaaaggagataaagtgctctcatttcttccgcttgctcatgcgtatggttgcgcattcgactttctgacagcaacagcagtcggtactcatgtcaccttactcggaaaaactccttctcccaaaattatcatgaaggcttttgaggaagtgaaacctaatctgattatcactgttcccctagtcatcgaaaagatatataaaaatattattcagcctcttatcaataaaaaaggaatgaaatgggcactgaatattcctctgctcgataatcaaatttacaatcaaatccgcaaaagactaattgacgcattgggcgggcggttcaaggaaatcattatcggtggagcagctatggataaagaggtggaagagttcttctataagattaagttcccctttaccattggttatggaatgaccgagtgtggacctcttatcagctatgcaccttggaatgaatttatactaggttcctcaggaaagattctggacattatggaagctcgtatctacaaagaaaacccggaagccgaaataggggaaatacaggtacgcggagaaaatacaatgacaggatactacaagaatccggaagcaacacaggaagtattcactgaagacagctggttacgtaccggtgatctcggaacaatggatgccaacggtaacattttcattcgcggacgacttaaaacaatgattttaagttcaagtgggcagaacattttcccggaagagctggaaacgaaactaaataaccttccttttattttggaaagtatcgttatcgaacgtaacaagaaattggtagcactcgtctatgctgactatgaagcattggattctctcggactgaacaatccggataatctgaaaaccatcatggatgagaaccttaagaacttgaacaacaatgtagccgcttacgaaaagatcagcaagatacaactctaccctactgaatttgaaaaaacaccgaaaaggagcattaaaagatacctatataacagtatagctgtcgattaacatgttctaaaacatagggaaagaaagggaaagcgggcagttacaaaaaaatatataaaaaaagttggcttttcgagaacaacatatcgaaaaagtacatacctttgcagcgttttaataaagcaattgattgtattacgtttttaaaaagcaaagaaaatgaaaaaattagttttgatggcagtagctatcgtagcagtatcattcgcatcttgtggtaacaaagcagctgacgcagcaaaagcaacagcagattctatccgtatcgctgactcaatcgcagcggtagaagcagcagcagctgaagcagcagctgacacaacaactgttgatagtgtagcagtagaagcaactgaaactgtagtagccgaataattcagttacaagttagagagaattgaaagtctgacatgcgaaagtatgcacagacttttttttatgttcttatattaaatgatttcggattacaacaaagaataaaggcggtttatcttgaatggataaaccgccttcactataatgtaatagctattatttattcagcaactacttcgaaaggaatttctaccgaaacttccttgtgaagcttaacgatagccttgtaactaccaacttctttcacagcgtcttttacaacgatgatctttctgtcaacttcatgacccagtttagacaatgcttcagcaatctggatattaccaacagaaccgaagatagtaccggttgagctaactttagttgcgatagtcaaagaaacaccttccaacttagcagccatagcttcagcatctttcttgattttctcaagtttgtgagcgcgctgtttcagttcttcagctaacattttctttgcagaaggagaagcgatgacagcttttccagtcgggatcagataattacgaccgtatccggatttcacgtttacgatatcgttcttataacccaagtttactacgtcttctttcaatataatttccatacttttcctccttcttatttcatcatgtcagttacataaggcagcaatgccaagtgacgagctctcttcacagcctgcgcgatacgacgttggaacttcaaagaagtacccgtgatacgacgcggaaggattttaccttgttcattcaagaatttcttcaagaattcaggatctttgtagtcgatgtacttaataccgctttttttgaaacggcaatattttttcttcttaacgtctactgacggcggagttaagtatctgatttctgattgaacttgttgtgccatgattaatcctcctttttgtttgatttaacacttcttctttttgcagcatattcagcagcatacttatccatcttgaaagtcaagaaacggataacgcgttcatcacgacggaagtttacttccaacttgtcaattacagtaggatctgcattgaactcaatcagctgatagaaacctgtagacttcttctgaattggataagccaatttcttcagtccccagttttcttcattgataatctcagcaccttcagcttgaagaatacctttgaatttctctaccgcttccttcatctgaacatcagataaaacgggagttaaaatgaaaacggtttcgtattgattcatacttcgtttaattaaataaataaattatttgatttaaaaatgcgggtgcaaagttaggcaatttattttgaactgcaaacatttaatctttttttgtatcaagaagataggatttatcccggaagtaactaactttgcaaagttgtttaaacaataatttcatgatagagcaatttaacttcgacatccggcttatatttgccatattaaatggtaaagtttctgcggcaattaaccggaaactataccgtaacttccgccagaacggtttagaaatcagcccggagcaatggacggtactcattttcctatggaaaaaagacggtgttacacaacaagagttgtgcaatgcaacttttaaagacaaacccagtatgacccgtttgatagataatatggaacggcagcaccttgttgtccgtatctcggacaagagagaccgccgcacaaatctgattcatctgaccaaagacggcaaagaactggaagaaaaagcgcgcattattgccggacagaccttgaaagaggcgcttcacggcattactctcgacgaattgagtatcggacaggaagtattgaaaaaggtattcttcaacacgaaagattaaacagagaaacaaccgtttaaatcataaaatccactaaatcctatctttataatggattttttatttaaataatttcgctcgttaaagaattatgctttaatttgtgactggaatataataatctattaaaatacacacacatgaaaggcttattaaagaacttgggattgattttaatcttggtcggagtagtcatcttgctggcttgttcctttacaggcaatgtaaacaacaatgccatattgggcagctcggtagtattagtagtactgggactcatttcttatattgttatcaataagaagatcgctgattaatctcacagaaatcaataaaaaatcccggaaacgaatgtttccgggattttttatttcagttatcaagaagtaaatcgcattaagattcaacttccggcgtaatcagcttgtagccttttccgtgaatattgataatctcgatagaatcatcttctttcaaatgtttacgcagtttcgtaatatacacatccatactgcgggcattgaaataattatcatcaatccagatagtcttcaaagcaaagtcacgctgtaagatttcatttgcatgtgcgcaaagtaaaccgagtaactcagattcttttgtagtcaacttagtctgcttaccctccgttgccagaatctgcttctgagtatcaaaagtaaacttaccaatcttatagatattactttctttgttcttctttccgcgaacacgtctcaagatcgcttcaattctgaatgtcagttcttccatactaaacggtttggtgatataatcatccgcaccaatcttaaatccttccagaatatcttccttcagcgtttttgctgtcaaaaaaataataggaatctcggcgttcgctgcacggacatcctgtgccaatgtgaagccatctttcttaggcatcattacgtcaaacacgcacaagtcatatttattcttcaagaaagccttataaccagcgtctccatcaggatataactcagcagaataaccttttgcctgtaaatattctcttaaaagcatgccaagattttcgtcatcctcgcataataaaatacgcagtttctcgtccatatcaattattttttaataaaggtaatgcaataataaatttagttcctacattcaggtcactttcagctcggatggttcctttatgatcgacaataattttcttcacataagccaatcccagtccaaagcccttcacatcgtgcagattacccgtatgcacacgatagaacttttcaaatatctttttcaggttttccttcttgataccgataccattatcctgtatcgaaatcatcagtttacccgattcattccatgttctcacgttcaattccaaatcctcgtccggctttttatacttcaccgcattatccatcagattaaagatgacattcgtaatatgcatctcgtctgcaaatataacaggatcggtcgcctcaaggttcgatgttatctttccattataccgttccactttcaaggcaaaggtattgacaactcccgttatcaattcgttcgcatcgatttccttcatcttcaaagtcgccttctgccggtcgaacatcgacatttggagcaccttttccacttgaaaacgcaggcgtttggtttcatcatttataacccccgatatatgctggaacatctgcggagattttccgaccgccggatctttcaacatctgcgccgccagcgaaatggtggagatcggagtcttaaactcatgcgtcatattattgataaagtcattcttcatctccgtcaatttcttctgacggaacacgatataaatcgtaaaaatgaatgtcaccaacaacaccattgtaaatatcaacgacggaatcatgaaactgatcgaatcaaaaagatagtctcttcttcccggaaaatgtacattcagtacactcatcttcgcaggcggatcatttttaaacaaggcctgctggtacacttcatcatttcccttcggatcataatccgcacaacgatagacttcctttccatccttgtcaatcaccgtaaagtgaaaaggcaggtctatattattattatacagattcgatttcaagtaaccgtttaaatcaccaaaccgtactctatctccgatcgacttgtcacttgcccgataaatcatctgccagaccacttcattaagtagctcacgttgatacatatatcggttcttgatagcctcaatcagtgaacgcgaagtctccggaatcgtttttgatcctctataaggagagatcatagctttcggaagttcggatggtttggtagtcatcaccttcaattcaaaatccgtataaacctttccatctttagacttcatcgtaaaacgttgcgtctgctgaaccatattattctgttgcagcgaaggattgttctcaatcaacgcttttctttccgcttcagaaatatcctcaatcaaccaacgttgcgtttccgcatattccacatccttagaaacctgatccagactattgcgcacagccatatcaaactgttccttccgggttttcatcatttcctcaatataactgacctgtaaatacagtaaactgaggaatgaaagccccattacaatacctaatatccaaattgttgacttcttcatagcaacaaaattaacactccctaattaacactcctaatgcattaacttgatttaaccggaacttcccggaaattaaccgtatagagccatttaggttgtattttgattactacaacaataaaacccctactttggtttgcaaatttaataaaaaattaaatcttttccttgc

SEQ ID NO: 11769 - DNA, 878 bp, Unknown
  gut microbiota DNA sequence
agaaagaggaacatttactgaatatctctaaatagtgttagcaattccgttgctaatgaaaacgctccgtcgtagtgattacgatggggcgtcttcattatagttagtgtatgttacagtatagtatgttttagtaaactgattactttttgaaaccgtttgctgtggaggtttgcttacacttgtcgcatagccaatgccttattctccgcagcttccataatttcccgttctccgggtcctttatcgttaataccgcaaagatgaagaattccgtggataatgacacggtgcagttcgttgtcataagaagcgccaaattgctccgcgttagtgcgtattgtgtccaggctaatgaataagtcgcctgataaacgatcgccttcacaataatcaaaagtaatgatgtccgtgtagtagtcatgttgcagatactgacggtttacctctagaatcttttcgtccgagcagaagatataagcgatttcaccgagtcttttcccgtaagaagcagctacggcttttatccattccgtagtctcacgtttcttgatatcaggcatttttacgccttctgtttgataagttacagccataattgaatgttatgatttaaaagaaaaataaataactgattaagatagcggctatgatacccgagaagtctgctatcagaccgcaagtcaccgcattacgagtcttggtgatccccacactgccgaaataaacggccagaatgtagaatgtagtgtccgaagctccgcgtactacacaactcatgcgccctacaaacgaatccggtcccagttctttcatcgtatcaatcatcaggccgtttgcaccgctgccactaagtgatttcatcagtgcagtaggca

SEQ ID NO: 11770 - DNA, 821 bp, Unknown
  gut microbiota DNA sequence
atagaagtctctccataagtataatgtacatcgccgacaaaattaaaatcttccaagttaccgtccgcattatacgcaaatgtcagattcataccttcatagaaatctccaggatttgtaacagaagacaaataatcaccttcatagctccaagtattaaattcttccgtttcatcatacttatcggcagcggtagcttttactattttaccgtcttgcaatgtgtaaactaaattttccttcgtatcatccagactaattgccgttatcgtatttccttcatacttaaactcacggtttaaaagcttatcatctgtcgtagcgctgaccaaacgtccttccgcatcatatcctaattcaagaagtaaaaagcccatttctcccatatccatattaatagattttactctcatagccttttgcaccttcagcacaacattctccaatttccaagaattggctccacgaaccagatttacggtatattctccttcgggacagtcagtcggcaaagtgaatgtcaatccatcagcagtaaccgtaacttcggaaatttcaatagcttctgctccttctgctttcaacacaatcttatcgccgtccgcatatccgctacctccaagcgtcacttcgcttcctggacttacctcttcattggacaacgaaggactcgtaatcggactgtccgcatccgtcaaagtgatagaaccaagtgtccactcgtttccgctttgtgtcaatatcacattataaactcctgctactaacgacatagggacagtaaatgtaactcctgcattagaaaaagcagcatctattgc

SEQ ID NO: 11771 - DNA, 9331 bp, Unknown
  gut microbiota DNA sequence
caaagagtgctttgaccgctatggagtagatgcagtaatgatcgggcgtgctagcttcggacgtccgtggatattcaaggaagtgaaacactatctggaaaccggtgaagaactgccaccactcagtttcggctggtgcatggatgtactacgccaggaggtggtcgacagtgtcaatctgctggacgaacgcagaggtatcctgcacgtacgccgtcatctggccgccagccccctattcaaaggaatttccaatttccgcaacacacgcattgccatgctacgggcggaaactaaggaggagctctttcggatatttgatgagatacttgctactatttaaacatcggctgtgcaaaccactttttaaacatccaggttgccactacatacaataagaatgcggagaaaaatcctaccacagcgtcgatgacgtaatgtgcttgaatatatacggtagccccacagagcaacaaatagaaaggcagtaaacaggcgaacagcttcttactgccgcgccaagccataatcatcaagatagtagaaataccgacatgtgaacttgggaaagcagctgtgggacgttcacccacttgttgggagctttctaccaggctataaaagaatccgtgctgatatcccggtccgggcaacaactcctgatgataattgaaatagtcaccgatggcaggaaaaactcccttagccacattatcaaatccgatagccggaaaatagaactgagggcctgccacagggataaagatataaagcaaataatatataaagaaagaagtaaccagtacaaaggacatcttttcgaaccattcgaacctataaatgaaataaaacaacgccacaatcagcatcatcggataatagaagaaatatcccatattaaacgcttcgctgaccaaaatatgaggaaacgtatggcagaaccagatagcaggttgtccactgaagataaactgttcgatggtagcaaagacatggtccaggttcggaaaaaagcgattgaattcaaaagtatccggataccaataggaaagcaggctcatctgaatgacgatacgcacaaacgccgagaacttacaaggggcaagccgataaagatacatcaacaggaaagtcattgcagcaatcatggctctatccaataacatatgccatggatggtccatcctctgaaacaggaatagaatcaatatggaagtcagcagattataaatcaatgtaatcttctccacagcaaacaaccctttccgggtctctacacgcttaaataagtctaaagccatccttcgtttttataccaggcaatggtttcacgtacccccctctccaaatcgtatccgggggtatatcccaattcgttaattgtcggggttatatcacactgccagttgcgttgtttcattatcttatatttatcagaattcaatgtactgcacttcttggaacgcgtagcaacaaattcagcgagcaaagatataacttttagcacaattaacggacatttcagatgaagaacaaacggattccctaattctttttgtatcaagtccgaaaacgcacggcttttatagactttcccatctgtcagaaaatacgcctttcggatgactcttttctctatacccaagaaaatagcctgcacaatgtctttcacatagacaaaagtcagatcttgccgcttgaaaccaaccgaaaaatcaaaatgcttctgaatggacttagccattaggaaataatctgattcacgaggtccatacactcccgtagggcgataaatgacataaggaaaaccgggaatactttgaatatataattcagccttcaacttactgaaaccataagccgtgttgggcatgggagaatcgtcctcttttatcggagtgtaatctgtctcgcgcacaggaccgaacacactaagcgtacttatatatataaattgcttcgggaccatattcaactccctcaacgtatcaataaaatactttgtctgaagatagttcacgtagtcgaaagattttttgtcgaaacatttcgtaacaccggcacaatgaacgatataatcaaacttattatatgtccctttatgaccggagagttgggcacgaagttcattaggatgtgcaaagtccagttccaaaaagtgtattttccgattcttcaaatattgtctgctactggtaggacgaactcccgcccacacactaaactttcgtttcaacgcttcttctacaatgaaactcccgataaaaccgcttgcacccgtaattaaaatactctccattcctacttttcggctctatataaatacaattaaaatttcggttacaaagatacgataaatataatagtattattaccgttttttttatttactttgtagccatatcaatagatgatgaccaataaaaatacatattatggcgaaaaagaaagaaaagaaagagaaaaaggccggtaagagaatgagtaaaaaagagctggcagcgttgttaatagactttttccacgccaaatccaatgaagttctaagtatgaaatacattttctcggaattgcgtcttaccacccatccgcagaaaatgctatgcatcgatatattacatgaccttttggatgacgattatatctccgaaattgagaagggcaagttccgtctgaataatcacggcacagaaatgataggtaccttccaacgcaaaagcaatggaaagaattcctttattcccgaagaaggaggtgaaccggtattcatagcagagcgcaattccgcccatgccatgaacaatgacaaggtaaaaattacattttatgccaaacgaaagaacagggaggcagaaggggaagtaatcgaaatactggaacgtgccaacgacacttttgtcggtacattggaagtagccaagtcatacgcatttctggtaacggaaaaccgtacacttgccaatgacatatttattccgaaagataaactgaaaggcggaaaaaccggagataaagcgatcgtgaaaataacagagtggcctgacaaggcaaagaatcccatcggacaagtgatagacatattgggcaaagcaggtgacaataccactgagatgcacgccattctcgcagaattcggcttaccatacgtatacccgaaagcagtagagacagcagccgataagattccggcagaaatcactcccgaagagatagccaagcgtgaagacttccgcaaggtgacaactttcactatcgacccgaaagatgctaaggacttcgacgatgcgctttccatccgctccatcaaaaacggattgtgggaagtaggcgtacacatcgccgatgtgacacactatgtaaaagaaggaggaatcatcgacaaagaagctgaaaagcgtgccacttccgtttatctggtagaccgcaccatcccaatgctccccgaacggttgtgcaacttcatctgttcactccgtccgaacgaagagaaactcgctttctccgtgattttcgatattaccgagaaaggagaaatcaaagactcacgcattgcgcatacagtcatcaattccgaccgccgtttcacttacgaagaggctcagcagattattgaaactaaagaaggtgactacaaagaagaagtacttatgctggacaccatcgcgaaagcactccgcgaaaaacggttcgcagcgggagcaatcaattttgaccgctacgaggtgaaattcgaaattgacgagaaagggaaacctatcagtgtgtatttcaaagagtcgaaagacgccaataaactggtagaagaatttatgcttcttgccaacaaaaccgtagcagagaagataggacgtgtacccaaaaacaaaaagcctaaagtactgccctaccgtatccacgatctgccggatccggagaaactggagaatctgtcacaattcatcgctcgcttcggctacaaggtacgtacaagcggaacaaaaacagatatttcaaaatccattaaccatttgttggatgatatacatggaaagaaggaagagaatctgattgagaccgtgtctatccgtgctatgcaaaaagcccgttattctacacataacatcggtcactacgggctggcattcgattattatactcatttcacctcacccatccgccgtttcccggacatgatggttcaccgtctagtaacgaagtatatggatggagggcgcagtgtatccgaggccaaatacgaggatctttgtgatcacagctcaaatatggaacaaattgcagccaacgccgaacgtgcttccatcaaatacaaacaagtggaattcatgagcgaacgtctgggacagatttacgatggtgtcatctccggagtaaccgagtggggactgtatgtcgaacttaacgagaataaatgcgaaggtctcgtccctgtccgtgacttggatgacgattattatgagtttgacgaaaagaactactgccttcgtggacgccgcaagaacagaacatatagtttaggagatgccattaccgttcgtgtagcacgtgccaatctggaaaagaaacagctcgacttcgaattaattgagaaataaattatgaaaacttttattattgaagacaaacaacgaatcgagtccattatcctccattgcgatgcctgctttgtaggtatcacagatttagaaggtaatccctacgtagttccgatgaacttcggttatgaaaatggcgtcctataccttcattcgggtcccgaaggcagcaagttggagatgttggaacataataataatgtatgcatcactttcagcatcggtcataaactcgtatatcagcacgagaaagtagcgtgcagttacagtatgcgttccgaaagcgccatgtgccgtggaaaagtgacattcatagaagatatggatgaaaaacgccgggtattggatattatcatgcgtcattacacggatagtgaattcaattattccgaacctgccgtgcgcaatgtcaaagtatggcaagtgcccatcgagcaaatgacgggaaaagtcttcggtttgcgagccaacgaaaagccatgaaacgtttcccggctctttacctgttgaccatcttccttctgttacctgcttttcccattctcgcacaatcagataagcaggtaaacagccactcttttacctatcaataccttacaaccaaggaaggattaagcaaccagcgcgtattctccatcctcgaagataagaaaggcttcatctggatttctacacgttcaggggtagactgcttcaacggaagaaccgtaaaaaactacagccttttcggggaagacatcatcgttgacggagccgggcgcatgatctacctcacaaaagactcacacgaaacgctatgggcatatacaagtgccggtaaagtattcaaatatgatcccatctccgacgctttcacactggagattgacgtagcggaattaacggaaaaagggatctttcttaacaatctttttatcgactcatccgactgcttctggttcggactgaaaaacggtttgttctgctacgacagcaccaaccggcacatagagaatatactagaaaagaaatgtataaacaccatccatttctcaccatccgacgaaaccctgtatatcgccactaccgaaggattgtataaacgcaaccagcagaatggaacaattaccaccctattgaccgagtgttacatccagtccgttttctacgatcccgcaacccacttgctctggataggaactttcaactccggagtaaaagtgcaggatacccgtaccggagatttcctgtcgaacgaatcactgaaccagctgccacacctcccctaccgttccatcatcccttacgacccacaaacattattattgggagtagacggagcaggtgtctatgcagccacccgtgataccggatactcctggtccttcctcaatgcgaacctggaagaagaaggagaactgaaaggaaacggcatttatgccctctgcaaagacagttcttccaatctatggatcggcagttatacaggaggtgtagcctacgcaaatccgaagaaatatctcttcgaacttacccaacatgaatacaaaaacccgcaatcactgataaacaaccacgtcaacgctatcctcgaagatcatgaaggcgacttatggtatgccaccaaccagggaatcagtgtacacctgctaaagtccggaacctggaaacacttcctgaaagaaaacgtattcctgactctctgtaacgatgaaaacgggaatgtatggaccggaggttacggcacaggcgtctactgcctcaacaaacatacaggcatccgccagcatctcaccaccgaacgtcccggcacattgacaacaaactacatttactcaatcgtagaagacaacaacaagaatctatggtttggcggcatatatggcaacctcatccgatataccccgtctcaagcagggaaagcggaacaattcgcttcctacggcattacgctcatcaactcaataaccacagtcggcaaagacacgatagcccttgccactgccaacgggctctacctgttgaacaaacaaaccggcaatttcaaacaatatttcacctcgccatccaatgccgacacccggagcaacagcttcatctactccatgtatttccccacccccgacaaagtgtggtttggtacagacggaggaggcatcaacttattagacctgaaaacaggcaaagccgtcacctactccacagcaaacggccttccttccaactatatatacagcatccttcccgacaacaaaggacacctatggcttagtacagacaagggactggcttacatcaccacctccccctctcccgcaataaccaacatcggcttcctcgacggactggcaaatgaatttaacttcatgtcctacacccggctaagaaacggggactttgtctacggaagtaccaacggtgccgtgcgcttcaacccggaaaactttacccgccctctttacaaagcccccttgttgttcacttccttcgaagttccgcaaaagtcacgtgaaaagaccgaagagaaaaagattcaattcaaccggatgctgaacgaaggaaaaacgatcgagttgaaatacaacgagaattcttttctcatttcctttatctccgtctcttaccagtatcaacaagacatccactacagctacctactggagggtttcgaacaaaattggagtgctcctaccaacgaattaagcatccgttataccaatattcctccgggcaattatacgttccacgtaaaaagcatgagcaaaaacgccggacagcaactagacgggcacaccatccgcatacacattgcgcagccttactggaatacagcagtcgcctggctgatatacatcatcctgctgacaggcatcacttatttcatctggcgtttctttgccaacaagatggagaaaaagcacttctccgaaaagatacagttctttatcaacaccgcccatgacattcgcactccggtgacgcttatcatggctccgcttagcgatttaagcaaggaggacggactgtccggagaagggaaacgatacctccagatagcccgcaagaacaccgaaaagctatacaacttaatcacgcaactactcgacttccagaagatagacacaacacatctcacacttcaggttgcagagtacgatttgaaatcatacttgcaggaaaaagtgcttaacttccagtccctttgcgaaagcaaaaaaatccggatggaattatcagtgcccgaagcccccgtctcactttggatggataaagacaaaacagacaaaatattcgataacctgttatcaaatgcagtgaaatacacccctgtcggcggaactatttcaatcacaatagaacagaatgataaaaagataaccgtagaagtcaaagacagcggtatcggtattccgcgtaaagcacaacggtatatcttctccaatttctaccgtgccgaaaatgccgtcaactccaaagaaaccggaagcggcatcggactactgctgacccgtcgtctgatgaaactacataaaggaaacatctcctttaccagcaacgagggcgaaggttccaccttcctgctcactttccgaaaagggaaccgccatctagcacgctacatcctgtcggggaaaacctctcctctatctaccttcctatcggatatatccacagaagacaatagcagcgaactatcaccggaggtaaatacagaccgggaagcaggaaccgttcagcatacagaccgatacgatgaaaacgagccgaaccagacagcccatactgccaaagaacgaatcttgattgtagaggacaacgacgatctgcgtttctacctgaaaaaaacgtttgcctccatctacaccgtcatcgacaagcctgacggagaatccgcactggaatatctgcaagataaatctgtggatttgataatctctgacgtcatgatgcctgggattcaaggagacgaactgtgtcgacggatcaaatcagacttcaccacttcgcatatccccgttatcttgctgactgccaaaacggagaaagacgccatcctcgaaggattggaaagcggagcgaacgattatctgaccaagcctttcgatacggaaatcctaaagacaaaaataaagggagtattacagaaccgcaagattatgcgacagtattttctttctcattcgcttccttccgtccctgctgccgaaccaagtgaaaagaaagaggatacggaatgtgccaacctcttatctgccatggacaaagagtttctggaacgttgcacaagactcattaccgaaaatctggcaaacccgaacttcaccatcaaccagctctcccgcgaactagcgttaagtcgtacgatattctacgaaaaactgaaagctctgacaggacaggcgcctaacgaatttataaaactcatgcgcatgacagaagctgccaacctactaaaacaagggcttccggtgcaagatgtcgctctcctggtcggtttcacagattccaagtactttagtacagcatttaaaaagcatttcggagtatctccaagcaaatttctctaaataaaagtttgcatcacttttaccctcacaccctcaccctatgtctcgtcctgattccctgtattacataagaaatgcaaccgatatacacaggaaacacaaccggcatacatctgttatcccttcgttatctatccgttaaactaccgatatggtacattcaccacggccgtgggaagctaactataccga
